United States Patent Application Publication US 2014/0057251 A1 - sequence listing, part 130

SEQ ID NO: 238569 - DNA, 2538 bp, Cannabis indica
attaaagatattcatttgcaggacctaaaaatttacgtactacctagaggacgaaatttaaaaaaataatatatatattaaaaaaagcaaaattttacgataaaatagtaatataaataaaaaatttaatgtaaaataataaatatattataaacaaatgttatatttagttttagaaaaaaaaaaaatcacgtgtggggttagctgcctccacttgtcttcatttccattgggcactgttaatgtgtgtgaatccaatgagctaaaaaaaagcattaattattattggtcacatatatttttattacattaaattatataaaatttagtatttaatactattattcattaaaagatgttagacattaattattagtactttttaatatttttcaattaaaaattatataaaaaaacaaactactgtgatacactaccctaatctttaccccgaaattataaacttatataataaatattaattattatttatttatgtaaatttctattgctaattatattattataattttagtaagcaaatgataccagtatatttgaattgtaataaccatacaacgctaggggttatcattgcttgtttttaaattttaattgcttatacatatattttgtgatgggatgggattaacttaataataggatattgggaattgggattaattaatatatattattaaaatttataagaaatctgaaatcgtataaattgttcttctgttgggtgtactacaataatggaagatcaacctagggtgtggcaaaataataatagaagacttgggcatgtggcacaacgtgccatacacgtggacggacggcccactattacaattatgaattatttgtttcaatatttatattgagtactaccaatgtctaataattttttataatagggtctcccatgattaaattaacgatattatttaaaaaaaattcatttatatgaaatactaataaaaatattagacactaataatatcttttaacaaaaaaattgtgacacaaataaaataacttgaaaataatacaaatatgttttaagtgatacatttaatttttgtatcatgcataaacatgttcataggtttgttaatcatcatatttttttggggttataatatgttttatttgaaaataatataattatagcacgtataaaaaactgtaattaactattttaattttgtatattatgtaaataaaaagaaattatatcttacaaaccttattttcttcttattaattctcttaagaaaaaactattaaatattaatattacaattaatgttaagttatagtatcataaaatgtttataatgatcgtgtatgttaaatgtgcattttgatttgtgtcatacatatgatatatttttattaaacgtgtgatcgttaaggtcagtcttaaagtatatgtggtttaaggtaaaatcaaattttaaggcttttatatatagtttaattattatcaaaataatagttctagtttagtgtaatggtaaaatttttaaaaattcttaagagttcaattcttcatagttacaccctcttagcttaaagtaagactctttattactacaccaaattatatttttttcttatttaatattttatctatatactaatatcttttttacaatttcgagaccctaagcattcgggggctccagattcacacctagttatcgtgttatgtatagttgtgtaacttgttaagaaatattatcatcatatttgtatttagatcttaacacgatcgttaatcatatgttgtgttcatatgttcaccataaacgtattaacaataacacaacatgattacacaaattataggtcttattgtatgcataacacaaatttatgagatatatggcaaattaattttgtttatctcaattagacacattgattatatatttacataaattaaaccttcaccaaaaagagaaatttgaatatgcatgtttaaattaaataaatggtcttattatatgcccctctctagaacatcaaaagaaatatgcaacatttcttttttttttcttacaaattttacccctcaaataataaaactaaatcctctctctctcaacatattttttgaaaaaatagttggtttgtaatttatttagtaattattattgttggattaagttgtattagttgcacctaggttgaaatgaatagatcaacacatatcattcttttattttagttgtcttgttctgtcggaattctatgttttttagttttctttttttgtgttttagagacattttacgaatctagcgacattagattatgctgaagcttagagatgacttgtcacaaaatctctgggacatgtagtggctaagttcacaacatgggccaatttatgcttaccatgtacaatttttgcgatatttgttgacattatttactacatgtattgatagtttagagttatatgttggttaagttagggagaatttttgtctaacatattgcaatgtgatgcgactttctatcgac

SEQ ID NO: 238570 - DNA, 3414 bp, Cannabis indica
acctgaattttcttcaatttacgaacttcctgcttctcatggggccaatctaaacgtaatataaacgttgacacatgcaacaagggggatgcccaatggaaaatgagaagtttagaggttgtttggctttacagtttaaaaactattttctgttttttaaaactgaaaacatttttaaaaactattaaaagtcgtttggcgaaaatttttaaaaactgttttttaaaaattgagttttaaaaaactaaaaaactattaaacatcaaaatgttgttttcaattttcaaaaataatttttttttgtctaacatattatattttatattttgctcacatactcggatcctagacctaaaacctaaacctagatccggatgggttaatgtcatggtaaggtgctaaaatattttcttgacatcataattgaactcctccctgccttaatgtcatcttcctcattgattcctttctcctattacatattaataaggtactcgcatctagtgctcatcaatcaaaacaaagaagaaaaccaatcgcaaaagagtaacatgatctttggtggtgtttagtagcatggaattacagcaggcttacctcccatgatgtcgcagcatccagttgagactgcacccagctgcctgcaaatgcagaccggtgttgaaggaccaaattgcgaaaataatccggtcggaacaaccatagattgaataagacacaaaattatgcttgccatgtagcttgagccaattgcccaagtgatttgaacagcatataatacataattagtatacacattcattatttattaatattcttacttcaataatcaaagtcttatatgtatcagtattgttacttcaatatgtaatggcaatttgagatacgattttataagtagaaactgagctgagtctatatcaagcatgtacctaaatcacaaaccaggtctcttattgacaagctacatgaccaatgaaagtttggcataaatcataacatactattgctagataagaccttgtgactgtacggaaattcactagataaaatatagcctaaacaagtataagcctgcgttttaactgcatttccatactgattttagtgcgaagaagaaaccaatttatccttttattaaatcataaacaaagagaaaagattacttgaaactcttgtgatgacaatagtgttggtgtcaattataaaacgaatcaggctggagaaaatgattacaaaaggcgaactcagatgtcaaatgaaaaaatacaattttaaaacaaagtaaactggcctgttaacatcagttcgatgcaagttttaatagtgcaaacagtttattcataccaggaaatggaactatgtgagcacttgaaaaacattgttctaagcatttccctcggtgcttacataaatttcctgtatggtctaccattatcttcatcttgcatatgaaattctttgacgatacccttgtagacgaagattgggatggcaatgccaaacaatccaataatggcaaagttgcgacgtgtccaacggaagttgtgctcgagagtctctcttgcagccccccactcttctatgaacttgttcttgtttgcctccatacctccccccattctggcagtcctcctgtgagtattaagagcatgttaatacttaagaaacaatgttttagaatgaattcaacttttacttatttcttaaaaaaaacatatgtttattatttctagaaactcttaaacatatattcccaatcccatgatcaacatctctgcaataatatttagttcacaatacactttaccaaatacacattatcaatatcaaacatacaattaataacccttcaaaccaagtaaaaaacagactgtattagctttcacagacaactaatcaacatttgacatcaaagttcattgctgcataaaaacttttcaccatgatgatagtttcataaaataagatcaaaatatataagtgagatgtaatactcatgtccagccccaatggaatatcagattgcccacaacagaggaggtccaaaaattgaaaaggccatcaatgtctttaagctttaacttgcaaacataaaagaaatatgcttcccgaaaaaagcaagaaggaggattcattgcaatttcctaaaatgttaaccaccacacaagtaaacagaaaccaaactaataagacttcagctaacttaaatgaacattgttcaagttggtgatcattgttggatggtcttatatttactttctttttagaaattcataaacaaacaagatgtacacaggaagtgtattagcacaagccagatacagagaggaaaatcctctatccaaaaagaactaatgactttgaagctaaagccattttcttatgcaaaggagcaattgaaaaaagaatgtcttctaagatactacccgaatcatatatagaagaaaccccactggtaagcttgttaacaaaattcaagcaatttgactctaaggagaaagaatcaaagttgaactgatgggcaagagaagcccaaaatagattgctagagtttcagcagtagatgctggataggggaaagacaggaacttagaacccgccattaaaatggaccaattttgatctcaaactatagcacctaaaccacaagaaccatttgcagaatctatagcagggcgacgctgggcagtaggcacttccaagaggctcactatagactggaaaaaacgaatttcaagagaaggaaaaaaaaatgaaagaattggaaagtctcagctttcattgttcatcttgaaattgtttcctcattaaataaatcgaaatagcgtatcttgcccagcccagtccaggcaggtaatcccagagccaaaaaaaaaaaaagaaagatatatacacgaaaacctaaccctaaataaagaaaatgaaaacaaacagtgaaaaatcagggcaaaagggttctaatagaaaagagaaactaaagaaaacgagttatctacattcatcatccagccaattttcaacttaagaatgtaaagaaatagaaatgatcacaaatatctggatgaaccatcagactcttcatagttcataacacaattatttctccatacaaaatataagatgaagcagaaaatgaaaacacgcaattagttaagaaattggaaaagaacgtactgttaaattcttgcgaaattctcagatccgaacaacaatggagattggtccttcccagcgtatgtctcgtgacttcgtctccaaaactttacattacaatgctgcaaaaaaactatttaaaaatatataaatttatcaaattagttttttatttttatttttggttttatagtcaatagaggtccaatctttcttcaaaattatcacttatatgattcaaattttattttgtgtcac

SEQ ID NO: 238571 - DNA, 1602 bp, Cannabis indica
caagaacaaaagaatggttgaaatcaataaagatttgaaatcaaaagaacaaaagtatgttgttgttgcattgacaaatttctcttgatttataccattcttttgttcttgaagagtatattttgattgtgaagtattttcttcttcttctccaatatcaaatagactcaactgtcactaaattgaaatttttagaaatgtgtatgggattctgagacggaccaaaagccaaagatctaattgttgtcatttcctagtgaatcctaactctatttggtcatttccttatttaatggattgcaaatgtagattggttagtcttgagtagggaagcacttcttgcaacaaatgagaccctgacacgatgacaataccacaaaatcctcagggaaaaaatcaaagattgtctatatgaattaaaagccttcttcaacaaaaagaatgtatgtaacagttgtgataactttgttgagccatgggacttgtcttggaagatgaatcttgagagttcaatataaattaatttttcttttggtcttaattgtactgcatagcatgttatattgtaatgtaattaattgagaatggtgcatagcagtttttttttttaaagattttgaattacgatattttacttgtttagtatagtgacacatgctatacatataattaacgatgaaatctgattttgtatttcaggaaatgagaaagataagtttcttaaataattatgtattcttcaaactgctatccctattaccaacaaagacattgtttcaattgaaatgtgtatctaaatcttggaacaacttgacatctgaaagttcttttatccaatctcaattacaaagaacaaaactctctatctcagaattcatcttcaaagacaagttttcatggctcaacaaagatatcaaaaatgtcacacacattcctgttgatgaagaacgctttcaattcaaacagacaatctttgattttctccctgaggatgttgtagtattgtcatcgtgtcagggtctcatttattgcaggagtttcttccctactcaagacctaacaatctacattttcaatccattaaacaaggaaatgaccaaactgagttgggattcactttgaaatgacagcattatatctttagcttctgatccatctcagaatctcatacacatttctacagaattcaagttagtgacagttgaggcatttgagattggagaagaagaagaaaagtgcttcacattcgaaatatactcttcaagaacaaaagaatggttgaaatcaagagagatttgaaatcaaaagaacaaaattatgttgttgttgcatttactaatctttctagatttcaaccattcttttttcttgaagagtatattacaaatgtgaagtacttttcttctagttctccaatctcaaatgcctcaactctaactaacttgaattttgtagaaatgtgtatgggattctgagatggatcaaaagctaaagatataattgttgtcatttccaagtgaatccgaactctgtttggtcaattccttatttaatggattccaaatgttgattgtttagacttgagtagggaagcaactcctg

SEQ ID NO: 238572 - DNA, 2196 bp, Cannabis indica
gttttttttatcttcttaaatcagactttatttctttttacaaaaaataaaaataaaaaatcagactttattaattagtctctcatagaagaaaaaaagaaaaagaaaagaaaaaagaaagaaaagaaagggtacatgagttgtaatcaaaagttgaatgaaagggaataatatatataactcaaaatcaacgcgtcaattaatattgtgattgtgatgatgagttcgtatataggagaatgaccccacgaaaggtcatattttctccaaattctttgaactatatattaattaattaattaatttgtattattattgttattttacataatagaaagttttagacttcgttccgtacactgtattatattgtatttgtattattatgttgcttgggaaaaattgtgtcggcccaaagttcacgagggcttgggatttagaacaacgaaagccatcaataaggcttttctaatgaaatgagcttaaaaaattctattaacaagactagcctctcgaaacatgccatggaagctaaatacattaaaaatcagaattttcttgacttggaagtcaaatcctcggactcccttcttcggaaggcaatccttcatgctcagaatatacataaaggtctatgccgtaaaattggaaatggaggagctactaaccacctccttgcctcaatgcctcgacagggatcagtctggtgagcaacttcatacaccatagcaggtggaatgagaagttaattaggtagttgtttcataatgaggatgccaaaagaatactcaatattattctacctaactagctattggaggactcttggctttggttaccagaatccaatggaaaattcagtattagatcagcctatagaattatcaagaacttagaagataacacaaacgtcaatgaaaaatagagaatcatttggggagcccaaatccaaaatagacttaagatggtatggtagaaaattctttccaacagcctacttacaagaggtaagcttctttcgatctttaaattacacgacccaagttgtccgttttgatctatggtagtggaaaaccccttccaccacttttgggaatgccactttgctagagctatatggtttggctgcatttggcaaactagaactagggttcctagcattacagattgggatgattggcttagttggttcaaaacggaagaacataggcctagagatgtgaattatcatatgttcttggaaggggctgccataatattcaaaaatatctggaaggaaagaaataacattatccacaatggaaaatctacccgaattaaggtgataatgcatcagattaatggaagactcatcgaactagctgagattcacccaccatcgagagctgtagtgatcaaatggctcccccctccggctggttggatcatgtgtaacacgaacgtagctattggggaaaggcagtctgctagggctgctgtgtttaggaacgaggaaggggtcgtcatgagcctacatattactcatctttgtcacaatgatcccttggttggggaagtttcagctctttgttggggtgctgatgaagcgaccaaacaaggtcttaaaaacattattttcaatgttattcgattggtgcagtgtctgcggtgcaacggaaaagccatgaaataccagccttgcagcagaatatccaggatttagtggccaaattctataatttaactagcaaacttaacttctgggaggttagttggatccctagaaaatacaattgtgtgggccatggtgtggctaaatgggcaattcgatccaaccattttggaaacatcgacttgtctaattttgacagctccctgctcgatggcaaggcagacaactgaagcgacttatttttatttttgcttgtttttagatctcttgctgattattttatctttttattttttcttggttgagcttagactcttttgttagatgaggttgtttccctccttgtttgttctttcgtttttgttgttttggctgctctgttgaggcaccaactataaaaaaaattatttaatataatactatatttgatattgacttgtattaatatattgtgtaaagttataatatattgtcaataaactcgaccccaacactaactccgtgtcgggtctcgagttcgaggtctaggtcttaggtttggggtt

SEQ ID NO: 238573 - DNA, 835 bp, Cannabis indica
aataactaacatgaaaaaaaaaatcattccattcttagaacttatttaataagccccaatcgtattatattaaataacaaataacactatatttaaaaaaaatatattatattatattaattattacgaccataaattctaatacaatgtaagtcgtattatttaatacataataaaggatatgtattagcttctactataaatttacaaagagtttgggattgaagacctcgaccccaaacccagattcggacccgaatcgggacccggcctcgagccatggacccgaatcctagatctgaacctggaccaaaactcgaactcagaccccaaactatagacctagggtcaagtttatggtaaagatcatatttcctacctattagataaattatatgaaacgtgaagaatgtccacgtttcataatcgttgtacaaattagatcaaaaataactaatatcctaccctataactagcagtgatcacattgtgaaaaagacggccaaatttctaactaagagaaaattctgctagattgtacttgtaaccaaagaacatcagaaataaaatcaactcgtgtagtatgtagattttaacaataaaatcacgtaaaaaaaatccatttcccatataataaatatatcacatttattgagtattaaatatagaatatatacagattattaattatcgactcccatttatgttaaagaaatattctgagttgatagattgctagtttcattgagagtctttgataattaaattctgaaaacacaactccctaccaaaacacaaaaatttatattatcgataatgcaacccaagatattcc

SEQ ID NO: 238574 - DNA, 2147 bp, Cannabis indica
gttccagcagtccactgatcctggttccaatttttgaaccattcctcagcagaaccgcttaatgttaatggaaagcataaacacttggcatcattgctgaccctcatgactgtcattacctggttgaaatgggataaatgatcacttaggtcagagtccccggtatatgctgcactctcgggcatcttaaaattcttggggagctctgcctccaatatgtgccaggcgaatggttctcggtcctcacaatcggaacttgagtcgtcccctttttgcctccgggagacccgagcaatgtgcttgcgcagtgttgccaactcagccagaattctttcatttagtgtccccgcggagacctctggtacatgtttcttattgtctaggtgatctcgtagatcaccgtgtttttcgttgattttttgtcttaagtcaactggagggtatcttcggttttttcttcctctctctccgggctcctggtgtacggatatgctctttcggtcctctcgatcctgagggtcaagactcgcttttaagagctttcccctctgcagacctttccctttcgagaaatctaagcggacctttcggatcctgtacctttttctttctcccggggatggaagtggaatttttcacatggtttccttcggaagggtaccatatagggcttggttccctggtcttgggttttttagtgcttggtgtggactcttccggtgtttcctcgagtcctgctgggatggccttagggtgtatatgaatttttgcatggcgaccatcacctcttgtattattctattttgctctttttgaactgcgatctcggcttcataatcaacaaccttttgcctcaagatcatcaactctgtatagctaccttcgtggtaagcatcacactcgtcaaagttttcttcgtactcttcgtcgttaacctcatctcgctcctcggagcccacgttcactcttgaggccacttcctcgttctctgggctttgaacatcctgaggaggacgaggctgacgtgtatgtttgcgagttcccccattgttgatttaactttttcaaattgttgtctattaaagacgctttcttcagctcaatgaaagcacaaaaatgttgaccgaggttttcggcaaccaattaaataatgtataagaatagctgtagaaagtttaatgcaggagatttttacgtggttggggcattagtgagccttagtccacgagtcttttttattaatgaaagtatttattacagagaatgttcttggtggatttctctcctattttctctcttcgattctttaaacaaaatcgttcaaccccttttcaatctgtttgtggggcatttatagtgtttttctggggagatccctaggaatggatcgattttctttctatgttagcttcacaggggcacatattcccagcagatacaaaataagaaatacatgatctataccgtaggtatcttaggagttaggtgggtataatcttttatcccctcttgactgatgtgattcctcataatgtagccgtcactagacttatcgattattgtgtaatcgccgaaaaagggggcttacgccatctatcatgtcgtttatggaggtttcaatacgtcttcccccatgtggcattaaatgcgaagtgattgttcaagtaatctctatacctcccggaactgccttagcatggctttaccctcccggagagtaaagatgtgtcttatgctctcctccgggaggcaccttccctgaaatgtttcttttttgtctaagacttagttgatttttatgagtgattgttcttccagatccacgtgtcacctttatctgcgtccacgtattttgggaaaaatcaaaggcaataactctattataaacctgacttttattgttttcctaaacctcatcaaatcttaaagtcgacctgagtgataataaattattattaaacttaaaagctaaaaaagccatctctgtaattataaacaaatatttgttatagtataatatttcatgtaagaattttagataatcttgataaatttgttaaacaaacaccaaaacactcttaattacaaacaaatagattaagattaagtacatagttttgagaaacttgttaaacaaaaaaaaaaaa

SEQ ID NO: 238575 - DNA, 1079 bp, Cannabis indica
ttgtatccttctctctctctctcaaatctattaaatcattttatcatatttttatatatgcatttttgtttttattcaatggatatataattcctcttttgggtttttaaagttttttaattttagattataatacattatttgtattcattttgacatatatatacatattagtatacgatttcttatccctttcttgtgaatgtaagtatagtaatagtgttattaggttgaataagaaacaatagtagaagaaaattagaagaagaggaattattcaatttggtagttatatgtatttattataaaatagagattgtattatatatatatacataacaggtgtagatgaagatgatattgttgttgggggagctatgggatttgagttagtgatgactgtgatttgaatattttggtattaaaaattgaaatagaactaataatgatcttgataatgaatagtgatcaatgaaagaatataattccctgcctttcattgatagtcaaaggttcataatatacaacaattgtcaacggttacaagcttgatattaggctaataatgaggaaacaaatattacctaataaatacaattaactatcgtctaaatatatacatatacgctaaataaatatatacatattctatcacacccccgcagttgaagcgggaggttgccgtacgctgagactgtccctgaaatcttgaaatagcaccaaaggaagacctttcgtgaaaatatctgcaatttgatagcgcgaagggacatggaggacgcgtacttgaccacgggcaactttctcacgcacaaagtgaatatccatctcgatgtgtttagtacgttgatgttgaactggatttccagcaagatatattgcgctaacattatcacagtagaccaatgtagcttgatggataggacaatgtaactccaaaagaagactgcgtaactagcatgactcagaaaccacattggcaacgcctcggtattcggcctcagcactggagcgagagagtgtgggttgtcatttagaagaccaagagagcaggttgtctccaagaaacacacaataac

SEQ ID NO: 238576 - DNA, 675 bp, Cannabis indica
ttcagttgatgaagttgtggaaataggagcagaatcagtatccccagacctggctcgcttcagctgtgaacgaagagagccaccaacttgaacttggtgcgagtgaaaagtaggcctcttgactcctgaagcacaagcaagacccttccctttaacattaggatcaggagtagcaatctgcctctccatattggttcccaaatcaagagaaggaatagcatcagcaagtgaccttgcagccaacagaacctcaggatgctggaattcagaatgatcagaaacaatagtagaatctgttggtgcaatagtcatttcgccaggaacagaaccatacagcaggggattaacatactcagtaaaagtagaggtatcatgagtggtaagattcggattaacaggagtaggaatcataaggacactagaattgataggtgaccctaagaacgaactaggccctatggtagaattcagcaaaccagtaaacgtatacgattgggccaagaacggatttagcatcctttgattaggagggatagattgcggtggcaattcagagatggataatgcaggaggatgaggatagtcaaaagggccagacttatccatagatttttctttccccctaagaaggatggtataggggctaggtgggggaacaggattttcatcacattt

SEQ ID NO: 238577 - DNA, 2612 bp, Cannabis indica
ctactcatgtcctatattctacttatgaataccagcaaatttatatcatatagtcatttctctaatctgtttattctatcagatgagctaccattaaataacatacatgcacagtccattcagatttttgatgcttttaattgaatgtacaatatttaacatcaatatcaatcaaaatagcaaatataacatttcccataaaattctaacctgagtcagtcaaaggaccgatacccgagtcccctcgagtcataattggcacttgggcaggaaccatacactcttctcttttaacattagtctttcttttcacatcagtctttctttaaaatcagtccattcctctaactaggctgctctcatccagcaagctcgctaagacaagaagcactcggctcactgactgaagggcggcgagaaccttttatcatattatcatatgaaatgtgaaatgagacttagttggttgagggctgtctgttctttttttaagatgacccacaactccacaataaaaataagattttgctctacattggcctaagtgacgtcttttatatcttggacactcaagatagggtcaccatttctgttctcaactcagccactatcctagtcaccctagaaccttttgttttatcccacaattggtggtttattagtttttgcttcctgatctgctcgtaagttggttctatatgtttcaccacatccagtggcacatcaagaagtctgtggtacaggaatagacataaggcgagactgttgctctctcagatctcgaatttgttccccttgttgtctaattgtatcttgcatagcagcaattacttgttcccaatgttgaggcggtaaagaattctcttccttacctttttccccaagcccacacatcttgctaatcagactatttgattacccttgctgtataacttatcacacatttaattcacatctcccaagcatttaaaactcagacagatatcaatatcaatatcaatatgtgtatatagtacacatattcttatcataatcatcactatcctacttttcctaacatactttataatagtctagacaggtaatctaatagcaaataatataaacacttactataccatgagtcaacctatcttcgcagcaaatgtacatattcgaccagtctttaggatctttaaaaccatgactgttctaataccaagttgtaacgccctatcccatagggacgccacatgtgtgattttataaattattttagtactaataaagtaattaattattaaaatttgtggtaatattaaaaacttcactaaagtaaaactctaacaatatacatcataacgacactaaaactacgttttggggatccctgttgtaagagttttacaaaaaggctaagtacgacaataattcaaaataataaatcaaaatacatgcagatacatctcaaaatacaactcctagcaactcgacatgcaggccggtagggtcaatatgtaaattgctggagaagattgtcatcttatggctgatctagctttgttttgcctttacctgcaccacagagtacatgtgagtcacaaggactcagcaagagaagtaataatgatacatggaataaccaattattcacttcactattatggtttgattgagtaataacattcaaaaatagataacataactagccatatgcatagaaataaaagcaatcataaattgcattgctaaatcaagaaattccatatcataatctggcatcatatatgatgtcgctgcatcaactaatcggatgagcccatgccacaatcttgcaccaatgtattgctttgtctaaccaaatgagcatgtgccacaacttggcactaatatatcacatcgcctacccaagcgagctcatgccatatccagacacctatatgtcaccgccgcccttgcgtaaccaggatcactgacaagaagaaacctaacaacagtttcactctgtgccatagcctagcatctatatgtcactgctgtccatgcctaatatggatcgccgataggaagaaacctaatacgatttcggtcgtgccatagcctggcactcacatgtcactttcgcccgtgcctaatcaggattgccgacaggaagaaacctaacaatattttcaatttataatcatgactttataatggttgcctcacaggcacaacatgaataccggtatccacatatcatattgcctactcaagcaaatttatgacatagcctgacattcatatatatatatatcgcattgcctaattaggcgagcctataatttagcctggcatccatatgttgcattacctaattagataagctcatgccataatcttgcattcatatactgcctcgtctaatcaggcaagtctatgccatagcctatcatcacatcacctaatgaggtgcacttgtatatcacattaatagtatcatcacattgtcattgcctaatcagacaatcgacaattacaaaacatgtcatgtcatgtggtacattatacttttcttaccttaagtctcaattcaagtatgttggctgcctgtatggagaacgatcaatgatctcgggccctatgtctacaac

SEQ ID NO: 238578 - DNA, 827 bp, Cannabis indica
gtaagaaccatcacttatgaaaaatcaactaagtcttagacgaaagagaagtatctcagggaaggcatctcccagaggagggcataagaagtatctttactctccggaaggccagagtcatgctaaggcagtcccgggaggtatagagatctcttgaacagtcacttcacatttaatgtcgcatgggggaagacgattgaaattctcatatgacagacggcgtaaccccctttttttggctattacactataatcgatgagcctactgacggctactttatgaggaatcacatcagtcaagaagggataaaagattatatccacctaacccctatgatacctactgtataggtcatgtatttcctagtttgtatctgctaggaatatgggcccctatgaaactaacacagaaagacaggtgatccattcctagggattaccccagataaacactagaaatacccccacaaacagattgaagaggggtggaacatttttggttttaaggaatcaaagagagaaatccaccaagaacattctctgtaataaatactctcattaataaaaaagactcgtggactaaggctcattaatgccccaaccacgtaaaaaatctcatgcattaaactttctacagctcttcttatacattatgtaactggttgccgaaaacctcggtcaacagaaaccaaactagaccaataaatttctcaaaccaaaccaaaccaaactattaagtatagtttggtttggttcgaaattatagtttaagtgaaatatataattatttatattttttaaagtaattgtactatttttaccaagtt

SEQ ID NO: 238579 - DNA, 706 bp, Cannabis indica
cctcttcttgacttgtttgttaaagtacctagcaacatattgttggtagatatgctactttaagttggtttggtctcttctgtcttctatttcttcaagagattttgccaacaagatgcggtttacgtcttggtcatagtacaccaaaagtatgagagtagactattggtagatcatgccaactagggtacagaccagatggccagccacattgagagagcataacctggacagttagacgaagctatggtcagccagcctgtggagagtgtggtcggccagcttattgattccatggtcgaccatcctgttgaggccatggtcgaccaacgtttttaaggccaggtcgatgctacagttcgatcctatttacactcaattggctttgcccccaccatctctatctccatctctttgtcattatttttactaaaatatatggattagtcatgctctttctatgtgttactatttagtaaaaataatattgacgtttagttttatgtttaatcttttattgcattatgtcttgatgtattgtgtcatttctaggttctacataatattaaatcatttcttttatttgtaagaacttgtatactcaaaatataataatctttaatgttacatcatttgtgtcaactttgtgaatcaaaggtacaaactggccaaacaagtatatggatgattcttgaagcctttctct

SEQ ID NO: 238580 - DNA, 1509 bp, Cannabis indica
aaattatacttattttataatagcaatttttgttaattatattcaacggctaaatacataaatctaaataaaaaaaattgacagttggcaaactgtaaacgattataattaccctaaattttattatgtcaatcaatcattgattaaaaataaaaaaatattaacatctatctaagtatctatactttaaggcaaatgaatttctcgattaaaattagtttatattatattattaattaataatgcttactctactctgagtctggttttaaacttttagggcatatttttttttaattttattaattttttttatgctacaaaaaagaaaagaaaaaagttttggggagagagaagctctgtgttgtttctcagctttcattcttttcccggaaaattcttgatcgaaacctttcatcttctcaagtcggtgatttttttttttgttttctttcaatctacttattctactgtattttttttttgtgctaacatcaatttcggctatggcgatgatattcttctgctaatctacaatgagtttttgtgattttgaattgttttaaaatgtgttgattttttcttcgccttctcgcagcactgattctgaagctcgttactaatggcgctgtcggaatcagacctcccaacgatatactcgttcttgaccaactcattgagtggcgacgaaaacgttcgtaagccagcagaggaggctctcgctcagtgcgagtctaggcctggtttctgctcttgtctcatggcgagtactctctctctcgatgtctctctatctttttgatttgtcgtttgtttcttcattagaactgatactgtttgctccatttttatgttgtttggtaatatagcgaatagttttatttttattctagtatttgttattattttgattagatttccgtactgcattgtaggaaattataagtgccaagcatttggccaatcaggtggacgttagattgatggcctcactgtatttcaagaacagtattaatcgctactggaggaaaagacgtgattcttcgtgagacactgttcattgttcttttggattttaatattaaaatgcatatggtgaaagtggtagttgttagagcttagaaattcacaatgtgtgtatttgggtacctgtatcagcccatttgattgaaaaatacttctatttatatacaatgcaatttgtttatgcgagtatgtgatctagtaaagcatttagtatctgcatttgttttcatgtacaatgtgaacatattgttttcaggggaatcagcaacgaggagaaagtacatctgaggcaaaaactggtatcccacttaagagaagaaaattatcaggtgtttgttgcctttgcttctatttttttttttttttttgtacaaaaggggtcatgttctccctctatctctctaaatatatgtgatataaatttgtctgcttcatcatatatcgttcaagatttaccatcttctttgaattattcttcttatg

SEQ ID NO: 238581 - DNA, 843 bp, Cannabis indica
ggtcctggtttcggtcttggtcctagtcctagtccggttccaattttagttgcaattatgagttggagtttgggttcgagttcgagtcggggttcgagtctgtgtctaagtttgggttcgggtttgaatctaagtttaggtctagatcgggctccgtgtgtgggttagtgtcttgggtgtgggtccaggttcgggtctgactaccaggtttcgatctcgatctgagtccgtgtttattttcgagtctaagtcctaggttccaatcccagtttgggttcgagttcgggttcgggtgcaggtttaggtttgggtctgattctgggcctggatctaagtttgggtccccggtttgggttcgatttcgggttcgggtccgagtttgggtttcgtcctggtgtgggttcgtgcctaggttcttgtcctagtttgggtccagggaaggttttgcgtctgggactggaacaaaactttggattcctgggtccaggtgaggtcctaattctggttttagtcttagattcagatctgggtcttattttcggggtctaggtccctggtgtaggtcccctatccatgtcccgttcctacctcctggtccgggtccaggttcgggtttggatcctgagtcttggttttagtccatgtccctgtccggatttgggtccaagtctcgatctcagtcttggttcgagttcaggttcgagtccacttttgggtttgggagtgggttcaggtctggatttgggttcgggtccttatcagggttcgggtccagggctgggtcccaaatgcagacaccgactacgggttatgtccaagccctgggtccagatccggatccca

SEQ ID NO: 238582 - DNA, 460 bp, Cannabis indica
ggcatcccgctgaattgccccacagtttggagcatttgaaacatcattggcttgagctcaaactgcggtgcttgtatttctggcctaacaatgcctggattgagctaattaaacatggcggctgcatactctcgtataacccttgctcgatcatctgccaatatgaagggattaactatttgttcagccatcccatcatcatcaagattctcagccatgatgtttcaccccccaactcgaaccaaaatcaactccaaacctatcgaactgctccagatcaataaattatcataattatagcatatcccaagcatcgattaacaacaattcattcattaaatcaaaattgtataataaagtgaacttagacttcataaacttcaccttaaccaaacaaaagcaagcagccactaactccaattgattgaacctaagcatactccaaatctagtctacaaac

SEQ ID NO: 238583 - DNA, 613 bp, Cannabis indica
ggtctaattaagtctaaggttggggtcagtgtctagtctagaccgtgtccaaggtccaactccgagctagggttcttggtccaaggtttggagttcaaggtccaaggtatggtgtcttcaccgggggatgaagttcaagttcgagttggggtcgggtcaggtctaagtcgaggttcaaattgtggtctgggatttgggtctggttcaaggtttggattgcagtctgaggtctaggtaaaggttgattgacgttgtagtatcggggtctggatcaagatcggggcttgaatttaaagtctgaaatccaaagttcaagtttaaaataaaaataaagagagaatcgagtttagtttcacatatgatataactaaaaatatatattaaaaaaatatatataaattaatacagaacataatattattttataataatgttatacaatcgttttgagaattatagggttccatctcaaaaccaattgtcaatatgtggagtagtttatgttcttatatatggctcaattctttaccattttattctatatgggacaatgtccacaacaaatagcaccctattcctgattaaattacacagtaaaacatgagataaataa

SEQ ID NO: 238584 - DNA, 1477 bp, Cannabis indica
gtcaaactggaatccccatgaatactgtagatgtgctgaatcctatcaccacaacaggcgtaacaagtttggccaccacagctggctaacctgacacgagcaccccagtggatccaagtggtaggccatgcctcctggagtagacccaccgtgcctcactagaaggacccaggggtgacagttccctaggacaacaactagacctcaactctagatctacgctggagagacaggcttgggggtgggcaaatcaataattggcaagcctcacctggacctaggagaagaccttgagttggctagaatcaaggaagctataggccatgcaggcctacctgaagaaccacacagtgctgattgtgatgtttttgcttagtagagatgcaaattcctaagatggatggatcacaggagtacatcctttgatctcacaaagcagaattagatcgaggtaaccaggaggccagcgatctaataagacagttcaattagagagccgacagaagaggccataatctccttagggatccactttaaggaagactgcctccaagttcctcaagaactaggacagattttctcctgccagagggaagacaaacctttcctcaaaggtcaaacaacgagaacagccagatccatacaaccagttgcttagggggctggccaagaatctttggcttagcagcactgcccattatgtagccactagccagccagccatcaacaggagtactaatggtcggccagggtacataacttccttccagtttcaaaagatgttgaaggaattttttacaaaatcaaattcaagaaatttaccagtctaagattcaacaattcgtgtaacacgagtaggacagtaaaggcaatagccttttgagtgcattggataaccaatgaaatgatagtgaactgttctcgaatcaaatttttttaaattaggatcataaagccttacttcagctggacaaccctaggatttctcccagtccacaactcaaaaggggattagggaacatatttacttgaagcacaattcaaaatataagtagcagtcgagagtgtttcatcccataagaactttggtagatttgatctactcatcatgcttgtaaccatgtccattatagtgtgatttctcctttcagctagcctgttttgcttaggtgaacaaggcatagtgtattgagcagctataccattttctcgtaagtactcagcaaaaggccttacgtgttgttcagattctatataatgaccataatattctcctccacaatccaaaagaacaatcttcatcactcttcctaattgtttttcaacctcattttgaaatattttaagttcatcaaaagcatcagatttttttttgatcaactacgtgaatccatatcaagaaaatcatatatgaatttgataaaatacttatttctgtataacgtaggggaataaggtccactaatatctgtgttga

SEQ ID NO: 238585 - DNA, 813 bp, Cannabis indica
tctattgtgatagggatattgttgtttatgaattatttttgttcaaaaaaataaattaaattaaatttttcatcaatttggctaaatatatactaatgagatatacatataaaaacaattttatcaaataccatattattattattattattattattattattataaaaaaaatgtcaaataccatccatcaatatcatattactaagtgatataataattaatatcggtcctatttattttatttaaataaaaattataaataaactcaggatcggccttaggtatagacgagttaggcccgcgcctagagcgcacttattttaggagcctaaaataaaaaaaaatatcttttaaaaaatatgtatatttttttaataatttttaaaaatatcatttatcgttatagtaagggtctagcaaattttttttgcctaaaacccatttcaactcagagccggctatgaatataccactaattatttagaaagtgttctacctcaaaataatgctatgcacgaaggttttaattcgtgaaaaacttttaagtttaatgaatttagttgattgttgttttattttctatcaatttggtttaaataataaattttattattatttttaaaaattattggcttgttatcaagttggtcttttatttacccatttaatcaaaaagcatgcatgcctagtttacttttttgtatgttttgaagctgatttgtttgtgcattatttaagacctttattaaaaattctctaaggttttcgtattacatcatttacatgtaatgtgttggattttatgcccta

SEQ ID NO: 238586 - DNA, 618 bp, Cannabis indica
ccatgggtgggaatggctgggttgttagcaggggtatttgagtgattaagatagtatgtaaatcactttggctgctcaaagtctccaagtcttctagggtttttgcttcacagaattccacttctaaaatgacgaagagaaccaagaaggctggcattgttgggaaacatggtacacaatatgatgctactttgaggaagcatattaagaagatggaggtcagtcagcaaagcaaatacttatgtgagttttacgggaagtatgcagtgaaaaggaaggctgttgaaattagggctgcaaagctggaggagccaacaccctcagtactgcgagtgctgtgactgttaggagcaccatcagaaggctcaggcagcagaatctcggctaagtttcagatttctttgtttttgatcaccaactaaagttatatttgtgtaagaaagagtttaatacctaatggaccaaattttattgtctattgactatgtagatggcttccaattttgatgtatgatcgatgtctactttttgaaaaatatatatacatatatatataattatataaatgtgggctacggtaagagtaagagaaggagtaggaaatgtgcgagtgaattg

SEQ ID NO: 238587 - DNA, 706 bp, Cannabis indica
attttaattacactaacaaagtaattaaaatgtgtatactaatgtatttgtttggttattcaaaatcaaaagaagaatcaattgctcccaagaaaaaaggctctggtattgagctaacatcagaagagggaaaaggaaaaaatacagaatcacttcctaatgttgatcatattcaaaaacttaaaaaattgcttgatgagaggagtggttacattggaggaaggggccacatatggaaacgtaaatcctcttcccgttacactcatgcacgtactctacaatctgctgatgaaatacaaagattagagggactgataattaaattgcaaaagcaagttcaacacattagtgaaaaggttccaactaaagaacatttgccaaaggacaacaagatagtggatatgcattcaactagaccgtctcaacctcacatgcctcagcctttggcaagtcactccaacatgcatggacccttaacttctcaatatcagtggcagataccgcaaccaccaccattgcagcagcctctgtttccatataactatccctacacatatggggccccattgcagcagcctatgccaccctatcactatcccaacacaaatgggctcccattgcagcagcctatgctgccctatcactatcccaacacaaatgggctcccattgcagcagcctacgccgccttatcacaattccaacac

SEQ ID NO: 238588 - DNA, 992 bp, Cannabis indica
caaaaaacgtttaaaaaataatagtgaaaaaagtagtaattttgtcatacgccatattattatacatatatataaaaaaaaaataaggtcaactgatttaataaaaaatgggtcgacacacataataaaaacgagctaatttattaaaggacggacccgagacaaataattcgaactcatggattgttatggcctaattcttaaaatataggtcaggcccgaaatgaaccatattgttatacgggtcgtgtcagacttttatgagacccaacctgtatttataaaaataatatattttaataaattttaaaaaagaaaataaaataaataaaaacttacttaaaaatttaaacttgactattattttttttttatttataaaaaaaggtgtataccacaaaaccgattttaagagtgtaccacaaaacttccaatattatatgatgaatctttaaaaaaataaataaataaatattatagggtgtttctgcaatgcaacccccaaaaaaaaagtgcactgaagcatcctttactgttttggcatattaaaaaagtttttttaatctatttttttttcatagttgtgtactttataattatttaagacatccaacaaaattttgagaaattcagaataagttacaatatagaaagcaatgttcaaacaatctatttacacatgtataaattaaaaagtcatgcatgcaacaaattgtttgaactttatgtttggcgatcagtgtgtgaaattttttagaatttcttaaaaaaatttcaaaatgtcttaaataactacaacatatatacgaccataaaaaaattagattgaaaaattcttttggatccaaaacaaatagggtgcatcagtacattcttttcaggaggttcattatagaattttctaatattatatggtaaataatatattttatttttttttaaaaaaaaaaactaataaaaagcacccagcaaataataaatgataataaaac

SEQ ID NO: 238589 - DNA, 1059 bp, Cannabis indica
atagaatatacatttgatttattcagttttgtcataaaattgtattgtatgtattatatttttaaattactattttctttacattaaaatgttatttttcaatataattttttattttttttttataaatatgtgtggattggattgattactttacatatcaatcaacatccaatcgccacttctgcggattttgaattttctaatccaatccaatctgtactttgcggattgaattggattgaatcgtacggattgaattggatcgactatttgataaacacttctatttatgttactctttctggttgggtatttttcttgttttggtggtttaaattcccttattttatgttattacttgaattcttgataataaaccttgtttgtttgattgtctttgttattttgaacaatgttaacaaaccttgttaataataatataagagatcttggtaatactacaccatggcttcaaatgctgcatactgaaccttggcagtgaaaatcctctgtatgtgtttatatgttcatgtatcatataaacaaaaaaaaaaaattgatttattgtggacttcactttacagaaataataaattaaggacagttttcttttattagaaaacaaaaatgactagaaaaccagtgctgaacttatgatacataagagagtagattttttttttttttttttttttttagaaaatgatacataggagagattgaatcattgaaatattttggctcttttggacataagaacggttgcatcatagaattatttcctcttgaacactgacattgagagtcttatttgggagtacaatgctgttaattaccaccacctcatcttcaacagaaactgattcacctggatgaacaataacaccgttcagattgggaaatgtcaattattataaaggaaaaacaaacaataaaaaagacataccaagaattgtaattccaagtttagcattgtaatctccactggcctggactcgggaccatgtccccaatagaagatttccacccaacaatagcatgaataacaactgcatt

SEQ ID NO: 238590 - DNA, 697 bp, Cannabis indica
attcaagtactattttgaaaaaattaagatgcgattttggttgatatatatagatttaaacattctagcattttattattaatttatttatatattgatattttttattatcaagatatgttataatttttttagaaagattttttataatttaattaaataattatcctaaataaacacctaaccatattactatttaaattaaattaaatggtattttttcgacaaaataagaaaaagagaatatattttttgttgataaattaaaaagagtatagtaaaaacaatgtgaaatctatttatcaaatgccgtatcaagataaattaaaaaaataaaaagaaaataattttatatattgaaagtgaaaaaaattaatatttcaaaatctatataacactcccaacttccaacaattaagggacctaaagaatatgagaagtttataaaaaatattaaaaaatttatatatatatattataaaaatttatggaaaccatacaatgtcacatcaatttttaagtttgtatgctggttggtagctactacaatatgtaatggtttggtgatagttgtataaaaattttctttttctctaaaaaaaaaattagacaaacaaaaaaatatccagagaaaaaggagatgttagatctagtctatagataaaaagcaaaataaaatgatgaaaatattaaaaat

SEQ ID NO: 238591 - DNA, 4034 bp, Cannabis indica
tttttctgttatgttatttttttatattatttactatttttttccttaattaatttaattttttatttttagttttgttcatcacatatttacatttttagtctatacaaattttgtattttttatttttatctttcacatatttttcatatctattctcatatatctactctaatctctataaaatttatatgtttctttataataaaataatattttttataagtgtaatttttatcaactaaattcccccccccccccccccctaactagttgtggttggctccgccactagattcaaatttgggacctcctctttgtgtgaagtgtgaaactactaaactatgtctatgaccactttaattaattatatattaattactatttttataattatttttattattttttttaatttatactccccaaaaactagtaatatatatacagatgaatgagcctttttgttttggttcaattattttgttcttttagtagtttaattttttttttccttttttactttttttttttggtgtgtgtctctttaaagtattaatatttcaaatttaaataatttaatatttattttttaatcttatagtttttttttttactttaatatatttataaactcttctatcttttaagaaataataattaaaatttaaattttaaaatatttaatatttatttaaagaataattctcttagaatttaatctttatcaattatatttagcaacttaactattagactcatactatttattttattattatatatttaatgtattattaaattattatttttaaattgtaacaaaataaaatgtaattgttgtattttaaaaatattaaactatgaaatttaaatttatagtattttttaaaaagatagaagagttttttttttttttttatcaaaagagaaggatttctaattaatcaacaagcacaaatacaaccaagaattaacaaagtctcgacaacaaactgcaaggcaaaactcacaccaaaaggcgacaaattagtctatgactattagtatctatcttcttgtgactattgctatacaatctaaacttcacaattctttgaatctcttcaacaatatgagtaatcgtgtaagaactataatcatgaatacatttgttcctattcatccaaataagataaactacaagagcaagaatcattatcacaatgttatctctaatcattccacctatactagcaatgaaagacctccatccatcaaattgaatgctccaggccttaaaaccaatccagctaaataaatcatgaacaacctgctttgagaaaaaatagtcaaaaaataggtgctgatgactttcaacagcctgaccacacaccaaacacccatgcgaaggaatgttgatgtggatgttagctagctgatctcttgtaagaagttgaatatgcatcgtttgcaaaaggataaacctgtgtttagtactattaagcctactccaaaaaaccctgtaatatttgtcttcctcacacctcaggaaactgtaatatagtctacctgccccaaatttatttttcctccaagttgccattagttgctgctgattgaaattatttcttaaatgacaaagtttcctccgagtactaacttgaatcctgaacaagcttaaagttccaaatataaactcattttagatatattacattgacccatttgaccaataacacttcatgcttcttcattatggccaacaagtacttagccaaaatagtccaattccacttggcccctaccttaaattcgagaccaccaaattactttggtctacaaaccttctcccaagaaccaagatgaactttacttctaatcctagtttgaccccaaagaaacaacctacaatgcttctcaatctccttgaatacactttggggaagaaaaaaaatattcatccaataatttctttggcctagcaagacaatatcaattatttgtaatctacctgcttaacataaatgtctcgtagcccaagtatgtagccttttttatcttatccacaatgatccatagtctttcatcctccatttggtaggtctcataggacttcctaaatacttaaggggaaacctaccctcctcgagcccaatcatattagatatctcctttttggtagaatcatccactcccccaaagtaaatattccacttggcaagattaatagtcaaaccaggaatcttactaaaatcattcaaagcttccttcagatgtctcacagcctgactagtacatttacaaaataatattaaatcatttgcaaaacagagactaatcaacttgagattcctttagattattgcaacaatcttctagtaaggaattccattaccaacacaaataaaagaggagaaattagatcaccttgtttgagccccttcttgccgttgaatttgccttgaagcctaccattcatcattagattataagatgttcctcttaggcatgtcataatccacttcacaaattttgcaggaaaacaaagaagattcagctagttctccaggaagctccagtcaaccgtatcataagctttgttgagatctatctttaaagcacaccaaggagagaaattctttctattgtagctcttgataagatcctggaatattaggatgtggtgagcaattattctctattgaatgaaagctccttagttctgattgatcaagattggcaagacctcaccaagcctagagcacaacagctttgaaatacgcttgtaaatagttgtacagcaggcaatcgacctatagtcaactgcacaagaaggagcatcaatgttttggattaaggaaattgttgtttcattgaaaacatcaagaatgctttctatattgaagaagttctaaatagcagaacaaaatttttctcctaattcaagccacatattcttatagaattttgagctatatccatcgagtcctggggtttttatgttggggatacaaaacatagctttcttaatttccttcctattaaatagacaaattaacaatagctgccgatcaagtgtaagcgtttttccaaacttaaggcattggatagttgagttagcaaccggacttgctttccctagaaagctattgaagtgatccataaaatgttgcacaacctcagtataatcatcaataatctgaccattgtgattcttgtaacaagctattccatttttttctcctctttttttaatgcaggcaaagaaataagcattattctcatcactatttttcaaccaattgattttactcctttgcattaggaagctatggatcattttatctttttcactgaacttggctgctgcaattttttcaacttccaataaggaaaggtcctctgagttagattgagcggcatgctttgcactcagatactgctccttggcctgttgatagttaatctccacatcaccaaccttcttgttaaaccttctgggaacatgtttcaacctaagacattcgtaatgaatagccagtaaacctgttgcttgaatcagctgaacccaactgtccaaaacagcttttttgaaatcatcatgatcagtccaatggttatagaacctaaaaggtttaataccagtgtatagtatgataacagacgaaacaatgcaagaacaatggtcagataatgtctcccaactcatgttaacaaaagcattagcaaacatatctaaccactcttcatttttgaaaacatgatctattctagaataaattctatccttccctccttggttgttagaccatgtaaagtgggaccccattttcctcaagtcatctaccaaacccaagggtaaccaattattggcgtcttctatttatcatctagtaatcaaattccccccactcctatctccaaaatcagtgaccgcattgaaatctcccattatgatccatggtttggacataatagaaagattagtcaagctacttcataatattttccgatctcccaaccccccccattagctgttggaaattatttta

SEQ ID NO: 238592 - DNA, 863 bp, Cannabis indica
ctttctcatctaaattccatgcacaattttcctcttctcgtcagcttccctctcatttagaagacctgatagaagtgaagcaaatacaaggagaacctttaagagcttacatcagcaggttcatgattggagcagcaaaggtaaaggggctgaccgaaaaggaaggttggccgcaataatgggaggtattgaacctctaggagagctgtaaaaggatataaaaagactaactgtgggattaatgacagaattcctagatcgagcagatatttttgtttttaaaatagaaaataagtaaatgtggttcacattttttgaaatgttacagaaacaaaattttaaaatttgacatttaaaaaatttgttttacatatatatttcatattttttttacactcttgcatcattttttttcttgcgatcaaaggtctaaagtcaaagctaggttgagtctaggagttaggatcgggtccaaaactagggctagaatgtggtcggggccaaaataaagggtagggcttcgaggtccaagcgaggttcaggaccaaggtaaaggtttgaagttcaaggccatgtcgggtaagggtctggggctaggaccaagccaagggtgtaattctagggataagtgtttttatatatattgcatattttttttacactcttatatcacttttttctcatgatcacaagtctagggtcgaagctacgttgagtccaagagctaagattgggtcccaagacttagggtcgagtttgagaatgtgattgaggccaaaaataaggggcatggattcgtggtccaagcaaggttcagacacaaggccaaggtttaaagtatagggccatggtcgagtaagggt

SEQ ID NO: 238593 - DNA, 1191 bp, Cannabis indica
atctcgcatgaatgaagaggcaacgcaaaatcgaccaagaaaccaaggatttcatcatgataatgaaaaaaatcctagaaaccaacctaggtccagtggccttccctcgaaacatccacaaccgccttctcgcgcggatagagaaaatatgcacattttcttgagtaggggacacgtgtctaatctcttctaaagaagaagaccaacgcgagatgaagcaagctcaagcacaagagaactatgatcccgtgggcatagtagcttgagtagacaaacacgagataaaagtagatctcgatgttattttgttgaccaggagagcataaataactgacaaagttactagtctgagaactactcaaagactaggttcgtaagtaactatgaacataaattctccaatcattccataacctcctgggaacagtcgtcgaaggacttcaaaaagcagtttcaggctgcaagagaccgtcgaccaaagcgtcatctttgaccaacataaaataacaaccaagagaatatcttaaagcgtacttaagttgctttagtacagctactgtaaaagtcaaaaacctaaacgacagtattctgttaacaacccttctggctggaatcacaactgacttgtctatagcaagggtgaattatgtgatgacctccaaggtcgccctatgaggaatattaatgaatttaatgaaagagcacaaatctttgtgcgtaaagaggaagcacataatgaaatgaagctattaggagacaaacccagcacaagtattgcaacaacgagcatcgtgaccacaaaggtaaaataccttagtggatcaaataccaaaagaaaggatgagtcaaaagaatcatccaaggacaaaaagaaacagaaaaaaaaagcatgagaaatatgtacccatctattcgatatatactgaatttaatgaaactcgtgagagcatctacctcgccaatgaaaacagggtcacattccacagactagagtcgatgagacacgcgaggaacaagtgagattcaacaaaatattgtcgattctgcaaggatattgagcataccatcgaggaatgtcgttaattgaaagatgagattgaaagtttaatcttgtgaggatactttaggcagtatgtgagaaatcaaggaaatgagagcctaaccaacacaataacccgaataacttgagat

SEQ ID NO: 238594 - DNA, 1140 bp, Cannabis indica
ggttttactccatgattcgtactaattgcttccttgcaatcatcattgtcttcatactttgttaatcattctaaaactcattttatccttaaatatgtagtccattgtttaataaacaaccaactttgtgacccaacattcaccaatcactcgaatacatgtctgttaaattgcatctcaatttataagcctttcccccaatctgggtgagtatgtctttcaatcattgcttattaaggtaatcatttcccaaaatctctatagtctccttatataccagattgaccatctggtcaaacataaaagtatattccatcattaccatatcaccatatgtaatacaggtaattttccttgccttagtacattcttttatacgttaccctagtaatgtccccgctttaagcctacattaggccccttacacccacaaaataatgactcttatacaagagtgcatcactttagctacttcctagactgacgactggccctacagaccgatccaagtgttttcaacgtgctttattctaactcgcacgcttcatggggaaacttcctaaatgtaatcaccccaagtcaaggacacttaactatggagttccttcatggtgggctaccaaaatagtatacttcttgttaatataggcagtcccaaacaattcattcaagtcctcaacactatgtagtcccatgcctacataatctcaaaatcactacatatacgaccttccgtcaggcgatgtgggattgtacatctactagtattttccttgcagctcacgatgttctaatcgtcatagcttgactcatgtcttttggtagtgaataaatcaaccctcataatcatttcctttaattcagttagggtttcagacaatactcataaattatcctacttatactaatagtagatcactttatatcaaaagattctattatccaaatcaattacatgaatactcccattaactactcatatcctatatttccacttcggaatatcagcaaatttaactcatattgccattttttttaatttgtctaccctgttagatgagttgtcactaaataacatacacacacactgcccattcatatattttgatatcccctcattgagtgtacaatgtttgatat

SEQ ID NO: 238595 - DNA, 987 bp, Cannabis indica
acatctttctcacacagaaaaaatcatttacaatttattatttacgattacattatataagtagtctgagcagtagtttttaggtgtcgtatttcgatagttctctaccgtgcagtaaagctctaatatagtggtatttcgactggactgttttatcttggggacgattgacaatttttgactgtttgcatattcctggacagtactgcaaatgtcttaaagagagcgacctagtctgcgactcaacccaaaaatttcacccattcacgacttcactgaacattcccatgatcaacgtctttctttctgttactactttctgagaaccaacgggagaaatacatatttctcacacagaaaaaattatttacagtttagaatttacgattaaattatataagtagtcagagcaatagtttttgggtgtggtctttcgacagttctctatcgtgtagtagagtttcgatacagtggtatatcgattgagctattttatcttgggaatgactaaaaaattttgactgcttacacattcttgagcagtgtcgcggatatcttagagagaacagcctaatttgcgactcatcccaaaaattttattcggtaatattgttcccaattttatttttcagtctctaaaacggtatgtatggtgatttataatagaggttattttttttagagcaaatgctcctaccaatgaaaacctcacaaaaaaagtcgctgggggcatattttcaacaatcaattttatactagattttgtactaggtgtactgtctttggttttaggattaccgaccggttggggcttcactctaagattctttttcaaaattacttccattttgagtaagtgataaataaatttacacatctaattgcactaattgggggctctaatgtaagattgagcgagccttctttttgcactatataacagataacaaaaataaataaaaaaaaattgaaaatcaattagtcaac

SEQ ID NO: 238596 - DNA, 1595 bp, Cannabis indica
aggtctttgtgctggaagctgggtgacttcccaaacttcgtggtgagggatcgtcccgccggggggtaccacgagtgcctaggggtgttggtggctgcctaggggtctgctgagggatcgtcccgctggggggtaccacgggtgttactgctccgggcgcaccccctggtgcctcttgaggcaacgggcctactgccggaactaggttaagatggggcagccggttcttaatccactcatacaaatgacccaaccggatcaagttttcgatttcgtctttcaaattcttgcattcattggtactgtgaccaatattgttgtggtattcgcatctcttgctgggatctcttcgtgaactgtccctgtacagaggaagaggctttcggtagtgtgtgctttgccttgtggcgaaatacactcgctcttgtgtgtccgtcaactctatgtattgggtatattggggagtacacccccttctttgacgcttgtcctccgtccagttgctgccttttgaggacctcttgctccgagagctctgaggaggtccggttaggcttgcggtaggagcggagtgagacggggcttgtctgctcatccctgaggggttacttagggtattcccgtaatgcgatgatgcgggagccaaggctgggctctaattgtatcctgggtagcggagaatcgtattccgctcatttgtggagtaaccggaggaagggtccccgagagctgtgctccgggtacataccttgataccccaattagatagtaccctccataggccactatttgggcctcttccaagttgatgtactttggaccctcttctggaagtcttagagattggcagctccctcttgttgtaattcattccagtttggggtccctgtacagatcccagtttgaagaagtgcaagttgttgttcgtcatcaaccttcttagtttttgaggcttcttctttgaacctcttcataaaattcttcaaggtttctgtgggtagttgcttgatgttagtcaaggcgctgacttcgagattaatctttcttgccgcaacaaactgtctctgaaagctaacttgcaacttgttccagcaatccacggatctcggttccaatttttcaaaccattcctccgcagaggcgctcaatgttagtggaaagcaaaaacatttggcgtcattactgaccctcatgaccatcattactcgattgaaacgagacaagtggtcgctggggtccgagtctccggtgtatgctgccatttcagtcatcttaaagtttttgggaagctctgcctccaatatgtgccgggcacatggctctcgatcctcgcattcggagtcttcatcccctttttgcctcagggagacccgagggacgtctttgcgcagtgtcgccaactctgctaaaattccttcatttagtgtccccgcggagaccgctggtatatgtttcattttgtccaggtgaccccacaaatccccgtgcttttcgttgatttggtgtcttaagttaacgggatggtatcttcgatttccccttcctctctccccgggctcttggtgcacggacacgctctttcggtcctctcgatc

SEQ ID NO: 238597 - DNA, 978 bp, Cannabis indica
atgttcaaaggccagttggagataatactgaaatctaatacctcaaagcagcccttggactcatacaaggtcataatagcgctttgcaccatgatcaggaggatctccgtggcgctataaaccttgcatttgacgagcggagatgttaatttatagaatggagggacagggaaatggaaactttaagggctcaacagcagccattgatgatcgtacaaggcaagccaccgtactgataaggagggcttaccaagtccccaatcaacaaccaactatcacatctagtatccctttttgatagttcggaagggtatgcagctgggcataccgcaaaaactcacgatggtcagccgtccgatccacgatcacaggtccaacctgttggccaaacggtagacggccaaatcctgcctgaccgtcccttgggtggagttacacacaacaacttcaccccaactgaaatctctggccaacctatcggccaaacaaatcagacaccaagaccacctagtacttcagtatttgacaggttgggcaccgcacatgacctcaggactgatttaaaccaaagaaggggcttggacaaataatacatcccaccatctgtccagccaggcatttgcatccaggatccagtttaaagagatcctaacgggacacaggccggtcaacaggctgaataagttcatctatttgtgcaagcacagctggatcaacttaaaaacatggtacaaggcctgactggcccaaaactcactgatctcaaacttgaccgagcatgcggatcacccttctccccagagattgaagtccttgaattaccccataattcaagatgccaacttggaagatgtatatggggaaagaggatcccttatcacatctgaaatattgcaaggggtacgaggtgatgtctgatgcaggatattccctgttacactcgcagaagctgcccagcagtggtacttcaagctgcct

SEQ ID NO: 238598 - DNA, 711 bp, Cannabis indica
gtaaaatatttccaacattctcaccattagacctttatggtaaggcctcttctcctttgggtagggaaaggtctgtcctagttcctaaataacctggttggacagcttgtcgatataccctccttgatctatcgactagtcttccttggagtagatctctcatgagatcttggcctcttccacaagttctttgattgaactgccttattaagtccctgacttctctgttgcggcgatctaacttcgcctggtgagatcagaagatgtacttttggtcatccatccatctcaggaattcgcacctttactgagcgaatacattacaatcagcagcgcgtggttcttcaatttggctagcttgtcacacccactctttaagtctggctaactcgagatcttctcccaagtctacatgaggctcgccaatattaagcttgtaaattcttggtcctatctctctagcatagtaccaaagatgaggttcagttgttgttcttgggggttgttccccatgggtccttcctccagtggtaggtgttagtggagggttctcccttaggaggcaaggggtttgatttgctcagatccacccggatgtttgtgtcaccctgaacagccgtaatgactagatttgtggtgcttgccgagatggcaggattgaacacatctgtagtgttcatggaaattccagtcatggctggaacatggaca

SEQ ID NO: 238599 - DNA, 3087 bp, Cannabis indica
aaaatgaaatagtcattccaccagaatgatggaaaaatcattcaattaaaatgatattccaatactttaaaatacaaccaaacaaaggaatgaaataaaaattatttcatttcctcccattccattccattacttccaaccaaacaccaccttagtgttactcaaacatgtttaggtctaagataggcattctgcgtcaattaattagtgacgcaatcacattgattaatgtttaggtctaggataggcactttgcgttaattagttattgacgcaatttttgtcaacgaatatcaataaagtaaatgcgcgtttactaaactgtaattgaattcaaactaatcaatcagagaaataaatcggtttaaaataaaaaataattagaaaatatattttattattctgtttactaaactgtccaaaaaaaaacaagaacaatattattttgtttaaataattaggaaaggtaaatattttaatttgtacaaaattgccactcttagaataaataattattttttgtttatagatttttaaaagacatattagtctttattatctttaatttataagattaaaattaaaataaaatatgttaagaaaaggaaaggtgttttctataaaaataaagagagtaacatttatttatttagttatttattgttttgctaatttgtgtgagtcttattatttttttctttttctaaaatttagtaaatagttgtacgagaattaataccatataattaataccatataattaattctcattccttttaaataaacatgccatgataatcctatttttcgtccatctctaactcttctgatctctttcttgttctctatatgcctcaatttcttcattctctattgtctcttgtgttcatccccaacatgacattgacatagttgagtgcaaacctctctctttaacgtggaagaggcatatattagagaggttgatctaactaggtaggtcgtagtgaaatatgagatttttaagcatagattaaataataataataaaatatatataaacacatagagtttcaagtaattatttatttatttttatttaagattgatctcacttatcaaaattataatattatttaattaattaaatttataaataaaagcctaattagatttttttattcaattttaattaatttttttttaatatatatgaaaatttaaaagtataatttagacataattttgtaaataatttaatacatatacaatcactaaattattaaaatttaataaaatttgataaaaatatttaggtacaaaaatcttaattaggcttagaggagggcgtagtaagcactaagcagacttcagaaacaaaatagagtataatagaagtgggtagttgctaaaacgccccccttaacttttaaaattcccagatcaataatgaaataaatgaactctctgtctattcttctttgatttgatcccaatttcaatctcaatctctaggctaatgctataccaataattaggtctgtagtctcgaatctagatccaccaccaaaaaatggataatataatgagcaagctccggaatttggatgcttatcccaaaatcaatgaagatttctacagtcgtaccctctccggtggtgttatcactatcgcctcctccgttgtcatgctcttgctcttcctctccgagcttcgtatgtactcttctttttttttatatatatatagggaaatttgcgtgtctatgtggttggggatcctgtactgtttagggttaattttttgttggagattggttaattgcacagaaaatcgttgacaattgatatgtgatggttcgtatgaattgttgaatagttctactttgaaaaaaattggaggcatttgagttgtgctaattattgcgaaataattggaatccggttagactggctgtttaccacccgtggattaagatattcttcggtttacggttctagtttgtttaactggcttgctatattttcgttgttggtagaattttgtttttgtgaattgtgccgaatccgatgcagcaatactcttgcatttcattaatctattctttactgttttgacttaagctgatggttctatttttcgcaagtgaaggggttttagtcaaccatgtattaccctctatgtatttatctgtcatttattattttcctttggaaactttttgtgtggtaggaggtataaggtacatccatttctattcatagtcatatggttataggttgatgtcttgttctttctagtgtttttattctgtatgagtttctctgataaatcttgttgttttttttctatttttaattggatgcagggttatatctacatgcagttactgaaacaaagcttgtagtggatacttcaagaggagaaactctacgtatcaatgtaatgctaattatatgagagttatgaaatttattttaattaatttacgaatctatctttgttattttacatgtattgattacttgttctcttgtcacatgtaccttctttcttctaatgaaaattatttaaaaattcaaccatgagtccatgattgtgtagatagtacttgaaatattgtgttggtcatggaaactattctttaataataccatgctgtgatacccttcgattatctattaaagttttgaaactaattgatctctgctttttttgttgttcgaaagtgcagtttgatgtcaccttcccggcccttccttgttccatacttagccttgatgccatggacattagtggagagcaacacctggatgtagtatgtataattttatatttttcattagttctgaatgttgttgtcggcaaaaaaaaaaggggtttttttattcttcataacttggtgacttgtgaccagttttgagttctagttctaatattatttgcagaaacatgatgtaatcaagaagaggatagattctcatggcaatgtaatagaaactagacaggatggaattggtgctccgaaggtattgcgtgattgtaattggccgaccttttgtttcttatcaccttatctgtatacactagttttatgtcgatcttatg

SEQ ID NO: 238600 - DNA, 832 bp, Cannabis indica
tcaacatataagtctaaattatgtccaagcccaagatagagcaaacttgagagatttccaagttgttggggaatcattcccttgaattctgcatatgtgaggttaagatatcttaaactcacaagagaacccacaaaacttggaatttgaattccctcaaaattgtttaagctcaagtctaagttggctagatgtgtgagattaagcaaggagggattgatcttgcctgtaagggaaccatccctgagagagagcttcgagacatggcctgtaagagcgttgcaagaaattccagcccatttgcagcaatcttcttcttcagaaacattccaagacaccaatttgttataatcatctaccaaatctttcttgaaactcagaagagcctgcttctctgtttcatggcagagtatgttggattctccaactccattgccaaaaacattccccataagagctacctctgccagaaacatgaaaaacataatcattgttgtaacatgaatagtcatatgaatagtcatggatactgataatgcagctatggattaattataatggcatgcatggaaggaggccttctttatatggacagacctttgttgtcatgttcttcattgccctttgaaagttttttaaaaataataatatgggaagacagattatgattggttcctccatatatatatgtatatatatatatatatatatctttgttgaccactacacactatgcactaagggaactctacgtgttcttttagtgcttagagataaggaaaacaaaattttaaataaagttctaatatcttgttcaaatcataatgattcc

SEQ ID NO: 238601 - DNA, 1021 bp, Cannabis indica
gccaggccttggaacatactttttagttcgtccaactgtgcctgcacggctagactaacctgttcggcctcttggccgacctgagtcaaatcagcatatctttgagcgagattttgagcacaagttttgggttgcacgattggcgcgtcaagctgatcgtccactcccctcctcctatttagatcattgctgagatcatgagtcgtccctaatctattaaatacagaaatgcctggcttccttagcgactgattggtttggccaatttgctgaccggcaccattaagtttgttggaattattgggtatgacttgccctgatgaattactagataaagtctgcccgcctacaagttggcccacaggtggaacctgtgaccggggattttggcggctgaccatttatagtctgagaggtattcgtcgttggatcttcgtctttttcctccatggggatgacgattacaggctattgtctggtagtctgataggcttttcgtatcaacacagtggcctaccgactacggtcgtcaatgactgcttgctgagcccttaatgtttctatctccttatctctacattcagcgaacatgcccctctactcttcaaacacaagattcaccgcagcacagagttcctcctgatcatgatgcagggtgttggtatgaccctgcatgactccaagagcaacacgggcgaaatggttgtttgaactttggtagcggggcgaaatggctgtgttatgaatgccctggttggctgttgaactggtattcccagtctcttgcacgctaggcatgatttcactcacacgagtcgccatactgagacctgcagttaatggttgtctgggatttacggttggcggaacccttgtgttccctaggttctacagtgcatgatccaccgcctgtggattcaccggatcaaccacgaccctacgcgtctgtaccaccatcgtacttgtgattagatttgagataaaaagcgatccttgagttcagctctcaatgaagcaccaa

SEQ ID NO: 238602 - DNA, 900 bp, Cannabis indica
agttttttttttttttacgtagtttcagacagaggaagagagagagagatggggttgagttatgagtatgggtttttttggttttagtataaaagtttcattattttcttagtttaaaatgtattggtttaagaataaaatattaaggtttttaagtataaaaattaaatttccaacgtatatttttaattttcttaaattattgagtgtgagtacttaatgaaactatatgctgtgtaatcattaaaaatattgctattaggcatagtggtgcctagcaccttttcgacatgtggcgttgcgattgactagtgatactctttaaaagttattatatttatattaaattatataagactcaatatttagttagcgatattcagacgtatgagagtgctaatgctaattaatcgcagcaccacatgaatcaataaaatagaactactaataaaatagaactaataatacggtggatcaagatttgggttgatttgaatgggttgtattattcgttagtttttattccgtgaaagcctaaaatatcacattgatttgtccacgtttccatttttgtctagctaggcttactttgtaaggaaatctgggggacgtggcgactaggaaaactagatcgagtcaaggatggcaacgtacgccaactcatttataattatagtttattgaaagatgtgacatttttatatgattaattgatttgacttgaatttactgttgatagggttttccattgattatttcacttgattttggataagcttttgaccaaaatatatatcggcagtgcattttataacaatttcaatggtttatcatcttttgagataaaactcatgaagcctaatattagtgtgggaccgtacgagaggtacctaatcggtc

SEQ ID NO: 238603 - DNA, 1525 bp, Cannabis indica
ttctttattttggatgaaaatttgaaaaaaaataatgttgagttgtggaatgaaattaacgttctattgttattatgaaaataaaatcaaaataagtattgaaattaacataaaattaacatgaaattaacataagctggctccaagtcaatttgtttcttttctgaaagcacttgattctttattttggatggagaagaataaaatgcttaggatacttcttcaatattgtgattggaagcaccccaggttgataatatgtaaacctgagtgctaggtgcactaggtgctcaaaattgaaagtgtctgattctgattctaatacctcaaatatgttcgtgacaagtcttattcatgtcaaagtaggaagtttgaggcatttgcactatgaagaacttgaaaactgaaaccctagttaggaagtcaacttgggcactagtgaaaaccctaggcgagtaggttactttcggggtgttgtttcatctcttttaatttttaggccttgtacttgattgttcttgtcttcttgattcagaataatgaaagatggtgagttagaaacaacttagcgggatccactacccattctagagttcccagagtcaacctgagcgcagggctagggaaccctcccaggttgactactatgactcacgactactcaatttcgggaattttatttcttgccacgtgttaaatattgatgtccatgtcacgagagttagttgtcgggtaaacagaactcaattgggtcccattcattagatgcacattttttacattatttttaacatttacatttaagtcattagatctaattgtatctaaggatccaaattaaattagtggaaaataaaataaaaaaaaaaaccacaaaaaaaaaaaaacccaaattgtgactccctccattgatcccttgcatcgaattgtcgttacaactatggaacttttatctcatttccatcgaactatcattgcttctgccatcgttaaactctcgtcactactaccatcgcggaactcttttagtcactgtcaccgtctctgtcaaaaccctagtggtcgtcactgtcatccaacctcccttcaagtttgatctttgcaaataatgaaacagaaccaatcttcttcatgtgcaaataactggaatattgaagatgatttccagattgacttcaggttgtgtaagaatagagtgaccaaaaaatgttctcactttggttcttacttatcaaaatttagttctcgagtttgattcgtattgtataattgagcattaggttgttctttattaattttggttttctttagtgttgtgttatagttcttaattaatgttcgagcaggatgtggtgataattaggggtgttcgcggtgcgggttgtgcggtttttaaccattttttcaaaccaacccgcacatgcggtttttccaattttccaaaccgcacccgcaccgcgatactaaaaaaccgcaaaaaccgcaccgcaaaaaatgatgcggtgcggtgcggtttctgcggttt

SEQ ID NO: 238604 - DNA, 1368 bp, Cannabis indica
acaattaactaatttataataataaagtatctttataccaagttaacaacgataatagttaattaataaataaataaaaaattaatgacaaataatattgattcatactttgttatatatttaagcattatcaatttatcactatagaattcattgtctttttaatttccttaattttgatttacatcatttctcactctcactctccctctctctccttaattcttatattatatttgtaagtcttaacattttattgccaattaattttctagcttttctctttatttcatttgttgtagtgaaatcattttgatgtttatttgtgtcattttttttttttttttgttcccactctttttagtttctggatagtcaataattctaattttgttatgtgattattataaagtattactttgagctacttataatttaatattttcttggatggatgaaaaaaacaaatttagttgatgtgatgaaaataataattaatatttttccaattttaaagtggaataattaagatttcaaaaaacatattatatatatatttttataaatacttcactaaatgttagtatttttatttttaatactaatacgacatacacaaatgattatgaattatttatattgagaattttatgcattaattatttatcactcaaaaaaactttagatgtacttattatacattaagaaacatcatcttcaaccaattttataattttataactcatttgaattatttttcccttttatatcaataacattaagatttataaccttttatataatgagttatattttaccaattttaatgtgggagtagattttaaaagaaacagattatatatgtttttttgtaaatatttttgctaatttttggtattttttattctctatactaatacaatatacataaatgagtaagaatcattttcattcattatctatcactgaaaaaaaaacttcaaatatacttattaaaattaagtaacatcatctccaataaaattcataatttttggatcctgagcgtctgaagtcctccgcttcctctcatggcgaagaagaaacgagcgacttcgaagcttgccaaaatcgttgctgatgtcgagaatacctctgatctcccttcgatccaaaccgaagagaatgtttctgaagctactccgtccccaatcgagattgacgaatagcctgccccagagatttttctcgactcgagtgagaacttggaaggagatccagttgacgacggtccgattgtctcgccgacgtcagtgagttgggctgaggaagttgagaaagcaaatttcaatgccaaatcgaaagatctggagtaaattcaaatcgaat

SEQ ID NO: 238605 - DNA, 1118 bp, Cannabis indica
gtattttcacataataaatttatgataaaaaatgaaatttaaaattattaataaaattgttaaatcctgctaaactaaccattgttcgttactatataattaacacaaaagttaatacattttttataatacaataaagagatatttatggataacttaatgtagtgaccataaattatattataataattaaaaaaaaacataaattaacccaaataaattttattaattagaataatgactgtgctaagtgcggttatgttgcctagtaagttataaactacttgacaacttttgtaaatttgtggattaatataattgagttgtaaaaatctaattgtaacgtacttagttaagaatagaaaaaatgtaaccaatctaataattttatcgatctactctggtcaacctatctaaatgattataaaatgattatgagttgattattattagtttttagtgtccaaattaaatatagatttaaaattaataaatgcatattatttatattttaagcttaaaagtattattgtctgaaataataatttttaaaaacttaaaaattagaacattaatcagactaatattaaagtattaattaaacattttgtctaataggagggagaggtgggtggaaggagagagatgagaggagataattggagtgttcatctaatccaatccgtactattttactcatagtgcattcgatatgcactaagtgcgaattttatattttagattcaatccaatccgtgccatagctcaaatctaatccaatttgcaaaagtgaggattgcatcagtattggttgcttttaaatattatctaatatttattaattttttttttcacaactaacaagaaaataaaataaaatattgttattttatgtctccaataacatattaaaataaataaaataataaatttaaagaaagaaaaaaaattgtatgtaggaagaaatatttaattttattttaaattatattttatttatatataagattgaaatatacatttcatctattaagttttaaaatatatttatatcatatgtattagattttatattactattttttttactattagaatattaattgtatttataattt

SEQ ID NO: 238606 - DNA, 1771 bp, Cannabis indica
atatatatttttgaatagaaataatatttttattaaatactatctccgttatcaaactagataacaagtcagttagaacaacctccaaactaaaagtgcaatcacgataaaatatggaggctctaacaaagttatgagccgccatattagttgatcatctaacaaaataaatatcaacattgtttaaatccttaagcatatccttacaaacattcaccacttgaccaaacatggatcgcatattaattgtgcttcgtaaagcttgaactaccgggagacaatctgtttcaagaatcacatgtgtccattgtcgcaccttgatccaacttaaagcctctcgaatccccgtgacttcagctgtagcaggaggaacttggccaagaaacaacttagtgcaaccttcaactaacataccccgagaatcacgagccactagaccaatcccaaattgtcgggtttcattggctttgaagcacccaatacacaactgcatcctcgggtaaaaaaccaaaaaatgtaatctcaatgactgatttttgtgcattttttccattggttaagaaatctctttgctaacgaaactatgctatccaccctaactcttttatcttgccaaaccttgtcatttctcgcgttccaaattgaccaacacaaagccaccagcagctcctttccctatttatccaacagctgaaatttaccaatgcaccaagacaaaaaaaaggttgcttcctgctgcatattagtccatatcctaacaagccttagcagtaggacaggtaacaagagcgtgcaaaatggattcatcttcaacaaagtagactggacaactagcttcaaccggtacatgcttggagcatcgttggaaggcagccgctacctgctctccacaccagattcttcattttaaggggaagtttaagactccaaaaaagtttccaaaatttattctccacagtctccaccgaatcaacctctccttttagctcctgcattaatctatatgcacttttaacagtgtacacccctgaaagttctctataccaaaccagacaatcacaagttgttgaggtatcaagagtaatttgcaagatcacatcacagtctcttagctcgaaaagaccattcaacacctcctcatcccattccaatctatcaggtttcatcaagtttacaactttagcattcataagtcctgggtgtgaagatataatccttggattaacatcattgggaagttacgcctcccctaacactgagataaatctgccattaccaacattctaacgaacaccactagccaccagattttgagcttcaaggatactacgtcaaacatagctcaagttggaccctaaagtggtcgaagtaaaagtgccattggggtaaatatctggctttgaatatacatgagactaaggattcagagttgactaagagacgccaaccttgcttatcataatatatatattaattatcatgtcatttgaattttctctaaaaaataatgtaatatacacatatattatatatatttttccttatatgaaagtaaaaacaaaaatcatattacaaaaattagtaattttgtaatatataatacggtgcagttggaccgcaattattaaattcaaaaaccgcaaactgcattacactgtgcggcttggcaaaaatgcaaaccacaaccgcatcgttaaagatttcaaaccacattttatgtagtttggtgcggtgaaagcggtttgatgaacaccctactagtattaaattc

SEQ ID NO: 238607 - DNA, 1054 bp, Cannabis indica
ctaatccatttcctaattccagggtattacactcaaacttcgaaaccccattccaccatcatgtttatgtttagtcattctatcccaactcatccaagtgataccactaccattaccattagagttgtttgatttccaccaaaagctcgccatcatccgctctatttcgttacaagtgccaatcagaaaaagaaagacgttcatagcatacgaaggaagagattggaccacggtcttgataagaatctctttcccagcccgagacaaaaaacgaccctcccaactattgatccgcttcctcattctttctttaaggaaccccagaacaacgttcttgtttcggcccactatacttggaagccccaagtacatactgtcctcccccgcttcctggatatgcatcaaattacaaatgctatttctggtattggccgaagtattggagctaaaaaaagcacatgatttgtggagatttactttttgaccagatgcgccttcaaacgtttggagaagttgtaagacatggctggcttcttcttctagcaactttaaaacccgttataagtcttgtagcctcatagtgtctaactaaggatgagaatccctccgcacaaacaatgaacaggtaaggtgatagcggacaaccttggcggatacctcgagaaggaacaatcggtcccatcttttgaccactattaataacatggtaacgaacagaattcacacaactaagagtcaagtctatccaccgatcgctgaaccccattactcgaagaatagaatcaagaaacctccattcgacacgatcataagctttactcatgtcgagcttgagtgccatatagccttttttgccattagtcttccttttcaggtaatgcattgcttcaaacgccaccgtaacattatctgatattaatcttccagcaacaaacgcactctgagtttcagagatagtatgattcaacacacctttcattctattagccaccacctttgaggcaattttgtaaagaacgttgcaaagtgaaatcggcctcatgtcactcatatg

SEQ ID NO: 238608 - DNA, 699 bp, Cannabis indica
gttaaagaatctgtaactacgtgttataacagcaaaaacccattatatacaggttatatcctctgcaaatctgaatcatggaagggggcatgttaataacagttatattgttgtgttgagttattgttgttattgagtgtgcaaccaaagtcttatcttaactagaaatgggaaggatggtgaatatacaagggtggacaatatcttcattggtatgaggtattttgggaaggtgtctaaaaataaatttgtgagggcttatgcccaaagcggacaatatcataccaatgtggagatacatagtgttccacggtcctaacaaattgtatcagagccgaatcccaaaattaactaactcatctcggtaatggaatctgtggatatgctctagtagacagatggtgtgctatggaggagttggctagagaaaagaacaagaactctcgaggtagagtggatggatggaagattgtttgaagggagacaatgtggtccttagtttgaaggaagaattgttggcataatagtgacttgatttttcttcattatatgttcagattacaaaggttgtgcccccattgcatgtcaaagatgtataattatgtcttaaacctccagcaatttttcggttaagttagttcattaaactaacgtaactgtgaaatatgacggctaacatatttggtttcttaaactata

SEQ ID NO: 238609 - DNA, 2052 bp, Cannabis indica
gcaaagtacagaaccatactacatcagcaagttttagtaatttaatatatatattatatatatatatatatatatctatatatatgaatgggagaggagaacaaatcaaatcacaaacactcaccccaaaaaataatggtgtcagctctttgtgagaccaaaattatcttctttatcccaagccatgtgtaaacgattaacccaccattaatctcagctctctctctatgtattatattcatttactattcgaaatttatagtacaattctaaaaaaaatccttttagtacacatttttctttttagcatttcagagtagtttttagttttttttttttttttcttataattagttttctactcttatttgtacaatttaagtaaaccaaaataatttataatactaaaaaaaaaattcaaataattgcttaaatatgtatgaaaaaaaacaatcaacaaaatatttgaatttttcatactgtaaattattcaaaaaattttaaaaatattacaaaaagttctaaataattatagacatgaaaataataattaaactaaaaaattcttttcaatgccaaagctataaaaaattataccaaaacaactctaaagggtatacttatactatttgtcccaacaagaggcttattaagattgttggtcccaatcacaagtcgcttctaactaaatttatgtcatttccaatccatgcttcctaattaaaagccaaaaactactttcttagcttcaaatacgcaaacactaaaatatatacatgtgaattaaaagacaactacaattgtaatgaaaattttaagattctttattgtattattgaactgattagacatgcaatggaaatatatggggtttgtttgatttgtccatatgtatggatgagattagtttgctttactatatatacatagttttagataataaattaatatatgtttgaaattaatcatgtgtatggggtgtatatataaatatattattcatgagacatgggtcacgtgtgtaaggagaagcctttgccttaacacaagctctaatttgtgatttaatttgaggaattgatattgtcatcacccttgccatgcgttgggtccacctcacactccaactcccacaacaactaccttccatttaaatattctttgttaattaattcaacttataattattaatgtcatatatatatatatatatatatccatgcacaaaaatacatcaaaagttcaatcaggaatataacatcatttagattttatcacaaagtctaataagtttggtagcctttaattattagctcctgctgtttaacatattttctttataaataagtcatttatatatttttctttcaataatcattttggaaaagtattttgtttttaatttgtatgttaattaattaaaaccttctattcctagctaataatttttaaatgagttcttcataaaaagatattatctaaaatcagtaccacacattactcatactttgtattttttttcttttcacttttttatttccatatattaattaatacttttatgctcctaattgattagtttattatttttttttttatttatttaaaagggttcattgatatgggcgtcatctttatatatatgcaccttggtaaccaaaactgaaagagctttgtttgtgcgattggaggcaaagagaatggacagcatcattttcaacccatttatatagaatatggtgcatttataataatattttattgtataaatatatatatatgtaacacacttgaatctatgtataagtacactatttacagaagaattacttatatgcatatttatttacacaaagtttgtgcattagtttttttttatcatactttttaaggtatctatgaatgatgttaacaagtgcgtacaatttgtagacaagttggataaagaataaaataattaaaaagtttaacacaaggactaggtagaggaactagtagtactcttgcatctgcaagcatttttttttttttggtattttagaaatatctcat

SEQ ID NO: 238610 - DNA, 1333 bp, Cannabis indica
aatcccgtgagatgggaaccgctgggtgacaaatctcagtccgtgaggcctatcgctgtgaaggcttccttaaacgacaaattcatggaactcccattgtcgatcaatattctagccacgatcatgttggcaatgggagtctctatgaccagagggtcatggtgaagaaaatccaccatccttgcgtcttcttccgtgaaagtaattggctaatccatgagtcggggcctttgagttggaagctgattgacttcccacacctcgtcgtgtttaacggccccggtatagcgctttaattcttttcgaatgcttcctccaatatggggcccaccagagatcatagccactcttccgttgggtcttggtggcaggccagaggtctgctgagggattggccctcccgagggtacagttggtgtcaatgctccaagcgcacttcctggtgtcccttggggcaatggactccctgccggaaccgggttgagatgggggagccaattcttgatccactcatatagatgacccaatcggatcaggttttcgatctcatctttaagatttttgcactcattggtactgtgtccaatgtcgttgttgtattcgcatcttttattaggatcccttagggaactatccctatacagaggaggtggcctccgatagtgtgtatttttcctcgtggcgaaatacacacgttcttgtgtgtccgtcagctccgtgtactgggagtataccatattttttggcgcttgtcctccgtccagttgctaccttttgaggacctcttgcttcgggagccttgagaaggtccggttaggcttgcagtagtagcggagtgagacgagatttgtccgttcatccttgaggggtttccatagtgcgaatatgcaggagcaaaggcttggctctgattgtattctggagtagcagagaactgtatactgctcatttgtggagtagcctaaggtagggttcccgagagctgaactccgggtacgtatcctaccaccccggtcgggtagtatcctccgtaagcctctatttgggcttcttccaagttgatgtacttttggattctcttctggaaatcttggaggttcgcaactccttcttattgtaactcgttccagaatggggttcctgtacggaacccagcttgaagaagtgcaagctgttgtccgtcatcaactttcttagtcttcgagacttcttccttgaacctctttatgaaatttttcaatgtctctgtgggtagttgcttgatgttagttagggcactgactttgagattaatcttccttgcagcgacaaactgtctctggaagctaacttg

SEQ ID NO: 238611 - DNA, 1405 bp, Cannabis indica
gcgatattgtcgcctctaaaagtgaaaagcagaaattcgtgtttcatttttaggggcgatagtgttgtcccaattgtcaagcgacttttttgtcgcccttaatggtatctttaggcgcaaatttttagaggcgaccttttaagggcgacatgtcgccactaaaagaaattaggagcgatttatagttgttttaggggcgacaaaataaatttgttgtagtgttttttgtgttgttactttttattcttataatttttttgttagatattattttatttttcttataagctttttgcttcttagtaattaatagtagagcaaatcatatgaacttatatttaattagatagaacgactaatgatcttagcttcaataagtaaacttatactacactatgtgcttttttaaacataatttttttaatatttgtttaaacataattgataaaagaaagatacatgtagggatgcacacggggcggggaattagcggggagtgctctcaccgtccccatccccgttaaggatttcaatccccatccccgccccatccccgcttatttcccatcggggacggggcggggaatcccctaatagggcggggacggggcgaggaatcccctattgtaaaaagaaataattttaaaaaattaaatgtattaaattattaaattacataaaagataaaatattacatattatttactattcaatatagtaattattatacataaacacaacttcaaaaattgtaaaaatgatataaatatactaaaaaaaatacaaacgcatttataaaatataaaatattaataaaaaaataattaataaattaaacgggtccccgtcggggctgggagtgtcatccccgtcctccccccgtttaacattcgaggacaaaatttgatccccgttcccgccccgttcctcatttagacggggaatccccgccccattaagggcgggttctcgcggggcaccatccccgttggagaaaatgtgcatccctagatacatgattataacctacagattttgacgggagttacgtgcctatgacacgtcctccatgactaatatatatatatatatttgtcttgtattaaatatagcttatttagaggcatactaaaatcatgcctttcgaactgaacgcaacaccggtcacccatcttaatgaaagaaagagatggaaggctatctaatagaaattgttaggcttaatattattttatattaaaaataaccgttaaaattaatacttttaaatctaaataaattaattatttaattttttgaaaaaagtaatagttttaaatatttaaattaatttaaagtatcaatcaattagatatatttttatataatttattaattaattagacgttaattcaattataaatca

SEQ ID NO: 238612 - DNA, 705 bp, Cannabis indica
cacaaacagcaccatctggtttaccacataccatttctctgtccagtccacaacaagaaccagttgccactgcttctgtttcagactcaccatcaccatcattttctcctgtagcacctgtagcaaccatatccacaccacattcagctgattccacagtccttacttccccttcagctccaaacatacatcctatgattacccaatctaagcatggtatttttaaacccaaactctatgttgctaatctaagtgatgaaacagaacctacaacactcaaagctgcacttgcaagtgccaaatggaatgcagctatgcaacatgaaattacagctcttaaaaacaagaagacctggaaacttgttccccgaacctctgatatgatcatagtgcagaataaatgggtttatcgcataaaattcaatgttgatggttctgtagaacgcctcaaagctcggctagttgcaaagggttttcaacaaactgcaggaattgattattttgaaacatatagcccagttatcaaaccatgcactatacggattatgtttactttggctatcacacatggttgggaaattcagcaaatcgacatcaataatgcattcttgaatggagaccttcaagaagatgtctacatggctcaaccacaatggtttattgaccctcaataccccaatcatgtatgcaagctcaacaaagcaa

SEQ ID NO: 238613 - DNA, 1131 bp, Cannabis indica
aaatatatggcattttcactatgcatagaaataagcaacctcagaaataagcaacctcagctgttgtttggtttcatgaaagggtcaaaaattgcattcatctcactttatgttgccttgtttaaaaagatgaacatcaaagatagtatgaagacaaaaaaaacatgccacaaacaagtatatatatacctttgctaacaagcatacaagcagcacgagactcaaaatgtgccacaaacaagatatatgataccttgactaacaatgctacactagtaactgaacagcaatacaatcacactatcaagctaaaacaatcagaagaccaagcatcaaatagagttgttatatatagtacaaaaagattaatagaaaatgcaaagtaccaaggcaactcacaacttccttagaagtatagtgtggcttcctctatattacaattggctgcaatctcatgggagaaatcagcaccaaatcagctatgacttccaaagatgaatgcacccgagatagaacatggctctttcttgaaatacctcgtggttctttcaaaaactctatcattgaagaaaggggtgtgaaatttccaacaaccatctctaaacacgaattaacatatttcccacttgaagcagcctacaagatagacattgtacatacaacatttttataaataaatctagtagttctgaaaaacaatagttatcaccataagaagaattcacataccaatgaaatgattagtttaattaattagagcatccataatatcaatcctgcaggaccacgtgttcattgagaatacctggaaagaattaccaaatcagtaattgagtaaattgaaaacagcaaaagataacatcaaaccaaagtgcttttatcaacttacagaagcaagaagagagtgatgaagaacattatcgatatgtgaaactgtaacagacagtgccttcaaactcgtttatcaagcattaacaaacaaaaatttagttgatcaaaataaaaagtcaaattttacagaatgttttaacaggcttcatacaggatgtctatacagtaattacacaataaatcccatgaaacaaatgaattaacttctttgacaaagaagcaaaagaacttgacaaaaaa

SEQ ID NO: 238614 - DNA, 1153 bp, Cannabis indica
aatattttacaccataccatgacatgaatccaccctaccccagtctcgacctgaacctggaccccgactcgaacccaaactcagacccggacatggacctagaccagaccctggacccgaacccagaccccagacctaaacccaaacttggaccccgacccgaacccaaacctggaccttggaccccgacttggacctagacaccgaaccctggacctagacccagacctcagacttggacccagaccctggatccaaactcggacccagaccccaaaccttagacctagaccccgaacccgaacctcgacccaaaccctaatcccagacccagacccaaacctagatcccaaacctagggctaggttcgaggtccttggttgggtttgggtttgaggtctgtgtccaggtcaaggtttggggtctgagttcaggtctaaggtctagtatccgggttggggtcggggtctaggtttgggaattagggtctgggtctgggtccagggtctggggtctggggtccagttcggggtctagtgttcgagtatagggattgggtctagggaccgagtccagttccaaggtttgggtctagggtccaagtatgtgagcaaaaatataaaatataatatgttagaaaaaaaaattgctttgaaaattaaaaataatattttgatgttctctgttttctagtttttaaaatttagttaaacgatctctattaatttttacaaaatattttttttaaaaaaaaaaactgaaatagttttaaaagtaaaaactgaaaataatttttaagatatgaaactaattaaacaatctctaatttaatattccgaatgttttattgttttagcttatctattgaagttacttattttcaaaaagaaaagaagatgtcttgtactgaattatatagaaatcaattagatataatagtagtactggcataccattcaattaataattattattagcatttagcaacacatataaaagtcttgtaattaggagctctctttaattagtgaagtaatcatatgataattcaagaattaatgcgattggatattttatgcatgggtccacatattacttttcaaatgggtcacctaaattactgtactcacttgattttagggatttttttttt

SEQ ID NO: 238615 - DNA, 1573 bp, Cannabis indica
tgataaatattaaataatttaatattaaaaagtaaccaataaaaaataatcgatctaatccatatttttgtgaattgaattggatttgagctattgtgcgaattaaattgaatcagatgcactatgagcaaaatgatgcaaattgaattagacgaacactctattacgaaacaaatatgtaagacccaacatttgtgaaaactacatttttagacaaaagtaagcttttttcttattatcttcttctctttaagaaaaagagcatccatttgttgttgtttttcatttagatatccatctttggacatggcttttctctctactgagagtgttgggaactccaacttgacttaatgtcaaatcaacaaaaatcctttttgcctggttttccgaccgttgaggctactattttatcaatcacctttacctaattctttttacccttttcccctttctattcagactctacagtgtattgttttgtttcatagccctttctctttttttcatctcagtaaagttaaggtttgtccttggtgtttggtgagaagggattaccatggttaacccacgtgaagctacccaagatgacactgttcaagcaaatgggccccctgaagttattacagtggatgataatgatccaagcaatgggaccccagaagttaatgcaccagaactgaaccaccaaccaccacaatcgaatgaagtcattatggaggaatcaataaatgaagcagaggaaaggttggtggtgtcccctgcgtgcaataatccagaaaaaacaaatgacgatatcgaagtattgagaagtaactttctagagtctatgacactagagctggagcccgactttgaacttacagcagaggttgtcgatactggtgttttagccagtttctttggaggaaaaggagtgtcaaagtcgagacttagggaaatccttagtcagatatggaagctcaagggatattggaaattcaaaaccttaaaaccgggtgtatggggaatctttttcgagaaaccagaagaccgaatggccatcctccgtaatagaccctggatcattaatgggaaacttttaatcttacgagaatggcctgaagatggagattggtttaatgtgaacatggggaaggcaactttctgggttatggcttctgggttaccaactccctatctgaatggagtgaactcacggaccatagctgcaaaagctggaaagtttgtgggaagtgatctagctgataatcgtacagtagtgagaaggggatttttgaagtttcaagtagaaatagacacttctcatcaactcacttcaggattctttcttgatgtcaaaagagggagaagagaatggattcagtttcgatacttcaagttgccgaaactttgctacaattgcggatatctcggacatgataaaaaggagtgctttcgatcaacggcgtttgcgtatccgccccaaggagaagcggtccctgcttatgggccgtggatgaaggccgaaacagccatttacagctgttttaatactcgtaaccaactggatttcttcagagaaggattaaga

SEQ ID NO: 238616 - DNA, 659 bp, Cannabis indica
taggatgttaatcaaacatacttgttagtaaatctagatcctggtaaaataaatttccaataggtttcatactagaacagacgatatgaaactcctttagatgcttattgggatcttccccgggaaacccatggaaagagtgcaataagtggatgaggcccggtttaagtttaaagttgacatccaagggtggataatggatgcacagtggttgttggtcaacatttggcgaggtcaactcttttaacgtcctattttgagccatggtactgttagaattgaccgagtcgtcaaaatcagaatcgagaatagttgataatggctctttgacaggaccaaggggtcgaaagagtgggttgccggtgatattcttcgatgatcgagaagcagacgataactcaagatattgtttgactagtttctcttgagtatcgtatgcactagacataagattgccaaaataaaaactagttagtaaaagataaattaaatatgaataataaaataatacaatagtccccgataacagcgccaaaaatttgatgcgtgtcgtatgccgtatcaaatttactaatttttttattataatacttttaattattttagtataaaagcaagtacgggtagatcccatgatgactatgattaatttattattc

SEQ ID NO: 238617 - DNA, 1417 bp, Cannabis indica
cttgacagtgtgagtgattgtcaactaacagatatcaatagtagtggttgcttcttcacttggaataataaacagcaatcaaaagatagaatctatttcaagattgatagggtcatggctaatcaatcttggatggatctatttgagaaggctgaagctgtgtttctcacagaaggagattttgatcatactccagcagtattgaatacttatcctaatttcccaagtggcaaaaaaccgtttaaatacttccgtatgtggacttctcatccaagttatcatgtggaagttaagaagatatgggatcaaaaaatggcaggcacaagtatgtttcaggtagtatcaaagcttaaagctttgaaggtttctttagaaatctgaataaagaacactactcggacattcatgtagtagagaaaaaggcaaggcaagaacttgagaaggtgcaaagcctgttacaccagcagcctttgaatgagcagttgcaaattcaagaacaagaagtaagagaacggtttgtcaagattcataaagattactgttcttttgtggaacagaagtctagattacattggctcaaagagggtgatgaaaattcaacactttttcattcaagcatcagagagagaaggcagcacaataatattctatctatagtagatgcgaatggaacaaggcatgaagatccggagaacattactaaagctttcttagatttctacaaagaattattgggatctaagatggtgaatagattgcctgtgaacatcagcttagtcagaaaaggaatatgtgtaactgaacaccatagtcggattctaaatgctgcctacacaatggaagaattaaaagaagctatttttggcataccagtagtaaaggccctggggccagatgggtgcaacaactcgttttatcaagacaattgggacttagtcaaacaggatgtctttgaagtagtaacctcatttcttcactcgggccacttacttaaggagctgaattcgacgataatcaatcttgtgccaaaaagtaaatgcccaaatgttgtaagtgattatagaccaatagcctgttgtaatttactctacaaggttgcaactaaaatgatttgtagcaggttgaagcttatcttgccagatattatagctcaaaatcaaggagggttcgttaaagggcgattcattgctcataatatcatggtttgccaagatttaataaggcactatgggaggaaaaatgctaaggcaaactgtatgattaaacttgatctacagaaggcctatacaatggagtggagctttttagaagaaatgctacaagcctttcaattccctaattcattcataaagctagtaatgacttgcatcactactcctaggttttctcttctctttaatggatctttacatgggtt

SEQ ID NO: 238618 - DNA, 621 bp, Cannabis indica
tgatggttcttctttacattacaactttctaagaaatatttggtttgaaatttgcttacagcttgatgctgctgttaaacaaagaaacatactacagacagaagcaacttataaggacacaaaggctatactccaagaggtcatgacccgaatggcatagactttgtaaatatggttttgatcatttgatttactattcaaatgggggttttataaaaactcatttcatacatccttatcaacccctttgttttttattttttaagtccttactttatataatattatcttttatttaattgacaaaactggataggtgttcaaagtttccacaaacactatcaagcaagaaagtgatgacagtttttattgtaacttgaaacatcaataccagaaaaatgagtagagagactcaccatgaagtggtggtgaaagatgatggaaaacttgaaacattaatgactaacatgaaaagggtaactttttactctttactaaactataattttcttgatcccatcccaactactaacaaatgcgcattcttttagacttgttgaatgacatgtttagattcagtaacagatagtaaagaaactgaagactaggaaagtgattcca

SEQ ID NO: 238619 - DNA, 2646 bp, Cannabis indica
atctatattaataagtaaatttgattatattgaaatgagttttatatagggcataaaacccaataggggaccccaactcaaaattagagtcagaatcgggaccatggactgggatttggacccaagacctgaccccgatctcgatcccaaacccgaacccagacatggacacggggcttgacccacgactcggggcttggacccaacccgtggtcggtgtgtagatcttggaatcgtaccaagacccgaacctggaaccatttcctgaccaggacccaaacaaaaactcagacctgagacagaaattggaacaagaaccgaaatcaggaccttggaataggaatttgacttggaaccaaaactggatctagacgcgaaaccgaacacggacccaaacccagaccgtgattgaaactcgaacccagacccgaacccagacccagacttttgacagtacctgcgacccaggacccatgacccgaaaccttgaccagaacccaaactcgtaccagaacccaaacctaaacctaggaaccaatcccagacccagacacagaccaagacccggacctagacacagactgaaacccaaacccagacccaaacccacacccagacccagacccagactcagacttgaactcggactcggacctatataaggattcggacccagacccagactaagaccgaggcctgaacctggactaggactagaactcggactgggactgggactgggacctgggacctgatactgagacataggacctgagaacctaaccgtgacccaaacccagactaggccaagacgcgagacaaggaccagtaccgaacacgcaccgagacctgcactcggacttggaccctaactcggacacgatcgtgtacccagaactgcaccgagacttggacccagacctagacctaggaaccaatcacagacccagacgcggacctagataagtatatgaataggaacctagactcaaacctagacccggacctagactgggatcaaaaatcgggacctagatctagaccgagaccgtgacccagacccagacccagacctggacctgtacctgggacccgaactcggacctggaccagaagccagacccaaactgggatatggacgtaaatctagactcggaccaagactcagaccaggactcagaccccgacctagactcagacccatactcgaacccaaacactaaatcaaaatcgaaactaggactaggacccaaacccgaacatggacccagaccgagacctaggactcggaccttgaccttggccttggaaccccgacctagatcggaactcaggattccgacccatacttggagctagactcaaaccgagacctggacccaaccaagatcggaactctgacccaaactcgaacaaggacttgaaccccgatcgggtccgggactcagaccgagacctaggactcgaacctagattagggacttgcacctaggacactggcatcaaaactaggactgagacccagaatccgaccccaaagtcggaccaggacttgggacccaaagtggaactagactgggacccgagaccgtgatccacatctaccctcggggcttggacctgacccgtagtcagtgtttggatctaggacccatacccggactcaaacccaaacccaaattcagacccagacccagacccagacccgtacccaaaacttgggtccgagtccgagtctgggtttgagttcgagaactggaatctgactacgacccagacccaaacccggattgggacgcgaacttaaatcaaaactcggatcgggactcgggacacaaacgcgaacggagacacaaacttggaccttgacccagaccgggattggagactcaaacctagacccaggacccagacctagattggggaccaaaactcaaaattagaacaacaattaggacccaggactgggactgggacccaagacctaaccccggtctcgatcccagacctggacccggacacggacacggaccgggacctaagatcccaattaaaattagactgggacccaagatggcgatctgaatctgaccaacgcctggggctcggaaccaaccgtagtcggtgtctggatcttggaatcataccaagacccgaacatggaaccatttccagactaggacctaaaccctgactcggacccgagacccgaaatcagaacaagaaccagaatcaggaccctggaataggaattggaccaggacccaaaactggatctagacgcagaaccgaacacagacccagacccagaacgggatcaataccaggacccaggcccaaacccgaacccagacttgcgccaagacttgtgacttaggacccgtgactcgagacctggaacagaacctagacccgtacaagaaatcagacccagacccaaacctagaccaagacccagaccaagacacagactgaaacccggactcagacccaaacccagacctagacccggacccaaatctggagtagtactataactcgtactcgaacccaggacttggacccgggctgagatcaagactgggacccaaacccggactaggaccgagacctgaacctggactaggactagaactcagactggga

SEQ ID NO: 238620 - DNA, 1181 bp, Cannabis indica
attataattaaattttattttgacaaaaaatcaattcagagtcttatttgtatcgttttagaaaatacaaggtctattttgtcatttaacaaaacagatggtacaattagtaacttttacaaaacacagggtctgaaatagtatttacccttattattattattattattattattattattattattattattattattatacattatgttttgcaatgatatgtgcccctcagcatacataaaaatcaccgttgtgataattaatttactaaatattatttttctggaaacagaatttactacatactttataaattgctaaactgactagtagatctatcttatggcttttatttaattaatcttctaattaatgaagatgttcttattagaattagcttgcccacattagtgctactgtcctactatattttcggcccactttatttattgggctgttatctttcttgccctatatatactcataatgtaaaaacctaagattactttttggcatttctgtcgtgatctaatagcagccatataataaaaatagtttcctccttcctatcatggtgtcagttgaacaaaataaaccgtaaaccgccgccgccaactccatattctttcatggctccaagaacaaggaattcctccatagccgtcgcctccgtcagcgagccgtcataatctcccaccgccatctccagccacgatttctcctctgttgaagccactgtcgccgatgtcgttgctctgcccccatcgcctccgactgctccctccttgacggacacgatcagagctcctccttccatgtctgatcctcccacttttggtgtgttcggctccggttacgttgccgatcttcccacttgtggaacaattggacaatctttaacagctccaatcggttccagctcggcgctgacgtcttccttcacagcttctccacttcacattccgcttttgccattctccgctccaaccttgaccccaacggttcaacagacgacttccatctcttccggcaccaccacaatcccagccaccaccttcggccctccgcccgtccagaacccttcctttcttggtggtaatcttccttatcttggacatcaaggccaaatgccttttaatgataactctttgttactgctaatcacggcttttctcgtg

SEQ ID NO: 238621 - DNA, 2656 bp, Cannabis indica
ttcttttcttttttttatttatttatttggttaattagtatttttgctccctgaactttgacatgtaccaaattacgccccttgaacttttaaggtcattaaaaatgccccttgaactattgagattgttggatttaaggacttttttctaattttagtaaaaaagtctaacatggatgaaagtttaaggggcatacatgtcaaagtttgaagggcatgatttggtagatatcaaagtctcgggaacgtggtttagtacacaaacaatcattgaaatagtaaaattgaataaaattagacaaaaatccttaaatacaacaatctcaatagttcaggggcattttcaatagccttaaaagttcagggggcaaaaatcctaattagcctatttatttttagggaaattaagatttttctactttaaattttgacatacattaaattgtgttttttaatttttgttgccgttaaaaattctattgaattattgacattgttggatttacgaatttttgtcaaatttcatttaattttactattttagtaatggtttatgtaccaaattatgctcatcgaacttttaatatgtatccctaaactttcattcatgttagacttttcttactaaaattgaacaaaaattcttaaaactaacaatctcaatagttcagtggagatttttaacgactttaaaatttaaaaagcatgattttagtacatgtcaaagttgaaaaacaaaatttctaattaatttatttttattaaaataaagtatgaaattagggataaatttattagagcatctcttatggtgtattttttaaaagtgttaaaaatcttcacatcattcaaaaatatagtcttttattttatttctctttcagattattttttacactcttacttctaaaaatagtatagcacctttcaagaatgttataattatgatctcaaacattattatttaatatattatttatcttaattataaatatcgtcacacttaattttaaaaaatagataacatcattgtcatgtatcaacatattttttataatttatattttatcaaataaacaattcacatcaaacaatcatcttctaaaatttaactattgaaaatactctcttacatcccgttaaatattgaagacatttatttaattacagatataatctatgtttttatgtgtatacaaactcaaacataaaaggatttagctgcaaatttttcaaaaaaaaaaaatagaaaaaaattttttggtacattttatatatatattttttgtattgaaaataatttttttaatagtgagatgtaaatatttaagaatatatatatgaaatttcaaaaataaaatcttaattcttatagattatagtggtaaaaataaaatttaaataattttttttcaactacacatatatacatgtataaaagtaaagtttgaactattaattaccatatctataacaaaaaaaataagcacacatatatacatgtaataaagtattaatttttttttatagttaaaattttattttgtgtcatacattattcaatttttttttttattaaatttatttgtataaaataggttaaaaatctcctctaaataaaaattaaatcaaaaaattataccaaattataattttttttttctttaaattagtgggtgatattttaatattaaattaatttatttaaattattattttaatataggcacgcaggcggtgctttgggtatagcgcccaatgcaatcagacgacccgttgggaatataaaaatatatttattattattattaaaatataattttgataagaaattaattattatcgtaaatatctttaaggagtgggacaggtcctcgaactacgagtctaagtgtcaacggctatgattgatcagaggcggaaattaagcttcttgattctcacacgtgtccttcatctatggggtcattaacggtgtggattttgtgaacgtggtcggtgactgccaagataacacaataaaatataatattaattattaatttctatttcggtgtgaattaagatttaagattaatcaattgtatttttagagtgagaaaatatcactttggcatgtctatctatctatactttaatttaatgaaattaaataatgcaaacaagatcgaaatcgaaaggactaattttttttttattttttttatttttagatgattgaagggcaatattataaaatatgcaaaaattcaggatttgttgtacaattaaataattattttatactactaacatgggcaagtaagaaaatttgtcagtagaggatgaaaattcaataaaattaattttgaatgtttttagaaaaacataagagacaatttcttttatttggtcgaaaaagtgactttaaaagaaattgtagcaaattaaaattaattagagttaatcttttaattagattgtacttgcattgagtcccctaaactaaagtcttatttattagtgttttgtttaatatatatatatagaaagtgacgttgaattatgtttaagtatgtattgtcttctaccttttctattcttagtgatattttttagtcttattataaactcattatttttcattcttgatgaaaaaaaaatgttttagactatt

SEQ ID NO: 238622 - DNA, 1607 bp, Cannabis indica
gttgagattacagcagccacgccaccgacagggccggccctgggcataggcgggctaggcccgcgcctagggcccactcattttaggggcccaaattaaaaaattgccttttaaaaaatatacatgtttattttaataatttttaaaaatactatttatctttatagtaagggtccaaaaaaatttgttacctatagcccatttcaattcagggccggccctggccgccgaggacagagacggagatatgatggtattgtgaggtgaaaagggaatatgaaagaagagactttttctttttgttttttctttaacgaatggtataggagaagggatttctttaagattttttgttgcaatttaagttgaagcgctagttgcaataggagtttctatgtagaattttgtcataatgcaaaaaaaattattttgaagtgtaaaaatgaaaaagtcccaactaattattttttaaaattttgtttatttttttaaaaaatatttaaatttttaaaaatttaaggaaaataaatataaagttaaagaatattaaaattaaatatacttttaatattaaaagtaaaaataaaaaaaaaataatgttataaataatgtattaatatttatatatatttaaattaatttaaaattgatataacttcaattaacctaaaataaataatatttatatttatatatattaaattgatctaaaataaataatattaatatttatattatagggttgtttattggatcacatccaatgtttttaggtctatccagatccgatttaattatatattggatgttagattttaccatccgatccgatccaattaatttcagtcatccaatcgatccaatattcattggatgttggattggattggttctatccgttggatatatttcatatatatatttattggtttaatttaggtttatttaatattttagacctagtattttttggatctgattggatccatccaatattttaggtccagtaagtattggattggattggattggatctatccaatataagaaaaaaagagtaaaattttaatattaatttttatgtatacatatatatatattttacgtataacaatataaaatctaattactcatccaaactaaacgaaaatactaattagttcgattgaatgttggatgtattggatttttggacaccccatccaatatccgatccgatccaattggatattaaaaaataaaatccaatccgattcgatgacaatttgatatccaatgtttgacggtcaattgtaattgaatcggtcgattgtcattggattggatgatttatgcacaccccaattatatatatttataaaactaaccctactaacaccgttaaattcaaggggcgacaatgtcgctccaattgtcaggcgactttttgtcaccctaatggtatttttagggatgacttattaggggcgacatgtcgcctctaaaatacattaggggcgttatcacctctaataaattaatttgttgtagtgaaatttaacgaaatattttatattcttaaaatattctgttaaacctattagaatatttctaattaaggaaataaa

SEQ ID NO: 238623 - DNA, 845 bp, Cannabis indica
ttcaattgtttaactttgtgttgtttatttttcttcaaatgttgcaggaaaattctatatatcaactaccaagtacaacttttttactttttttgccaaagggactatttgaacaggtaatatacttgaaggccttggccaatatgcaattaggtttctagctattttcatattaccttgaatgttgttttagggtttggagcagcatttgtttttttagttcattgtttttcttgtgattgtgggtttatttcatgcgtctcttctgtttctaattgggcagaaagagggaaaaggttgctatctttgagctgcttgttgttgtgtgcattactaagtttgtaagattcatcacatttaataggtactattcttttttttcgattttagtctaaagtatgttgctttactctttataattttgtcatgttatgacaagagtgttaattttagtactcacatcataacatgatttctatatgtatacagatattggcatatggtttgagtttaatcttcttgtcttctataactgaactatttatatcatcaaaccattttctttcttaagctatacatatttacagctggtattgatatgtcttctccttataatatttcttccatgttttgatgcttgttgttgttatactgttatgccatgaatttagataaaattttttatccattgatatgtatgactcacatatctaagatatggttgtgatatataagcgtgctagtcaaatggttatttattcaataagaatgagttgtgtgataattaatgtttttattgacatttattagatttattaacacttttatttttaagaacttcacat

SEQ ID NO: 238624 - DNA, 647 bp, Cannabis indica
atattaaaaatattaaatttaaatttaatatactattacaacttaatgattactaaactaaatacaattacatgcaaaagacaatagaaataacaactactacattcttattttctccaccaaattattggaagatcattgcccataaattatctctgccaaatggatgaagattatcactaacaataaataaattagatacatttctgctattcatgattttttttttttgagtcaaaattttagcacaatctttatgaaacgtgattcattcatataagtattattatttgagacatgtaataatattgtattatttggatttgaatctgattttatccataattatacacgtacaatcgattttttttgttttccacgatattattgccctactttgccatgacccaaatagtagtggtcggttctattattttgccctcctcacatgagaataataactgccattaaataggttggagtatttgacattatttctaacacactataatttggctaactagctcttatacaaattcaacagctacttagcttagctaataatgtttttattaggtctcactctaggaacatcgccggccaactcacatttttgtttgccttatgatatcaatatcacgtgtgtg

SEQ ID NO: 238625 - DNA, 936 bp, Cannabis indica
tcaaatgtgtcgtcccttttctgcgaaatttgcccctatttataggagtataggttggcagttattcttttgggatcaattcaaatataattattcatgaaacgtgaacaatccccatgtttcatttaatcacatatggaataatatctaataactaccccactgctctttgttgttatcctttaaacggttattcctgacttggaaggttatatgtcgctcattatgagttatcctccttattcatcttaataaggaaaaaaagtgaagtgttggtaagtcgttcacctcgctgtatcccttcatttggctcagtattgtgaggtgattgtctctccaagtgcaactcgaggttgttgtatgtgtactatttattctgctcgagtggatgaatatcctctttttgtctatgtattctgagcagatttatttcttgttaatatcagttaaatagtttttattattatctcgcttaagactatacaatcaactagttttaaatattatctattaaacctttataaaataataacgagttattttaatctgcatttaatgacataacactattatatcattaaagttgattcataatctttttgttagacatgtgttagcttttgaagtgtaaccgaatttcgggtataacattagttatattaaaaaaaagttgtcgaaaattaagctcagggtcctattcttaccattttggaaaatacagaatctattttatcatcatttaacaaaatagatggtccaatcgataatttttgtaaaatataggatccaaaattgtatttacacaaaattttgactaaaaaattatttcagatactaaaagagacagagatatgtatcaatacatctctttcaagggattgcattatagaattttatgaaattatttttttccattttattttagggatattggcg

SEQ ID NO: 238626 - DNA, 1011 bp, Cannabis indica
gtctccacactcttctttcaaagttagaggggagaacgtctagactaggcaggctagggaggaggagctcacgaaagaggtggaaagcctggaaacaactgccttagaggttttctatgagttttggaaggccaacccctcaggaaattttgattacctcggtaattccaaagaggtatatcttgattattgtgcagtcaggcggccaaagaaaaccccgaggcaaccacttctacccttttgactgaccagagcaccaaaacccctgccgcccagaatgtcgagcctccggcccccacagaccaagctgatccggataaggagcccaggacacctgccgtttaaaacatttttattctttttcttttttatatatatttgttcggcccatgggcctttattagagacaaaaatgaccgaccaagcggtttttaaacttgggttatgtttttcattttaagacatttagctaaccgggcagccattaatcccgggtttactgtgctttgttatcttttttaatgaatacttctcttgttttgatatttatctgtgcaaactattatgtttttttttggagcttgttatttacttttaccaatgctttgtacgggtatagtagccacccaagtgaccgagcaggcttatgactcttgatcacttgcatttcacaagtatgatttttgtctgttcggttctttggattcgagcagacctttgtacgcatttaatggtaaatttataaatttctaatagaatcgaaacaattataattttaatagacatctttattcattcattaatcgaaatagttttgttaccgtagtaacttacatttatgaaagctattatatgatctaattcaatctttagctaaatttaaacaaaataattgcacttataaaaagaaattgtactttcaaaggtggccacccaacctgagtacttaatcattgcatcaaaacctttgggtggggtctgcctgaaaggccatctacttaaaagtaaatg

SEQ ID NO: 238627 - DNA, 768 bp, Cannabis indica
attatttgaaatgttggaatgtctcatataattagcctaaataataagttaatgaggttacgtgttcatatcaataaattagattcatctcttgctttttgtgattaaacaatacatatttgtgtgtatagtttttttttttcttttttttttaatttaaatatgtatcaaacgaatttcaaagttacattatagtgttaatatgtatgtagttatattgcacacaaaagagaattatagaaacttctgattagtattttggtgtaaactctcatccataaatttacaagccattaatagaagacaaatgactgagttttactgataccttcggtgcttaggcaatcaaggtcttatacaacagttaatgtaggtcagaatcttttttttttcctctgcatgcaaataaaaaatgaagcaaattcgaaagataaattgtaacaactttttattcaaaaatattttccttcggtaagaaattattacattgaaaatataaattgacactttatttacaaaaataccttcataaggtgtgaacaatatttatactttttatgtgattttaattaccaaaatacccttacactattacttacacaatcagatcatggttgcagggtagttgctgcgtggttgcgcaatggttgcatcagacgaaagtttcaatcagataatggttgtagggtggttgtgggtggttggtcgaaggttgcatcaaactagggtggtcaattcgtgttcgacgggtacgtgttcgtagtcgta

SEQ ID NO: 238628 - DNA, 5133 bp, Cannabis indica
gtttccaagattaaattcattgtctaatgctaatagtgcccttttcttgttcagcaaataaaaagaaataaatcactggtcaatttttcttcttggaacttagtactcttggatgaaaaataatttgtttcagctaaatttagtttctttcgttgtgagaatttatttcccactttttttttcaatcaacaaaagttttgtttcttatgctttagttaattatttgttattattttaactacctgagagtttttgttgtcttagagtaatattgtgctcatctgcttaaagaatctcagatggatcttttatatcacctagtaatcctcattttatttttatatcttccattgtctttgtttgttattgtagttatactccttattcatattcactgatctgatcattgtaccactttttgttgtaggattaattgttgatgatccccgagtcttaatcaactattttattgtatttatgcttgcttgttttaaacttcgtgctgatcgtgcctccagcttctcagagtcatcaacctataggcaaatgatgtctcaacagaaaaatacatttatttggagagatctctcttttgaaactaagagcatgtggaccttcctggactacctgaggctttacttctattgccatctattagatcttgttcttattttggtattgattactggaacccttgaatatgacatcctgcaccttggttatcttgcatttgctcttgttttcttccgaatgaggcttgaaatattaaagaagagaaacaagatgttcaaattcttgcgtatatataactttgctgttattgttctctcacttgcgtatcagtctccatttataggggaattcagtggtgcagggaagtgtgaaactggtgattacatatacgaaatgattgggctctataaatatgcttatggctttcggattactgcaagatcagctcttgttgaaattattatatttatgctggtatctcttcaatcgtatatgttctcctccccagagtttgattacgtgtctcgatatctggaagcagagcaaattggtgccattgtccatgagcaagaaaagaaagcagcatggaaaactgcacagttatgtcatattcgtgaagctgaggagatgaaacaccagcgtaatctgcaagtggaaaagataaaatctgagatgctcaatctgcaagtccaacttcatagcacgaacacaacggcaaatggttgtgcttctcctaaaagtgaaggcctaagaaggaggtcaacttctcttacttttgaaaaggatgcggagacccctattagagagaggattgccttgaaaaagcagcagacaattgaaaaggatttggtatacccgtttgaatttcaagaatctcctgttgctcaggacatggaaatttcaacagaagatgagtctatgaaacattcagtagagcctcctcattgtgaaatttctgaagttgaagaaaatttcactggtaagcctttttcggatgtagaatacaaagacaaaagtagaaatcaggcaaaggaaaacccactagtatcagcagtacaacttatcggtgatggagtttcccaagtacaatcaataggaaatcaggcagtcaataaccttgcaaatttcttgaatatcacacaggaagaatctgatctgaatggccattcgtcttctgaggatggattatatgatgaaatggagagccagaaaacaaagtatatgtctttgggccgttcatcttcccttcagtctgatacaagttctgatgccacaagtcttcaattgggaaggatctttcgatacatctggtcccaaatgcgatccaataatgacatagtgtgttattgttgctttttaattgtcttcttgtggaacttcagtttgctttctatggtgtatctggcagctctgttcttgtatgcattatgtgtgaatactggtccaagttatatcttctggagaattatgctaatatacacagaaatttatattttgcttcagtacttgtaccagattataattcagcactgtgggtttaagtttgatttgggccttctgcgtgaattgggatttcctgaacataaaatcatgccgtccttcgttatcagttcgctgcctctctttcttgtttacttgtttaccctaatacagagttctatcactgtaaaagacggtgaatggatgtcattttcacactttaagagtactgtttctggaaaaaatgtttctataacttctcgttggactgacagggcaatggaggtcatgctcatggggaaaaatagcctgaaattaatattaaggagcatgtataattactgggcatctctaacgcatggtgcagaatcacctccttactttgtccaggtgtctatggatgtgcacttatggccagaagatggtattcagccagaaagaattgaatctgggattaatcaattgcttagaaccatccataatgagaaatgtaaggaagaaaatcgtaatctttgcccttttgctagtagagttcatgtgcaaagcattgaaagaagtcaagaaaatccaaacgtggccttggttgttcttgaagtggtatatgcctctcctttgacagagtgtgcttcagcagaatggtacaaatcacttactccggcagctgatgtggcaaaggagattcttgaagcacagagtactgggcttcttacagaaatgggattcccattttctatagtctctgtaatcggaggaggccaaagagaaattgatctgtatgcctatgtatttggtgcagatctgagcgtattcttcttagtggccatcttataccaatccgttataaagaacaacagtgaatttctcgatgtgtatcagcttgaagatcagtttcctaaagagtttgtatttgtcttgatggttagttgaattttcctcttatctattatacttacggaaaaatacgttggagccaaatttagaacttatattcatataaacttgaccaattctgcagctgaaaatttgttcttttatgtacattaaatctctgatcgaatgggttcttctttgatatctttttccaatttctctcatttaagtttaaagctgaattccttgaagtttgcattgagtataagaggctagaataatgctacgcacattaaacataaactctaagtctcatcattaccaccaaacactcatctctctggcttgtttagtgttattgtagtgtgtaaatgttatgttaccataaagtagtatgtagagtgagtgacatgttaagattcttgtatgcaaattatacaagggcattacaatttctatttatttattttcatgcagataatcttcttcttgattgtgcttgatcgcataatctacctctgctcatttgccactgcaaaagttattttctatcttttcaacctcatcctcttcacgtattcagttacagagtatgcctggaacatggagtcttcagaacatgcaggtggatttgcacttcgtgctatatatctcgcaaaagctgtttctttagcattgcaagctgtccaaattcgatatggaattcctcacaaaagcactctgtatcagcagtttttgactagtgaaatttcacaaatcaattacttgggttatcggctatatcgtgctcttcccttcctctatgaactgcggtgtgtgcttgactggtcttgcacaacgacatctttgactatgtatgactggctgaaagtaagtacatgaaattttcaacttttgtattctcttgattgctggtagtggtactatactgtatttttatgatcttagcattagagctactccatcttgatactctgaaacatactggcatgtataaataatactttaatttctgaggcctttctaattgtagtctgtacttgcctttgcacctagcaccctatggtctgtggtatttacttttatcaggctagtagtttttttcatgccaccaaagataggtttacttttctggccattatttattcctgcccttatttgttgtggttactcattacactttttagtaaagttagtagtttttttttttttttcggaaaactgactcattgtttaattagctggaggacatacacgcaagcttgtaccttgtcaaatgtgatgcagtcttgaatagagcacagcacaaacatggagaaaagcaaaccaaaatgaccaaatgttgcaatgggatatgcctgtttttcatcttaatgtgtgttatctgggctcccatgctggtatgtaatttctgatatggactagtgactgaagaactttattagtatgattacattcttactactttctgataagttttctggcattagaaaccaaactatttgctaaggtagtgcttttcttatacataattattagcagttaagcgtgagagtagtactaagatggataacgttctgggaagttcttgtgttgcacccctaaaataaaacattagcaattgttattattcatttattttagttttttcgaaagtgagacagaggtcacttgtcttagactgtgacctcttcccaagtttattgagaaaccttacttatagcgaaggaaaactgtagtaacaaaggtctattaatataatcataagttactgcatataaagctgaaatagactccccagataaatacagattaatccctctgtacaatgtgtcatctgaaacagaaaaatgtaatattgcaagagcatagaaaaataaacacttttctgttggtattaatttcttatattggttatcatgctgtgccctttagaaacaaaaaaaggtgtagcctctaattaggatggtgggaagtgacaaaacctaatgtggatagagagaacaccttaaacgcatgaaaattccttggttcatctgttttctgtgatatcttcaaagaagtaatcattttcttgacttgcttatgtacttgctgtctttatactttgacccttatttcaaaattatatcaactctattacaaagctctccatctgtttttctttgttcctatcatgttagctttatgcacttttgggccaatattccatcttatttgtaaagctcttttccttttgctatttttgcctttctttttttatttttttta

SEQ ID NO: 238629 - DNA, 780 bp, Cannabis indica
acatcctacgtgtcaaacagtactggaagattgttgaactttgatgtctctaaatgatccatacaccaaatgtcaatgttttagacacaaaaatttagattaaacttttaaggcatactcgctcgctagattagcgagaataaaaaagtagttaagtaaatataagagagacacagtaaatttatagtagttcactttttgtatcgcgacagtaatgggactacgtctacttcgagtttctatttctcatgagatggtaatacagaaataggctaagtatcaaaagctcatatttctagagagaaaattagaaaaagaaactctaaccttgtggacaattttatgaatatgaaaaataagctaagggagttttccttttataggtaaaggaagcacacaaaatgatgatctaacggtgaaaattagctcttgatggtgatggtcatttttcggagccaggtaggactcgctatgaataactcagagcttattttcgtaacactcttgggtgaaattttgtaacgctctgatacttaggcgtgctacagtaatttttcaattacagtcgggatccttgctaatcaaagaaattttcttgaaaatcgtgtcaaatgaaaattttagatttaattactaaactttataaacttttacacatttatttactaaagtcgggatcccgtatttaaacttttacaaaatattcgaaatatatttagtcaggtcgcgcaatgactataaaataaaaccctaggtgtcccgagaccgaacactccaggt

SEQ ID NO: 238630 - DNA, 994 bp, Cannabis indica
taaacaagtttagactccctctaaatcttcgccacaattctttgtaattcacttcacgaatctgatttctgaaacaccattaaacaccgaactcccttcgtctttgaagtgtgagtgtttacttcctcccgaagtaaggcttgaacaagtattcacccaagacctttctcttgttcaatcaagttgttcaaatctatcctaagaccggtataagaacaaatacataagtaataaaacttagttgaacaagtaagttctcacaaaaagaacacttcctcataaataaaaaatatggagaaataaaaaacttaagaggtgaattgattggctgtctctatattctatttatagaacatagcaaacttagagacatccacaaaatcaattgcatagttgtacaaactttttttttaaaaaaatcataatttgcagcagcataatcgagtttttacaggaaccaaatcaaaccaaaaaggaaactagtcaaatatgtgtctgatcataaacatggactttatacctgccaaaaacagtgtgcttgatctgatattatcaagacacaatcgaaaacattaaagagaaagagcaaggtcaaagtttccaaataaaatcaacttttcataagagaatttcttctctttcaagaattttccaaaacaagaacagctgaaaaggaaactttcctttgaaagaaaagagcaataaagacacaaaattaaattgaacaaatcggtttaattgcacaagaaatcacatgataaataaaaatattttgacacttaaattgccaagagaagacttcacacaaatcaagattgtagttagtattggattcaaattatgagggtgagggataaactaaaatcttctttcaccaaaaactagctcaaatctatggattattctatcaaaaaaaaacctgcagcagcttgtttagtaacacatggaaccagatgggggttgctaagcaggtttggactcgatacaacattcc

SEQ ID NO: 238631 - DNA, 596 bp, Cannabis indica
taatactcattaaaaaataattcatatgtataaaaactagttaacataacccgcacgactgtcttaattttcttagtattataataaaaaaataactattcattaatataataacataaaatataaaccttcaaaaaaaataattttaatatataatagtaaaaaaaatttaatcacatatttttgttaataaatttatttagaagaaatattttaaatgtattcattacattattagttattattattattagaaatattaaaaatttaattagtgtgttttattatttgttttttaagaagtttaaaatttatactattaacgtataatagagtttttgattgcatttttcaaaataaataaatagagtggtgtgaaaaaattaaagtattatcattattaaaataaacattccttcttataatgtatttgttttttatgtatatatttcgatcatttaaagttgttgtcatcattgtatctgccgttgttatcacctcatctatgcctgaccctaggcatagatgggctaagcctatgcctaaggctcacctagtcttggggccaaaatgtttttgtcctcttttaaaagtac

SEQ ID NO: 238632 - DNA, 1964 bp, Cannabis indica
actttttctttttttattattttactatttctgccacttattttgatttctgtttcattttttttattgagttaaatattcttaaattgtaccaaaactagagaaactactttgtttgcaaaagttttaaattaaacaaaaaaaaaaaaaaaaaaattaaggttagcaaaattgaataatttattatcattcatccactcatataatttattggaagcttttacaattaaaaggagtgcacaaatgtatttcttatctgtttcgatatttgagagaattttttagtttattgttttttatagtcgtcgatgttgtagttatttaaaacactctctaaaattttgagagattcagaaaaatttaacacaccaaaaatatggtttaaacaaactcttttattatatacgtgtataaaataaactgtttaaactctattttcgacgtgttaaatttttttaaatttcttaaaattttacaaaatgttctaaataactataaaatgaacaatcatacaaaaaaattggactaaaaaatttttctaatatcgaaatagataaaggtgtatcgataattgtagaaattttttaatttattttatttatcttgtttgttatattaggtgcatttgaaaagtcagtgaataattaaagttgattataatttggaataatttttaggtttgtacaaattagtagttacattattgagatacatcaattatactaatagagaattattaaaatgaatgaaatctcaaatttatttacaaactccaactcaacacgaccaaccaagtacactttcacagaagtgtacaaaatattaatgataagagagacagaagcaacagcactaccatgaatataagaggactagaacacattctgtgtgtatttttaaggtatttatataatttatgtttttaataattaattttaatagttagtaaaaatattttattatcatttgattttttatttatttgaaatctataatgtttttattatctttagtgggtcagtcaatgacaaattagtctatatgaaattcttacaaagatttaaggttaaaagagatttctaatctttctttttgggctggcaagatacaaaaacaaaatattacattttgaggttttgatgagatcttgcttacttgtagacttgtagtggtttactcataagtaatctatctttaaatagcaactgtcctatttgcagattgaatccaaattgaattggattgtgcggattgaactttattcctacaggaaatttatcagattttcaagtggaaacatttacgttattggtaggattaaaatgtgctcgagatattagacttcaagttaaatctttattctataattttttctccttgatgttagtcctgaataacaactttgtgtatcataatgaactaggtattctttgatagaaatattgtaatctgaatttagtcctaatgcattcatgagaatcaaacaataaatactcaaagattagcgaaagtgtacgggagtctattgaatcgattgtatagaggtatgatctcaaagtgatctgacctcctatatttgagcatataatttattgttctcttcaaatatctcataacctttttggttgctttatagtgattaattaatattatatctggacgcgtataaacttatcatacatacagctgaaatgtatggaatcttttgcatttcttaaactcaaggcttgctttaggacattgcttaagactaaatttgtctcctttaatgacaatggtatcatttgatctacaatcttgcatgtcaaatattttgagtactttatcgatataactcttctgtgataatccaagaatactccaagaacgatctcaatgtatttaaattcttaaaataaaagaggcgtcaccaaaatctttcatctcaaaatacttagatacaaatctcttggtttcgtgcaata

SEQ ID NO: 238633 - DNA, 959 bp, Cannabis indica
taaagcctgatgtaggaggggtacggagcccccccaacaaccaaagtcccatgagactttactatgcatcccactgcaccctcagctcgcaatgccttatcaaccatttcaacataggtggtactgtcgtcaatagtgatcatcaagtcatgtctgatcttcgcattcaacccatccaaatacttctctttcttgctgaaatcggttggcacaattctcgaggccaaccttgccaaacgattaaattgcgttgtgtattcagtaacactcatattttctttctgagtcagttgggtgaatttttttctttttgcacttctgactacttcattgtaatacttagcattgaaaagttcctggaacttttcctaggtaattgttgtaacatcgtgaatcatggacaccatgtcccacaaaatcagtgtgtcttcttgaaattagaaggtggcacagaccaccctatcactaccggtgacacccataaaattcaaaattctggtaatcactgttagtcattgctaagctttcatgacatcaggacctcccaaaaaaactagaggtgcttgcttacggaatctttcatacaggggttccatccagttcactgtaaccacaggttcgccctgcacagcaggggaaggtgccactggtatttctggagcaggcattgcaggagcaccctgctgtctcaaccgtcgaatctcatcatcttgttcattgattctggcttgcatcgttgcaaacctattttcccaattttggtcatcctgagcagcttgggcagcctgtggcggattaacatcacctcagccacgtgccctgtccttgggacctctacctcagccacagatattaaggggaatctgagctccctgaccaccactggatccaaccgaattaccctggctcctggtattttgcctggcgtccatactaatttagaacagcctgcataacca

SEQ ID NO: 238634 - DNA, 656 bp, Cannabis indica
tctcatatattttaatttgataattagtatcaaaaatcacaagtagtttacaaggcgcaacttcttagacactactatatatatctattagaaatagtctttcatatatgatatcactttgtgcttttactttaaccaaatacccatactcgcttatgaatgtttaccgtgtttctcctctttcagtttgaaatatccaatttatgtttttttaaaaatgttgaagttgtctcctcactaacaaattcaagatacgatgttggcaaattaggcttcttaactatattgttttaaaaattaatgtgattataatttttggttttagattgagaatacattaaaagattacaaaaggaaaaaagaaaaagtgatgaaagtaagggacactcataaacagataaatgatgcaattaatgaaactctccaaattgttaggcgttattctgaaaataataataataataataagagagaattactttggtagatttacgattagggtttctccgttgtttgctttggtagattttagatttttgtaaaaatatatatataaaaaaactaaaagtgtaaaataaaaaattacttaaataaaattaaaattagttaattattaaaaaactaacacacacatagagtgggaggttttttttttt

SEQ ID NO: 238635 - DNA, 1034 bp, Cannabis indica
agaatctctattttaaaagatgtgatgtgagtgttcttagataggtagtagtgaaaaatgtggcctaacaaattgtgtatggagggtgatgggtgtttcctatgagagttcaattgaagactaaacatgtggatgtttctttgttgtgtccagtttgttatggggcgagtgaattattagcgaatagcgggttagtctatgattcaagttgatgcaggatcatttggggactggtttcttcacctgttctcacaattgggtgaggaacaaagtgtttaggtgcaggggcgaacccacatagaagcgaggggggcggtcgcctccttgaaaaaaaattgggaaaaaatgtatatacattttagttagttatgacatatatttatagtaaaagatgatgtttataaacataatattagttttgtgtaatggttaacttagattgcaactatgataaagatcaatggttctaataatctcattaagagcattttgtttctttttaagtttacttttgcccctctcttaaaaaaaattacgtctcctcactttaaatcttgggtctgccactgcaggtggtgatattggtttgagcaatttagttcgtacgaaatcaactttgtggaagggtaagaaaagtgaggtagagttcgttgtcgatttggctcgtatcactcttgaaaaatacattatttgacgaggagggaatgcatagttttggtgaggttaatcgggatcactagggtcgggtcgtgactgggattttgggactatagattgggtgagttcttcttgagattgttaaaactgtggctctcaataaagtactttcatggttgaagcgggattttttcggtgaaaatattatcaaattttactgcatccattgtagcagggtgtattgtagaaacacctagggtgtgtttggaagtaactgtgtagttactaggtaggataattactagggtagtaattacacagtttattaattacacatagggtgcgtttggaaagccacaatgtaattagatttgtgt

SEQ ID NO: 238636 - DNA, 565 bp, Cannabis indica
agtataccctgacagtctataaaacatctgaatccgtacaagcacctacgcaataccatttttttgggtatggagtggcactgactggattcagtattgcttccgaacagttgaaagtagaacttccaaagaagaatataagttagtcccagaacaagagaggaggaaaggatccgagacaaagtgagaattcaaagaaagcaaagaaggaatatgaaccaaggtacaccgagtactctaacctggtggatacttgagagaatgtgtacaaagcaacttacaacatggtccactatataaagcccccatgaacgcctcaagggggggttcagaaaagatccaagtgaaaggtgtgagtatcacaaagaagtaggacaccccacaaatgaatgtaaccacttaaaagatgagatcaaaatgctggtcaaagcaggaaacttgggacagtggatccaaattccaattatccatcctagacaggggtcaatctcggatagttgatcatttcaggatagcagggtaccgtaactcctctacaagcggtaggtcacccttaagctcctag

SEQ ID NO: 238637 - DNA, 1885 bp, Cannabis indica
aactttatttttggcactataaattatttgaattttttaaaatttttatacgtgatcctaaataattatagcctacataattaatgaaagaaaagaaaaaaaaatataaagctcttctagatattgaaatagataataaatgtactaaaataatatttttaggcttgtttggtacgtcgtattagatcgtgttgtattatattgaattaagttatatatcatatttttttttatataatattatgttaaattttaattaatactaaactattatatataggtgcttataaaagtcaataccacatataattttacataaaaatattgcttaaaatacaattcaatataatattgtacaatacaatatggtataatacgatgtgacaaagttaaacaaacgaaacctttatgactcgtttggtaggccgtataaggattgtattgtatttaataaataagactatgttttgataaagtaatatattgtattaattattacgattaaaattttaatataatgtaagttgtattatttaatacataataaatggtctggtataatacgatgtgacaaaggtaaacaaacgaaacctttatgactcgtttggtaggccgtataaggattgtattgtatttaataaataagactatgttttgataaagtaatatattgtattaattattacgattaaaattttaatataatgtaagttgtattatttaatacataataaatggtctgtattagcttgtattataatatttacaaaagatttagagttaaccccaacctccgacccgaatctagggacccgagacctggacttggataacctttttgggttcgtttggtacgtcgtattagatcgtgttatattatattgaattatgttgtatatcatatttttatataatatcatgttaaattttaatttatactaaattattatatatagatgcctataaaagtcaataccacatatagttttacataaaaatattctttaaaatacaattcaatataatactttacaatacaatgtggtgtaatacttaacaaagttaaacaaacaaacctttatgactcatttagtaggtcgtataagagtcacgttgtattaaataataaataacactatgtttggataaagtaatatattgtattaattattacgaccaaaattttcaatacaatgtaaattgtattatttaatatataacaaatagtctgtattagctcgtatgataaaatttacaaaggatttggggttaaccccaacctctgactcggatccaaggacctgagacccaaacttggatccgagatcctaacttggatctggacctggacctgggacccagagctggacccaaccctgagacctagagtcggacccgggattagaacccgaacccaaacctgaacccaactaaggattcgtccttacccgggactgacccaaacctggaactggacccgaacccaaattcgacctatagttggtattagggtcaagtttattaaaatatattatgactttacacaatataatacaatctaatacaatttaatatagtgtgccaaacaaccccttaaagattattttatagaattacagcaacatttttagagtgcaaatacacaaaagaaggtctgcaaatttgaagttttccaaaaaaaaagtctgcaaaagaaacagaggaaggtctgttactgggccctaaaatggagccatcggtacataacttacaaaaaatattggaatttagataatttttataaaactactgtcacaaggagattttttcaaaaataatatgtttttataaaataacagtagaacacaaaataaaataactaaaaacaacagtgaaacaattaaaa

SEQ ID NO: 238638 - DNA, 1676 bp, Cannabis indica
cttagtgaaatcaaatttcttgccagtttaaggacatacctgactctagttagtgatatagtgactccatcaaacatcttgaagcttacagtaccaacccctttgatttcacatgtctgatttttacctagaatgactttgcctccctaggtttccctaaaatcacaaaaaatttattgttggtcatgtgaaatgtacaactagaatccattatccaataatcattgaatgtggttgttgccgcataaacctctccactatcatagccatcattttgattggcattttgatagtctttttttttcttattgtctaatatttcccttgacccttttctgttcttgctactctttttccaaaaataactgactctcttgtagtgtcatggttttccacaatgatagcaaccattagggtctaaagggcctttgttgtttggttttcctttggtgttattgtgatgtcatttattatgtccctggttgttactcctatctctattctgccatggcttcctttgattaggtctgcctctacttaggttcaattcccaattggaatttcctaatctttcattcttcattagttcatttccaagtcttttgactttaatgctaaaatgacctcttcctttgttatggatgttctcccatacttgatcgctcttttaacctccctataggattctggtagggaatttagaatgatggtggcttggtttacatcactcaaggcttcattctcccttgagttagccagctcaatgtgcaatctaagaaattcatcaagattctgatttgaagttttggagtgactgattttgtatccaaagattctttccttgaaaaagatcttatttgtcaaggagttttgttagaactggtcttctagcttcttccatatttttgcaggggtttcttccttgtcaactaatctgataattccatcagataggttatatatgatgaatcttattgttgtttcaagcagctctccttgttgaatcttggttatcacttcaagctattctatagggtcctccagcactcttagtaatttttgttgagctaacagggatcaaatcttcctcctccgtatcctatagtcttctaaaccatcaaatttatcaatgtcagctttgatattactcatgatatcaaaatttaaatcaaatacagattgagttcgagtgttctcatccaaagggatgtcaaagaattcttcaagattgaattcttgttcttgatctcctccttcttctagaacttcttattttctccatcaatctatgagttgaattttgatgccaagaaccttggctctgatatcactataggaagtttaatacacacacttacaccaactcacaaaaatgacattagatatacaaaggtcaacttgttgaccttagttatcacacatgctactaaaatacacaaccatatttgtgacaatatcaccacacatgcacaaacctactttactaatcaagtttcctttcttgattctagaacaggcttagaaaagaatcaattttaccacattcaagattagcaaaacaatctaacacaattcatgcaggagtgattatcaacaacagaaattaaagagaaaattcaaagagaagcaactagatttatatatgtttgcccgaattatttggggtacgtcctctg

SEQ ID NO: 238639 - DNA, 1297 bp, Cannabis indica
agtttaatttataatctaattatggatttttggctcaactaaattaactcttagaattaacactttgagggaaataaaattcaatcctatcaaaaatcttagattctacttattgtataacatatacccagtcatccatgttattatgtcggcaaaacataagttgtaagaatcatcttctctcagaaactttaacgagtgaatcaaataacttaatgaacacaaataagagttcatgaatactcatgatttagatagataaaataataattacttaagtgatataaatagctcttttatgataaacaacatactgacaaaagattttttatttctatcaattcagtcatacataataaaattatataaagtacttttgttaaatgtatatccacatatatgttcccaataaaaatcacatgccactactatttagtgcttagtaaaccatacttggtaattccatattaaagatttcatatacattgtcaactagttttatatttatggcgttatcttaattctcttatactcttacaagatcatacactttctacatgaatatagaaatattttgtatttattaattatttttcaataattaacatattcatttataatatatttgtatcttatatattcaataatatattatttattaatatctagaattattaaatcatcaaatatttttcaagatttgaaattaatttgtgattagtcccaaacctctattagtcacatctaataaatcattaattactaatcatgataaatgtaacaggcaaaaattcaattcatattttctcaactcgaaccattttttaaaattaggtgattctttgtacgatgtgaagaattccaatagctatttggagtaatttgaaaaggtgggatgttgaaatggtttagtatctttcataaagtgacggaaagaaactacgacttcccaggggaggatcaacactgagactagttaccacgacgtctttcttggtgatctcaggattggttgatgggcaatgaggtcgttgagttgtaattagtttcgtacaacctgtagaaagaagttgtaacttctcgaatgttattaaatcagatggccttgttttagaaacgagatcctcgcaggaaaacatttattcttaaggcgcatccttatcacctaaagcctctgcttctttgtctcctcctgtcccaatattcgtgtcgtttccacctcaagcaggtaattcaatttcctagtccacctctttgacctcaccatcatagaggactattgcattaatgtaactgc

SEQ ID NO: 238640 - DNA, 610 bp, Cannabis indica
ccctcaagactcttgggtgcacttaactgtgtcctcagctcttagtggctttcctaccatatcagcataggtgggtttgtcatcagtggtaatcataaggtcgtgttttatatttggattaaatccatctaggtacttttctttcttactaaagtcggttgtcacaattcccgaggccaacctagccaatcgatcaaactgagttgtgtactcagtaacgctcatattctctttctgggtcagctggataaattcatttctctttgcacttctaactgcctcattgtagtacttgacattaaacaactgttggaactcttcccaagtaacagtggtaacatcccaagtcaaggacaccatgtcccaccaaactagggcatcctcttagaattggaatgtggcataggccactctatcattaccgatgacacccataaaatttaagattcttagaataactatcagccgatgttcgactttcatcacatcaggacctcccaaaaagacaggaggtgcctgcatgcagaaccttttgtacagcagtttcatccaattcactccagcaattggccctgcctacacagcaaggacaggagccacctgcatcttt

SEQ ID NO: 238641 - DNA, 1257 bp, Cannabis indica
aaatttagcatcaaaaagtatttctactgtaattattacaacaccaaaaattacattaaaaaatatttcttattattatattaattttttaataaaataaaaaaaaactatcatattaattaacaaaaatgaccacaattattatatttaactaataatttaaataaacttactaattaaattaaaaataataatactataaaatcaacaaaactcgataaataaaaatattatattgcaataacataaatattacattactaaagaacaaacattatattcataaaagaaattacattaaattaaacctaaaatacatacttgaaagtaattaaattatattaatttcgtgagttactatatttgccccaccacaagtgtttgattaatgtatttcgaagctcaatgtgagctttcttatccttaattattttatgtctagcaaaatattcttgaaacttagcattatcatattctaccatctcaacttctaaacttgacacttctgttagctcttcaagttgtgcatttagatcacgttcatcttctattatcatattatgcataataacacatgaagtcattatacactacaacaattgttcttgttaggggcgggcctattaccggtggggaaggtctgcccctaataatgaggttataccgacagatttaggggggccatcggcattagtttttttaaaaaaaattaaaatatattttaaaagaacaataccggcggaaaactcattattaggggccaaccccaccgctggtattaagggagtctatcaatgcgggaaaactccagcttatttattcaaattggtattagcagcggatttataccacaacaatcacaaactcaacaatttgtggagattctatcttcccagcaaccatattacccttcatcgccagtattgcaagctcaggacaatgcacaaacaactcatcgaaccttgaacaccattggtttagattttttaaataatgtgcttgatgaagacaataataattagtttaagttaattttagttatgtgtgaatttatttaagtttttaattatgcttggatttatttaaatttttaattatgtgtggatgataattatttaaaataataaaattgtaagagcactctcaacaacttctctattctattctttaaaatacctcactaaaatttcactttttctattttacctcacacatttacattacaccatacatcagcttctttatatttttctctat

SEQ ID NO: 238642 - DNA, 1180 bp, Cannabis indica
atttattagtataattttttttaaatatatgcatatattaatccattcaataggtgtaaatttaatattatttctatatagattatttaatatatgtagataattgtaattttagatatttgacaaccgtagtaattgtaaatatagtttgttattttttcttactaattttttttttctagtaattgagtataattatatattactatatgtaaaattaattttgttatataattggtattagagaatttaattatataaatttattataatattattttcacaataatattttaaaaaattcatcacacaaattatgagtttttataagatattattcattttgcaatttagcttatttttaaataattctttgtaagatggtttgtccaaaaatttggttatgcaaactactaaaccaaaatacaaaatgaccttaaaagagttcaaccaaaaacttatcaataagcactatgttcttgtattctttaggagttttgaatgattgggagaaaaccaaagtcaaatatgaatttcatggccaattttgtagagtttaaagttcattgtaacatatagccaactttatgtccaatttttacattgatccaattgttatatcggggcatttaaagcacaaaaactataaatactcgtttaagtttttcataacattttgaatcgtccaattccaaataaaatttgagattgtttagaaagaaaaacaagtgagaggattttccgaagcctagggcactatcgctctatctggtggcggatttcatctgcttcttcaaaactcattgcccggtgaagctaaatggggttttaaaaagcctaatcaatgccgttttcttttttgacatactatcttgcctatagccgcaacaacctgcaggcgctatcttcagttcattgcgtcgtagtcatccaacttgtcattgtattccaacaccttcctctttatcttagatgaatcgacccatgtaatgaaatcttccatattccttgtcacaaggaacgctggatcggtgatagtgtctggaccgactcgtatatgcccttgctcgatgtatgtcacagcctccttcaagtgctcggcaaacttcaaccgcaccagaattgtcgaaagccttcgtctacaacagagaacaagaaaaaaaaaacgacaaaagtaaaa

SEQ ID NO: 238643 - DNA, 802 bp, Cannabis indica
ttgtggaacaaattttggaactcaaaaattttcgaaaaacataaaattctttggtggggtatcctttcgaatgctctgctagtccatggtctcctgctaggagaatccccattaaagatgaattgtgcccattatgtggggaggctgcggaatcgatggaacacctgttcctctattgcaaatttgcttaccatctctggaggtcgatcctcccctttggggtgttcccggtccctgactctagtggtcgagtttgggattgggttaaatttctttggatgttgaagtcgaacgaggtggactcggacaagctgttcctttatgcttcaattgtcgttgacacaatatgaaaaactcgtaatgacaaggtacataactttcatccaagtaacattgtactggccattgactctatttctcattgttatacaaattatgtttcctgcttattccccccgacggtacttgtggcttctcctgcttggacccctccacctgaagattgggtcaaaatcaattgtgatgccaaggttggtggagagtccatgtgtattgcggctttggttaaagatcactctaaaactattatgtgggttgctgttaccatgctcaacttcagagatcctctaattggtgaggcggcggcgtgtcgtcttgctttggactcggttagactcaggaatcacaactttgtcttggtggagagtgattcagaaatggttatcaaagcactgaaatgacttcactctatttggaatattgataattatgtctctttatgtaatcaactctctaaaaactt

SEQ ID NO: 238644 - DNA, 600 bp, Cannabis indica
cttaatacgaacagatacaaaaaatacaaacagttttgtcatagtacgtttagatcgaattataattaaacttattttgacaaaaaatcaattcagggtcctgtttgtactattttaaaaaatacagggtctattttgtcatttaataatataagtccaattagtaacttttgtaaaacagagggttcaaaataatatttacccaaaattttattatcttcttcctcttcttcttcttatcattagggcaaaaaagtgagacaaaatcatcatcaaaaaaacaaacccagatcacaattcaccttctctcaaattgggattctctcaatttcgaatctttccaccatgactcgccggattctcgatgcagctctaacagttccgtcgccggctacggcaatcacccgtggctgtttaggggtctgggatggagattcggagcactgaatgtccgatctgtttgggggtttttgaagatgaagcaaacgacgtcgttgagtgttcacacttacataaccgaggaggcttaggggttgatcacattcgaaatggacaaatcgtgtgctccctttgcttcgaaaacttctccttgaacgtatt

SEQ ID NO: 238645 - DNA, 1123 bp, Cannabis indica
gtttttttttttttttggcctaaactctcatgaatttgctaatggatcctacctaaaaggcctttaaaaataagtctcataccaataattataaacatattattatcttttagaagaaattgcacggtatattgaaaaaaaaaatgaactcttttattccgtaactttttaatgtaattaggttataagctgttagctattttacatttgtataggttctttatgccatattaatactttgtaaagaatgttcagaataccgtatttgaaggttttgttttccattttttattatactaaaaaagtaaaaaaaaaaataaactagacaaacacagagatagagaaagaaaagtgaacatactagattcccatcccaaagctctggttttatattatgtcagatttgatttacacaccttcattaataatatatgggtgtgggtcactgtcttaacggctgcagttagcttctagaaaatcagagcaactgccgaagatgaaccaggaccaggaggagcatgttccaaccaggaccaggaggagcatgttccgtccattcatctccttcttatgatgatcagtgctcaatcactgcgtctgcgccgccaccaacagaaccaacttcagctttagcttctgtggctcatttgatatcggtattgggacacgtggctaaagataatggagctcatagtactctgacaaaaagacgaaaatttagtttgtattacaaacatagcagcgagctcagggagagtgacgacagagcctagactttggtggtttatgatgaatattgtggcaacgatattggtagtttgtgagaagctatctctccagaatttaaggccagcgttttgggagagggtcaaggcaagggcttcctctgaaaattagtgatggaaatttgggccgagggaacgagtacttttgggtacccacccaattggattagaattaccagccttaatgggtaataggacaaaagtagagtgcaatttatatactggaaatgggttcgaggcggggttggggtgatgttgaaaaacaattacagattatgagtattcgcaagtattaaccaaatataatccataactattgaagccaagatctagtattt

SEQ ID NO: 238646 - DNA, 511 bp, Cannabis indica
ttgtgttacgtatgcctaaaaaatcaatatacggtaattcattatcatgaaacattactattaattactatattatatatgaaaaattcccaaaaatatttgattaatatctgttaaaaaggtgacatatgcataagaaatagatagatcaagttacttgtgacaaatatttttgtcaactattcaataagtaaaatcaataggtaaatattttgtatgtatgtgtggtggtgtgagattttcttaccgaagtaccataagcaagtatttctttccggccattgataagtatatcacctgtctgtttggtttgtgaacttagtcgccctgtaatataaaataagtcaatactcctttcccgttttctttttttctcatattaaccttccgtatatataaagtacatatataatccttcgttgacaagatttaatttaataaaacaaatttaataagtcaacataattagagaaagaagataaactggaagaggaaaaagcttcatcttccc

SEQ ID NO: 238647 - DNA, 585 bp, Cannabis indica
taatttctcgaaagaaaaatgtctgcaaaggggcaggctcgttagagagagtactagccctcaagaccgagtggatcaaaaaagcgtgtcagtgcatcaagaacctggggaatgaggcagaaagagtcgcaagcatccccctgtcgacctaagacataagcttaatgataagcatggtaaccttaggaagcacttagagaaaaagaagtaagcaataccggtgtcggaggttaccctaaacaaaaggatcctggctgaattagaactcctctaaaaagacattggtagggtctcacgaaggcaaaaaagagatgacttggagtctaactgtgaggacagagagccctacgccaggaacatcctagaggcaaaactccctaacaatttcgaaatgcctgaaatggcaatatatacagaagatatgaaccccagtgaccctctgtcccaattcaatagagtaatgacagttatgagagtcagtaatgacgcgaagtgcttatgttttccattaacatttggcggatccgctgaagaatggttcaagaagttagaaccaggatcatggactgttggaacaagttgcag

SEQ ID NO: 238648 - DNA, 1231 bp, Cannabis indica
ggaacaagaatataagatagatgctgatcttcaggaccaggtgaagactttagacgagaaagttaaagctgctatcaagagagccaccatcgctgagggcaaagtcaccctttgggaagcattctccatgaaacaggaacataagcttacaaattatcaaaagcttattgaagggctttaggctggaaaggaaagtattaagaataatcttgcacttctccaaaataaaatggacaatgctaaagttttaaatgagcgtgccatgagtctgaagaatgtcttatttgctgaattggaggatagagttcagaggttggaagtcgagcttgtggcccaagatgcacaagtggtatgagacaaggctagatatcaagtgatgatctttgatgttgtgtattttgtttatagtggcaatcccaagttcaactggaatgagttctcaaaggatgccaaatatccctacttattggagtgtgaagcatgagagttgatggagaacatacacttaatgaacttgatattgtcaatgttttgagggttcaggcatacaaccctgacgatactgctatccactagtagattcttttgaacccatttattggtgatcccctaaatggttatttacacaaccaggtgtgccaggagataacaaaagcgaccatcaacccatttaagacttagatggttgattgcttagttcaagacttcaatcattgttcatttttttccttagcatttagtcttagttagccgatcgaccttagtggcctttaacctcatggaacatttgtcaaaacatttaattagaatttaatgtaatttaatttttttacttattttctttagtcactttccataccaaagtaccatttttactcttgattgttagtcttggtagcatagatatgtcaacttattgaacaccagtgtcacttgtgttgggattttatgccctaaataatacctatttcaatctaatctaatttgttatcaacaaaagattagaagtcatttatgtttacatgtagttttcatgtttatggtttaatgtatacaaaatctggtaagtccaaaacatatagtcattcgcaattacagtgatgtcaacacagtggaatgtgattgtgattatatgcttcaaagacaaagtccctgtttcatcattgcattggatttacactgatgtgataattgttaggctaaaattagtctaagtttcgggtcgtatttt

SEQ ID NO: 238649 - DNA, 2037 bp, Cannabis indica
atttttgtaataattgagactactattcatgcactttagttatgctacacgcttaagtcaattcgttctgaatggttattaagggtcttgattctttaaaagatgcgtctagcttctatagagctaatgttggattgaatctcttgagtaaataggaattggaggagtttattgctcttagttggcgcatttggcataagcacaacacctttgttcatcataactacaagcttttgtcagataatatagtttctaatgatcgcataattaaatcatgagaaatagtagataattaagagtttaattattgatttatgattatgtaattcttagtagaaattaggacttattgtcaaaattaagttttaggaaaatattatctcaattacggagatatatttgaatgccagatgcattatatatatattatatgtgaatttttataagtgtgtgttgcttacttcataagttagtaagggtaattaagtccttttaccttagattttattagtggatctttgaatggattgtaattaaaactaagttatttaattattagtatatgctaattatttagtggtattgttaaaaagccctgtgaagataaaatcttacagataagaaaatcacaccaatcttttttctctcactctttgggtcggcagcagcaagaggcaggaaattctagggttttcttggttgattttgagttagtattctcaactggttaaggtaaggtttatgcttcctttgtctttgagtttttgagagaaaagttagagttcatgcttgaatttttaggtttatgcttctgtgcgagttgagttggtttcttgagttttctgctggtatttgatgatgaattgagttatttttgtattgatttgggtgttaatttggtgaaatatcaaaaagctcaaacttacgtctttattggcaggtttgaattcagagagttatggctatggtttttggttgaaatatgtttattgtgccttatttaggtactctagagagttttattcaatttggggttgaattgagttatttattgggtttttcgggattcctacactgaaccagtcgaccagtttagttttgcactgcagaactagtccactgattcccccaggcagcacctttaaaaatcaatttaccggttggggatccaatttactagttgtagaaattttggcaccctagattttcatgttttagctatgcttagggtattgctgtgttatctatcgatagggaaacttttagtttcaattttaagtccccgaaaatgatttagcatatcgcttatcaattttacgtatgttgtgatttagaggcctataaaacatcgagcagcagtttccacttagggttaccgacatacttgcatttggaatcaaggtaagattagtataatgattgcataaatatatatatatatatttatgtatacatatttagtgtgcatgttagttgccatcagaataacatctcagggtaccagtgaggtgtacatggagttgcactgaggtaccaacaaatatatgttatgtaaaccaatggccatcgaatttcagggtatcagtgaggtgtacataaagttacacggagatgccaatatatatatgctaggcctccagatagtattaattaactgctaccacatcagtacgactagagtactgagtataggctggattcatagtcagtcatactttgtcgagaatgttcctgacctagttaacagatcgtgatcaagtgtatgggcgcttggttacaacctggttatatgtttatgtttatgattatgcttttcttactgagtctgtcgactcacagttattacgtgtatgtgcaggtaagagctagaaccgaaccagtgtaagtctaaagttaaggatgaagattgtacatatcaagataatttgacttggagtgtttagggccttcgggacacttttggctcactttgatagtcgctagacgataacttttgaagtttaaagggatattggcggctaaactacttgaacttta

SEQ ID NO: 238650 - DNA, 899 bp, Cannabis indica
agataggtaaagatctccacttaaaatatggatattaacatcttttatctattaattaagttacgaaaaaaggataactaaatccctagaaaataggactattatctctagggaaaacccttattttcgtgggttgttgggcctgtctcacaatttttcttagctattcagaatcgtctacagaatttggtcggccagacttattttgtagggcctggccggcctatgctctcccatggctaaccaggtattgttcccatagccttagtatgtgcctgtcacctttctatgtttcagccgttttatgtgcgtcactgtcttaatatgtgcctgccagccttggtatgtgcctaccagctttagtatgtgcctgccagcctttgtatgtgcctatcaaccttcctagcttctttttacagctttccttgcaaaggtcagacctccttaggcctttctcgatctgtcagacacattttgggctggccaacttgtgctcaaactctggccgacctataagcttcctttggtcagcttacacacttcccttagccgagcaggcatagttgctcaaggtcttaacggtctgcttaactcctttctcttattgcttgattgctttagaaccttgatggcaaacatgttgtgtaaggagactttgtcctgttattgataagttgtatcacacgtgtcctcaatcttgactgtgtggacatgccaggtcaagtagacaaaatttgagataacatacttcacataaaagtaatcacagagacatacaaactcaccaagaaataacagaacaactatatattctttacaaagaaacattttctctacaaatataagaaattaaggagtagaagagttcggtcttttgctactagtttaggtgatattta

SEQ ID NO: 238651 - DNA, 740 bp, Cannabis indica
gtgtttgacctgcaaggtaaatccaaatgctataccttgtgaattttgtccaacaacacaatgagccattctattctgcttggggagatttaaagagctcggagagagatgttatcccaatttctcaagtgggtgttttattctattcttttacaatggacttaatgatgaaacaaaaagttgggtggattatggagcagtggtaactggagagcctttgttaaggagaggccatgaagcaataaatctgttgaatgatatggcagattttgattacgattggcattgggatccatcacttcagggttggagtcaccaataccctccttattgtccaaactcaccccaactaattgaagaagaggagaatatactatcatttccagaagagattaatcgcttggcggacatggtaagagctctatgtgataatttaatagtgcatgattcagagagttttaaggataataactcaaataacaaaagttataagacttgtttgaacatagtagaagcaccagtagatgaatatatagaaaagattaagcctataattaaagagaaagaatcgtttgaagtgacagaaaatttgatacaatggatgcttgctcaacaaatgatgatctcaatttggtgaatgaagaaacattcatcctccattatgaagttattaaaggttaaatcacagtcaaagatgtggatggtcatgatgaaaccgaacaaccaattgagaggttatt

SEQ ID NO: 238652 - DNA, 2294 bp, Cannabis indica
aaataaaattaaaaaaatcgtaaaaatgttcaaaattccgtaaaactgtatttttgtaattttgttgttgtttttatatttttgtgaaataattcctatattttaataggtagaatcagtattatcgaaagtttaaaaggtaaaatcgctaatttaataaaaaaaaaaaaatagacatttaaatagaataattagacggaatctaaacaaaaaaatttactgtaaacataaaagttcagaaagaatttttaacaagtcttaagaatcaatattatagaaagttcagagaataaaattattaattttttattttttttttgaataaaacttctttagttcttattatattttttaaagatagaaatgaagaagagcaacaccacaacctgaagggatagaaagatgacgaaggcaaagaaggagttaatggcttcagctccatggagggtgagcgaggagcccaaagacgagttcaaagacgccaagctcaaggtaaccaccaagccagggggctcttcaaccatgcatgtccctggtaagaagtcacatcgttccatggaccaagacctcgatgattcccttgtcgaaatcgacccagagctccgttacagttttcatcgaaattttcaggttcttttcctctatcttttcgtccaatttgggtttatccagtgtttaaatgaatacccatctcataaatttcatttcttttgattttttttgggtacccatttgattatattactcaagggaataatgggtaatcaatttttatgtgacatttttgtggcttgcttgcagtttcttcaacgggtttttagtattgacaccattgtgaaacctcttccacctgtcatggcttacaatgtctcccgcaacttgagcttcttcactcgcattttcacgcagttcttcggtaagtcaatttgcttatcccttaaatcttgagtgaaagtccagaagataaaagtttcaatttttaaattgtagtagtttttagcaaaaccctttttcttgctaatccaatatatgtttttagaatctagtatgatctttatagaattgaataagaactagtctttgggttgtgagatggtgagtttgagtggttgtgattgttatttattgatttatcaaccatgattttactcttttgatatcatgtcatatgttatgtatctcaaactcaaattatgtccttgtcagtaggccatgtgattttagacttgtggcattttccccttctgttgttttagattgctaacatacttaaagtcaccttctgttgttttagattgctaacatacttaaagtcaatttaggtggggtttggtggaatggaaaggaaacaactttcattccattcttttgtttagtttcattttaaagtattagaatgtcattcttattctaattatgtttttattctttctaaccaaacaccatttaatggggtatttattatgtgagtttgagttggagagaatagagttggaaggagtagatgatacaatatcaattgtctcaggatgcactctttgagacagtgccaaactccaaatacactcttcgagagagtatcaatctccaattgaactaaagttctattttctcaatccatattccacaagagctacacaattacatatttataggctttctcaccacttacaatttacttataagcccatatagtattttcagtctaacaatatacttggaggaaatatgaaacctaagtgttgaaggggattaacattactaccatcttaatttaagaagtatgatccacttagaaacacaaacatttaatttagtttgatattcctattttcattctcatcaagtctaaaactcataccaaacgccaccatattttcggtttttgtagttattttcattgtgattaacccatcatactactactaatgatattgttaatgatcttccatattatagaccccgaaggtattgcaaatgctcagagatctcttggtataggacaggaagaaagagctcgaaaagttcgttgatggcggaaaaacatgaaggaatgaatgaagcaaatgatgtttacatgtattaaggttttttttccctcattgcagtctatgatggctttagatgttaaaaatacttctctagctcaagtttttgtttttgtttttatttttaaagggaaataaatatttcatcaactagttaaatggaacaagttttaaccaaaaacaacccaatacagttcaattaaaaatataggacaggcacataagtctgataaatgtaaacttgtt

SEQ ID NO: 238653 - DNA, 876 bp, Cannabis indica
ccttggacagattgtagatgtttgtatgcactttttacagagaagataccagatgtttccatattccaagaccatttatataaaatgtttatttaaataaataaataaacttaaatgtttcattttaaaaattattatgatattttaataaacaaacaatatttattatcataataaacacatgacattaataataacattataaacattaataatactaattattatttaatataagcatatgtatatacattatttataaaatataaataaaatttataaatgtattaatattgtatatttacttgtatataaatgaaaattacccaatttattatactttgtaccattttgattgtagtgataaaatgaattgtttattttgtgatttagatttagagactcattatatcatttgttttttttaaatgcaattaccgtaaacaaattcaagagaaaattttcaatcgagttgtgctgaatattcaacaaaatgagttaatatcttgcttgaagtgggtgaaaagatgcaaaagcttatgaggaaaagagaaatttatgtagttgtccttaatattttggatactataaataatgctcaatggaatgcacaagtttatactgtaatttttttttgtaaataaaatgagaagagaaatttattttacgtacgctttctcattttaaaagacagaaaactaatataaaaaatcgcatttagttagatagcttgagtataactccatagttataatttgttagaagttataaaaagttgtttattagtaataaaattcttcatacttacaataaaaaaatgcatgtattcacttaccatagaaagtgagttatagtttgaagcttgtacttttgaaa

SEQ ID NO: 238654 - DNA, 1148 bp, Cannabis indica
aggtgataaggaagttattgctcaaagggagacatggacatggattgtatcgtcttgacacaccagcaaagtcagcttccaactctacatgtcagtttttgtttctcaaacaaccttagaaaattacttgtgtctctgttctttccaaagtaagtgcaacacagtcctgtaatagtgtgtcttttgttttcaaaaatgatatatggcatagaaggttagggcatccttcaattagagtcttaaaacatatcttagctactgagaatgtacctttttccagcaataaaaaagttcacttttgtgatgcttgcaaattcagcaaatctcatgcacttccattcaaaatgtcctcaaactgtgcctctctaaattcttagaagttgctcatactgatctttggggtcctgcacccatattgtccaaaacaagttacaaatactacatacactttgttgatgattttagtagatacacttagatctatccacttaaagtaaaatcggatgcctttgaagcctttgttcagttcaaaataattgctaaaaatcaatttgaggaaataattaaaacacttaaaattgattggggtggggaataccaagccttttgagacattattgtagaacatggaattcaatttattcactcgtgtccccacacttcaactcaaaatgaaaaagttaagtgcaaacataggcacatagtcgaaatgggacttacacttttggcttaagttattataccactcaagtattgggttggtacctttcaaactattgtatatttattaaataggtttcctacacctgttttacatcataaatcacattttgaagtgttgtttaacaaataagatttctcctttctcaaagtgtttggttccacctgtttttcatgcttgagaccatatcaagcaaacaaatttcagtttcactctttgaaatgtgttaataatgtcataatgattgccataaggggtacaaatttcttagttcaactggaagagtttacatttctagaaatgtaacctttaatgagaatgaatgtccatttaaaaatggatttctcaataactatgcattaaaataaaaactattatagttcaaaactcctaatggtcccaacttcctaccatacgattcaccaaa

SEQ ID NO: 238655 - DNA, 4170 bp, Cannabis indica
ttgactcgtcaaattccaacaacggtttgatgtcaaaatggacaaagctattgtgtcttactaaaaacttagttacaaatgaattggacaaagctatttatagctttgtcatttggtgtcaaaatggacagttaacgaacttaactgtcaactgttaaacttaacagaatgaccaaccatcaatctaacagagcccttaggccccgtaatatcaaagataattaaccaggaaaaacaacaagggagaaagcaatacatatatacctatgatatgtgtgaattgttctccctttgaaggcagcaattgtgtgttccacaaatccagattcattcaaggtatctgtatggatattaacctatccaaatgaaaagaaaaccattttatattttcttgaaatttaatcataagatatttctgaaaaatgaagaggaaagaaaacttaaaggtgtacctgaatgtcatattgttctgcaacagtcaaacaattgtctattgctgcaggagtagttccccagtcctcgtgtagcttcagtcccattgctccggctttaattatttcatgtagctcatcaggttttgaactgttaccctgaagtgaaaaagtgttagcaaaaccatagggggatagatttcagggctggaggtttaagccatctactcttctcagttaatgatactgataggctcattcttgaatgtttacaaagagacaaaggttaaaagaagtttaaaacgagtagttaacagaccttccccgtaaaaccgaaatttaaaggcagctcatcagttgattgcagcattagtttcatttggaaaggtgccggggtgcaagttgttgcacgggttccttctgaaggtcctgttccacccccaacaacagttgtgatgcctacataagaaatcaaattcaagcacaagttactccttactcaaattgataagagctgttgggattgaggtatataacttacatacaaggtagagtcataaacataataaatggataagaatatactaaatatcttctaaaatagtttttcctgacagcattttgcagcaaatgtatttacacaaatgaaatctgtacatagacttggattataagtgcatatctctgttctgatacagtgagctatgtttcacagaagtatttatgattttgtagcttaccacttgatattgcttcatatgccaactgagggcatataaaatgtacatgacagtctatggcccctgcagttaaaatctttccttcacccgcaataacctcggtgttgacctagttatatagaaaaaataccataagtatgtacgacattaacatggtgagaacttatacagtaaagactgctgagatagaatttaccccaataatcatgttgggagatacaccattcataacatccggattgccagctttcccaatggaaacaataagaccacctttgataccaatatctgctttatatattccactataatcaattaccaaggcgttagtaataacagtatctaaagattcgtcagttggatgcccacatgactgccccatcccgtctcttataacttttccaccgccaaacacacactcctcgccataaacagaaaaatctttttctatttcagcatacaaatcagtatcacctagctgaattttgtctccagtagtaggcccatacatgttagcatatgcctcacgagaaactaccatgttgaaaggcaagccttctccagtaataccttcactacaaaatcagttgtcgaggaaagaagacactatcaagtatacttattcacaaacttagataaccaaatcgcaccttgctagaacggaattatgtcaaaacaggcactacaaattgtcaagtagactgacctagcatttgcttcttccttatttccaaatcctctttcatttaaagttctgaagacttcttcccacctggcatcatcaactggaccatctacaatgccgttacctcctctgattactctattacctcctatgcttacaagtacaacacttttgcactcccctggctggccaaacaaaataatcattaatctagagaatgtatatgtacatgagaggaattgaatagcaataaattggtataaattaaaattaaactacacaacctcaaatcttgtggctgttccagctagtatattgaggcgcatgccatatgctctcattcgatcaaaaactaagaagggattaacctcaatgaagtgatagtggctgccaacctggaattatgctaagactttcagaagacacaacaattatttttctaaagttcttcagaaaataaggtatttacacaggacaatatcaaaatcatagtgaaatctgtgcaaatgagataattggggtgttctttgaaaaaatatatgtattaggaggttagagagtgaaacgaagactaaagtaacgactaaaaaagtagcatagactcttacagaaatgcatagaaaagttaaagagacagggaatgctaatattgatgacctgaaccggcctgtctccagtattggtaactttgatgactactgctttccttcttggattaagcataatgtccccatatccatgtattatatgaccaggattctcatcatcttctatgctagcaaatttgtctgacgaaggcactgaagaacgattttgtaattttaaaatccataaaacaaaaataagcttatgaatacttgttcgccagttcgtatatgaaaaaccaagaaaacatctggaacaatatttttgaagaataaagttaactgcaagtatctgaagaatgttgaattaaaacaataaggttcaagccatccaaatttcgatctctaattcacatactgtaaaatttcataatctcataagttgcttgcactgacaaaagggagcattacacatagattagaagtatattggtcccaaaggaaagctgttccaatatttacattctaaatctgtaaaatctttacctggaagaaaagaaccatgtaaagctagctccagatttccattttcactggcgattggatcgtgaacggttattaatttggtaccatcaggaaaggtcccctcaacctacaaaattatattctcatcttctctctttctctcaccacagttcaaatatacacataacaacagtaaatttaaatgatatctatagattgcaattgacattgctaagctcaaacaaaaagtttcaaatattcgtacctgtactgtatccaagagatgtggaacagcagagagaacatgtctcctgttacaaaaaaaaaaaatccatgaattcacaatgcctttaaacttaatgtaatataaatttctttttttatgaacaatgtaatataaatttcttgaataaacataataaatacaaaattgaattaaatttgcttctattattattaccttcctaggaattgtttccctaagtccatcaattctgccacagttctgtcaccatctcggacaaactctaaaatcaaaatcaacccaaaataaaataaaaaaagaaaaagaaaaaaaaataaataaatcaggaaactcattcttcttattgattcagtctaaacccatgtcataaaattccattctttatcccaaatcaatcaaagttataaactcttctttttctagtcaataaagtcaatagattttcattcaaaaaaaaagtcaatagattagaaatataagaaaaagaaaaacctgtgtggctatgagagccactgtttcagtatagttgagcttcaaaccacgagcaagacgcttctgagcgaggaacccagcattgtgaagacctaatttttcaacctctcttggcgttaacttcatttttttcttcttactattctgtttacccaattaacgcttctatagaaagaatatgacaatcagtgcatataattaccataacactttgcactcttcagagaaagctttcgaatcaaatagtatgaagaaagtcagcttctttgagattgagactgctcttactgcctgtaccttgcactgtcttcttctgtttgcttatctcttaaatatgcatactttgttgtactctgtatttttttttattatttcagtattctaatcataaaaccatgatatcataagacaagacagattactcttctttcttagttttttttttttt

SEQ ID NO: 238656 - DNA, 1594 bp, Cannabis indica
actcatcttgtgtgttgctttttttagatgaacccatgtgagttttggggaagcgagcaccaaatcgaccaggatctacttcatctcttgcacgaggatcatcctcgtctctgttctagcccaccttcttcgagtgaaaggcattcttcgttaaatcttttgtacagccagagaatgtggctcgtatcaaaaagacaatgtgtagggttgacgcatctgaccctcaagtttctcggcacgcaactttgcctagcgccgaacaagatccagccgcccaggagggggaagatcatgaaagggacgctgaggtctaggagattgaagagtaggacgatgtccatcctagcagtccctccgaggcggaggaaaaggaggaggttgcacccccaaactatgagggatacaatgaggctggggagccagtcgatcctgatggtaacatcctggttgagggcgtggactacgccaaagaggaacttactgttgtggttcctcatagaaggcaaagtaccttggttgccagatgggtgagtcctccatcaaaggttactgaggcgcgcctgcgggatctcgaccaagatggctacctgggcgaattgtattgttacattcccgcccaccataactgagccacaaaccctgaaaagggaatgtgtacctatagtcgggtgctcatgcctagcaaggggtgttgttgtctttgcatccgtactccaggaatgtggcagacttcttccgcctctgtctgacctagtttactcttaagggcattaagtatctgtccgccctcttcgtcctctatgcctcccagaagtgggatatgccttctccccacgaggttagctggtttttttgatttgaagtccacccctaagcaaggcaggtcgaggtacttctatttctctcaaccagacttcaagtggttgacgggcactggggataaggccatcagcaaaattgggtgttttgttgatgagtacttcatggtggatcgcatgggcactacccacactcgattgcagcagatccccacatatcaccaccctcccttcactcttgctcttagagatagagctcaagagcttgctcagctgctgggggatgaccggtaacatcattcagttgacctctgaggacaactttgtgaagtacgagctctattcaaaggatttcattcctaggaagaggaaatctggtgttggacgggctgagggagctcataaggaaaatgagctgattcaactgaagcgtgaggctaagttgaagggagatgaaagggccaagcagtatgctcaagagcccttcaatcctgaagataaggctgaggaagagcaggtgactctgctcaagaggaggaagaaacttctggcccaatccaggcccgttgaatatgcaattcgcattagagagcctagttcacctgctcggccatcttctcccgtgctagggaaagggaaagctattacggttgagataagagacttatcaagtgatgattaactttcgagtcttgctcgggccatcgtcttcaaggctacttcgtgttgtttttaaactgcttgactattatgctttatgcttctgatgtcttttt

SEQ ID NO: 238657 - DNA, 722 bp, Cannabis indica
aaaatatttaatttttttcacactaatttttttttagtgggggctgtaccacactcttattagtgtgtccgtcactgatcatcatatcacatgcttcttcttcttttaccaagaaatcttaaaagcctttgtctcatttttttacactcttacctctgcagtttgagaaacttgtacacttaattaattttcatttatgttctaaaattcttagcacaaaaatgtggctaatacatgagaaatattgttatagggcattatagtacagtttgtcataatttgaattctctttaaatttttagtttaataatattaattattttaataaaattgctaaacattcccaaggtagcacggctactaataatattaacaataatttgattttcaattataaataaactaaaatttaatttttaatgataataatatttaatttatattttattaaaactttcgtagataaaaaattaaacttaaatatttaactggaaattaaaattacttaattaaataattaggctatatgcaaaatactcaaatatatattagcattattagtattactgatgtctagtacgtagtagtagtagtaatgctagtgttatattggttctaactaagtctttatggtatcaatttcgtgagacagaattacaggtttgttttgaatgaaataaggttttgaggtatagtaattaagtatgaacaatatacataag

SEQ ID NO: 238658 - DNA, 1786 bp, Cannabis indica
tctcactaaatttaatgagccacagtaaaccatactattttttttaaaaaaaaaaattaataattaaataatacttttaaaaaaaaaaaaaattatatatatttagcattaaaatattattataataataaaatagtaaaaaatataaaatttggtgtaatttttagtattagtggttagaattgaaagaaaattagtatttaatagtaattttttgatgttgatttaacactaaatttaagtttctccattgcagatgctcttagccgcccattctttaaatctttgtatattagtgtatcttaccttatatatttttattagttgtttgttttaaaaaattattaaattttatttgtcaattagttttttttttttaatcaagaagaactttattaattaccaaaaaacactccaaatcagagagcaacaaacacctcaacacacattaattacaaaacaaatattgtaaaaaagcaatttcctctatacatcttttcctattctttatcatatacactctatattcaacctcttttttaattttgagaactataggaattgaaaaagagtaataagagcaaaatggaattatgtccaacttacaagacgaggacacagaaccatgtatgaaaagaatcatagaagcacaactactgtcacacttcagaatgccgcagatggagttgattaaagaaaaatagaccccaaagacctaggccgatgcaagactgcacataggatgtcaacctaggcgcccaactctgaagttggacccaaattgagcccttggatgttcatgtgacatccttagcttcatggtttatcattttaaggtaactatgacctgttcacttgagctttttcaaaggatggtagctaaaaacgtcttcattggatctttgtccctacttgagcgcccattactatcaactagagcactgacacagtttctaatgcccaagttgaccacctttagtcccggtggttagagcccatgattatttcctttttaccacgtgtcaaaagtgttgtccatgttatcaggtcaaatttctgggtaaatataaatttatatataattatcaactcatatcaaaacacacattgtattttaaaatatattgtaattactacctaaataattataagatttaaaccatctgcaatgtgggatataaaaattgtgctatatttagcacaaaaagtaactttctagtatatttatatcaattttagcattatgttccaacacacaattacaaaacttgaagcaaatttaatatttaatttatgattttattaaaaaaaatataaaaaataataatctaatcattaattttattatataaagcaataaaaagttaaaagctttataatttaacacaataactaaatttaataataaaatattaaaaataacacaaaaataaatatagaaataatgtatttcttgtgatgtaaattttatatcatagcatgttaaaaaagaaatttgaatcaacctttgtcacaatattaaataatttttttaattttttaatgaattatattttagcaatagattactaatttgcatattaaaaagactcttacaccaaaatccaatttcttcttggtcttttcttgatattctaggtttaaataatagaaattttactacttatttaggtatgcctcatagaactagtaaatccaaaaaacaatcttttataaccaaattgaagtttttctagagccgataagggaggtttttttaaaagttgttgttcaaactcttcctact

SEQ ID NO: 238659 - DNA, 1241 bp, Cannabis indica
agataattttcttttggaaccttcttgtttataaaatgaatgtgtcctttttttgagcatcttagaaaaaaataaataagatattcttttcttgtctttgtcttgtagttaaaaagaatacttactttgcgtaagaaaaaaaaaaaagaacacttactttttttataaaattcttattttattactgtttagaaaagaaaaaaaaaccccttgttttgtagctatacctatcaaattttagttctattggagaaattacttcttcttttgtttttaattttatccttgttttttttttctttttcaaacttttaaattttactaaaatataattacaagtcacctctaatttctctaaaaatataaactctttttttttctctcttttttgttttattttctttaatttaaataaaacaaaaaaatcattacaagtttttgtaaattgttatgctgaacaaaactttttttaaataaactcaaaacttctattttttttttccagcaaaaatacccctaatggcatgagaagaggcatcaaggaaattttgggtattgatactcctgatggtgttataaattatctgggtctaccccttttcagatctagacaaaaggattctgactttaacttcatacttgacaacctcacttctaaactgcaaggctggaaggcaaagactttgtcaaaggcgggacgggctacccttataaaatcagtggggttgtctctacctatatatgctatgcaaactacaaaactctctaatcgcctcattaatataatcgatggtttggttcgagatttttagtggggcttcgagaaaggaaaccatggccttcatcttagagcttgggataaactttgtcttcctaaatctcttaatggactaggatttcgaaaaacaaaagaaatgaacctcacttttttggccaagtgggggtggaaaattctgaatgggtgtcaatcgttatgatgcaagattttggaagcaaagtacttaaatgggaaggattttctcagttgcagatataaagactcttattcttgattttggaaaaatgttgtgaaagccaatgcaattttgagaaaaggggcttgtaaattggtggcaaatggcagagatactagtatttggagggatccttggattcctcattgagaggtttcatcccgaaaccaaatggtaatgtgttaccagataatcagtgtgtggatgatctcctgctgacaagtgggg

SEQ ID NO: 238660 - DNA, 863 bp, Cannabis indica
caaaacgaaacaaagagaaagagacatccgagtcacctctaactggctcaccacaaaaaattcaaagcgtaatacccctttttccttcaaccaccccgagtcatcttccattgcgcacatgagagagcattgaaggtggtggtctcactctcagtctctgtagattgggctttttcgactccggttgagagcaaagcgtggctccaaggaaaatcttgtgatgggaaagagggtctgatccaatggtgagcaacatacaatgcatatctgggtttgattctgcattgaagatcgttggagagaaaggtagttgcagaggaagagagagagtgcggaagacaatttagtctctattggaccagtcactgtcggaaaaggaaggagatctgagcttgaaggagatttgagctgctcagatcagggaaggaagaagaagacttagggagagagagtgagaaagaaagatcaatgagagagtgagagagcgtgagagagagagtcgagagaaaataaatattaaagaaaaaattattattattattattaataatttataaatttaaattattctttttaatttaaaatatttctacaaaagtatttttttataatttttaaatagttatattagctggactaatataaatgtgttacgtgtacatgatggtacacgtatgtattctatgtcaactaataacttagataaatggatggcgacttaaatttgactaatgatttagccgtttgaagaattttaccattaaaatttgaagatttaagagttaagtgcaagtgaaataattgttgggagggttttaactgtaaattactcctaaaaataatatatatatatgggtatgctc

SEQ ID NO: 238661 - DNA, 989 bp, Cannabis indica
tatataactgtagttgttattgatttaaagagataaatgaaatttgagttaaattgaattagatatttttaatataaatatattaaaactaaatataataattttttcaattaaataactaaattaatcatataaattaaaatatttcttttattgattattaaaaatttaatattaataagatttatatttctagtgttctaccttaaaaaaaaaaatattaaaaaaggttccatttatataacattcctaattgtacttcaataacatatgcacacagttttataataattaatattgatatgaatttattatttttatttatttttttttcttaaattatcactttttataatatcaaatgcatgtaattattctttacatcattctattgagacaaaaaactttcgtcaacaaatatgtgtgtatctattcgaaataaattgaatttggtacagtttgatgatttattagattaattttgacttttaaaaagtgtttttataagagagaggatatgtatgtacgggaaaatcatcagttttggatgcgatcatggcgaactggcgaccattcttcaaaaaacagccaaccctaaaaagtcttgtttcaaatataaaatacataagagcattatattggttcaatattattatcaattagggtcatattaatatattatatatagcttaattagaattttttaccattaaattttgacatgtactaaatcatgtctctaaatttttctgatcgtgatttttgtctaattttattcaatttttactaattttagtgatttatttatgtactaaatcatactgctcaaaacttgaacatataccaaatcatggctctcgtactttgacatatgtcaaaatcatgcccccctgaactttcatcccatgttagattttccttactaaaaattggacaaaagccccttaaattcaacaatctcaatagttctggggaattttttaacgacc

SEQ ID NO: 238662 - DNA, 4107 bp, Cannabis indica
atttcaccatatgtactacacagtagtaatttattttggcactatcaaaattgacacaaaaagtacaaagcaaaacaattgtggatgttaaggagttcaaccttaattatttgagtttaagagattcatcttgccaagagatgcaaatactaataaatagcctatttcaaatctatatgtggcatggtatcatgaagcactagttgctaattaacttgttggatgacctcaagaagttcttttcctttttttatttttttttatttttttaagtaaaagcgtgattgatatataattagataataattagacatcttggtcattacataaaatattcataataatggtagatgacgaaatcaaaccaaacttattttgggaaaaagcccactttgccacattataagcgataaacttacaagttttactaatattagagaaaatacaactactaaataaaggagaataattattacaaaatgagacatagttttcaattgcccggtgggactccttcccgataagggaattaataactatcctcgagtcgctctccacaataacgaagtcggagccaatgtctctcgtagccgaaagagccagacaacaagccgctgcttcgccacataacacatccgagaaatctaactgagacgtttgaatccaaatcacttgacctagatggtttctggccacaactgcagcacacatgctttcaaaccccactttaacatcgcagttcagctttatccaatcctggagggaggagaccagtcctccttcaggtaagaagcaggggtagggaaaatagaagcatgtagatctgcaaaagaagtacaaatggaatcaatacacttcttcacatcaacagtagcattattatgtaccttttcattgcacagtcgccaaaattgtgtctataacaatcgaagcataaaagaaaacctcatccgaaggaatgcccttatgtttaaagtcccaaatgaatttaacctagtcccacatgcgaattctgaaatcacaaacagggtaaatggcccaaggagaagacctccagacatgaaagtaataaacttctttttttgttcttattttttttttttagttagccaaaaagataagcaataaaattgatatttcatttgtgaagcaaaaaatccataacaaagaggcccaattgacagctaatacgagagccctctaattgtaatgggccccaaatgggcttttcacgtgtggaaatacaggaatttgggttaacttttacaaaaatactgtcacacagaaattttttcaaaaatactgtatttttataaaacaccagtaaaacacaaagcagaacaactcaaaacaacactagaacactagtaaaacacccgtagaacactagtgaaaatttaacacagtatactgcagtatgaaacttataaaaaaacacagtaaaaaagtaaaaaataccgcctgacagtatttttgtaaaaaaatgacaaaagttagtataccatgtaaatttcccttattttatttatattgaagaagttcatttattttattttctttttaataatacacctttattttcttttgtgttagtcttaggctttcacttatatttttgttgttttaataatggtttatttgtatgaatcatcatattataagtgtcttaaaggtccttctccatgtttttatataagcaagttggtccttacaattattatttgatgctaatactaggactaattttgttaaaatattactaaataaaatcataaataaataaatataactttatgattgtaatttgcatgtattagaaaattggtctacaaccttattatttttaatatgtcttaaaattttaaaataaaaattattgttgaaaacatgttataaataacgaaaagaatgctaattgctacatcaacattaattttgacacagttaggtttgtaattgaataataagtcttatatactcttcactaaattaaaatatgtgagatttgatattaaattgtattaatagtaatatcacatgtaaaataatattgcacaccactgataccacttaatatttcttattagagctgggtttaagctaaggtgggctaggcctatgcctaagacccacccaactcagaggtcaaaaaaaaaaatgttttctatttacaattatacatacattttagtagcttttcataatttcacataatttttaaataaatgacctaataattttttttctaaggtcaacccaacctcatagccgacttatcaacagggccgaccctaggcataggcgggctaggcccgtgcctagggcccattcattttagggacctaattaaaaaaatactttttaaaatgactatttatctttatagtaagagtccatattttttttctatgacccatttcaactcatggtcggtcctgatatcaatattgtccaacaatgcttgatatgtagatgataattaataattttttatattaactattaaataaaaatgtataagatttcatatttaattatactaataataatactaattcttaaatattgtattaacatctttcttcatagtttaagtgatttccatttgtgcttttgctttgtctaaaactttgacttgtttgttgcttttgtcattaatttgagctatttgtttgtgcaattaattattctcatgtactagacccaaaattgaagtgaattaaattgatttatttaccaagttaagaaatccataaggacaacactcacaacaattttattaatgtatgtctcatgaacataccaacaaatggtatttaatttaattaattccttttaaatattttattaatatgttaattaataattaatatgcttctttaaggggattggttatgtggaaatgggcctatttttaatgaatagatgctttttaatatctgtataccaattatgaaattccctacaatttgaaccctttggaatttggatatgcaccaaaagattcctataaatactattattttattttcaactttcacataatcaaataattttatttatttttttcttactatcaatgagtgaaaaacaagagaacacaaaagttcttagctatgtatggccattgaatagtattgctcttctctctctcttccattttttagtggaaattattacctcctttattgtctcttttcaattcatgaaaagtcaaagaaaaacataatacaataataaagacacttgtaagaccatctccataggtaaaaaatatactaaatttagtattaaaaaataataaatgttttactaggcacacattttacaattgtgtctcaatgcataataccaaattaaaatgtaaattaatataaatcaatatattaaatatattgttttctttttattttctatgactacattttttttgtttacatagatatattgacaaaaagaattatagcatttatgtccaaaagaaaaaaaaaccaattaaaacacaattttatcactatttttatgactatttattataagtaacaaaaaaaattaatgttttattatgagaaacaataagactttattattgttatgaatagtgtactcctttcatacataatgtaattgattatgacttataaaatgcaatcatcctaaagtatttagtgtttcaaatttcaaccaaaactttaaaatgaattatttcaaagtaaaaagtagaaaagataacttttattaaatgatttgtgaacaatattatttccttacattgaacaaggatattaaaaaatatctttaaaaaaaataaggagatagccttttcaaaaaaaaaataataataataataataaggagatagtatatactttttactaaaaaaaaaaaaagtaaatacaactttgatcacttaagtttaattgaaattgtaatctagaaattctatttaaaagaaattatgaaaagaacccttttcaatttttcttaaagtaatctaaattagacctttaattaaataaaaaaattacaaactattattataccttttagaaaaatattatacataaaaatataagtttaataacacattagatttatttagtatta

SEQ ID NO: 238663 - DNA, 852 bp, Cannabis indica
aattgtactcaataatagtcatataagagtatctacaattgtaaaattttagagggtggacatattatgtagcataatatggagatgctataccattggagagaaaatgatgacattctaaaaatttgcatagatgctatgttgtagcattgatactatttatttttcttaataaaaattgaagctaaaaacttactgtagctaaaaattaagatatatattaaataataatatgtgagaatataattataatatttttaaagagtattatacattggagtgtttttagaattaaaagcctaaaaaataatatggaagaaagataaaacaaaatattatacttttagataatgtgtaaatttttagcatcctcaaattgaaggtgctctaacatctacaccaactatagtagcagtgtggctagcaccctcctatgtgttaatattattattggtaaaattaaatattgagtctcatataatttaatataataactaggcacgattgtagtctaatactcttactaattctttatctattaccgagaatcaatatcttttgttaaaaaattaatattttatactgtgttaaatctattaaaatttgacatattaacaaatttaaattttattaaatatgttaattaatttagttgaaagtttaatttttttataaataaaaattaattgatgtattgtatgagataacactttttaacagtagatcgttcttgattaatattagcggtggcatttgggtacgtagaaaaatctttgacattataagtcaacacgtgtacctaaaacccataaaaccctacaacgtcaataccacctaaaccttctactcctc

SEQ ID NO: 238664 - DNA, 555 bp, Cannabis indica
atgtaacattttttgtaattaaaacttatggaactatgctacacaaattttttaagtgtacaaatatagggagaataattaattgcatggctcataaagctcctatatatgtgttctttgcttaatttttattgatttttaattcacccacatatataattcttttcagataattaatcatgactcaagttaattgggctataaacaagagttttagaaagaaaaaaaagtgcacttatatatttttgagtaatataagctatcattcatgtcaatatccataggtgcatctttgtttttgacatataaaaaaattaatataattaattatatgacagtctatgttgtaattataataaatatttactaatttttccaaaaaattataaataatttatgatactaaaaccataatttagaaatattaaaaaaagcacttatgcatgcaactaaaggcttaagtcctgtttttaatatcataaattatttaattatttttttactacagaaatgtctactatttaatttaactataacaaattgcattatatttct

SEQ ID NO: 238665 - DNA, 1131 bp, Cannabis indica
aattttaaaataagtaattagtaatttaaatgtttatctaatttaatttactaataaattatgagttttttttattattgctgttgtaacttattagtttattaaattgacttgaaggtaacataaatattagttaccaaaaaaaaaaataatataaaagtttaaaataacataattatttaatatagatttaaaaaaaaaaaaaaacacataggtttcaaagtatcagaagctatacaaaataattagtatataaaaatagtagcttattatattacatgacaactcattagtttcaataaactttaaagttaccaaaatgtattttaaataataagatactataatataacttaaaaataattaattaattattaagatatttacaaataaattttagagataaccaaattctatcacaaattatatgatataaaaatatttttttttttatgtaaaagtaactaactagtttcttatcaacattataagtaagtaaccaaaaagtaagttttgaaaatgtaggtaaattaaaaataaaaggtagaatttgagattaagtttgtttcaggcatattaatttcgaattaaggtattttttgaagatgtggcaaggtattattgtaaatgagatttgttaaggtatttttgtaattagtttgtattttaagtatattattgaaaaaatccctatatattaatacattcatgccttacaatttaattatggtaatttaaatattaaaaaagttcaataattaactaccaatcaccctcaaacctcactacaataaatatttctattatataacatatattaatatattatttttttaaaaaaaaaaagcaatagcatatatattaataatttatcaatataataaaatcaacattaatataattattgatttagcttaataataattaatataattaatttaaacaataaaattatcataacataattggtaagtgtactattacttcaaagtattgtataacatattctcttacaattttttagtttaaattttgaaaaattttgagtttctataataatattataattaattttgttttataagatactagagtgaaaaatcattttcatcttatcattatattttttat

SEQ ID NO: 238666 - DNA, 579 bp, Cannabis indica
ttaataaataatcaacagttttataaattttatgtttttttgttttttgaattggaaattttattcaattagactaattcggcctctatgatgacaacaacagtagaagggagataagacttcgaaaaacacaatcatcatataacttagaatgtctagccacaaggtgaagaatccaattagcatatcgtttgacaaaaattaaaaaaaaaatattaaaagaagataaaaattatttataatcttcaacgtcaccaccaaaggcggattgcaatactttcatattatagataacttgtactaacaccggacaaatcaggttcttttagtgtcagttataaaataacaccaaaattcaatggtgtcagttttaaatcgaaactaaaagaaaaaacatatatgtgtactttatagtgtctgttgtaaaatgacaccaaaactcaatagtgttggtttagaaccgacacaaaaaatttgaccttttgtcacaaacccaatactaaaagtataagtgtcagtttaaaattgataagaaaagtacagtttgtagtaatggtaatttagtacgattgttatcgc

SEQ ID NO: 238667 - DNA, 960 bp, Cannabis indica
acaattaacaactaaaaatggatggaaatgttaaacggctagccgaacacaagtttaaggagtgttgctaccaaaattttagaattgaggtttagttacaaaaacctgaccacttaaagaaattatacagcaaattactctttaatatatacaattcacgaaggcgtaccaaaaaacactaaatatagtcaagttcttgttagcagagtttatataaataagagtaatttgcggtataaatagttaagtttaactcccagttacaaataaatatctaaatttaatttttagcggtaataatagttaagttatatttttggaactctgtaggtacctaaccgttaaatattaagtcattatccacgtgtcaatttcttattggtatatttaaattaattttttttaaaaaataaaactttaatgacttggaccaatcaagaatggtcacgtgataatttacttaacacttaacagttaagtacctacaaaaatttcagaattatagcttaagtattattacagccaaaaattaaacttaggtataaaaataaagacaaagagagtaagagcgcatcaccacaccaaaccacgtgtcatgccatcataaagggagagtgaatagatcaatacgatccaattaagcttttaaccatagtaaacaactatgtcattcgaataaaataaaaaataaaaaaataaccatgtcatgataaggttgttaaaaattaggtgtaaagcaaaactaccatgaaataacaatattcaattcaacatgagattatgtcctattattaatttattggtgagtaatcttctaagcttgggaatagggagtgaccttgcaaaagtcaaaaagggtcacccaaacccatctctctatccctttgacaaggactatttttagtcttgatacaaaggaaggagggtgaagttttctctttttttcccctatttttgttc

SEQ ID NO: 238668 - DNA, 1503 bp, Cannabis indica
ggcctgcccgatcttttccttgtgcgcctaactccttgttcttgaacctgatcttgagcctgcacctcttcttctctttgtatcccctctcgttgatgaagaagaagctcccgctcccattttaaatggagtgtcaggtccaggggagaatccaggcatttcaggaatcacttgagagaattctccagtgttctcttctgtacgttgaacgtatggtattagagtaaggcttgcctttcttttccttggtggaggacattcatggaccaaattagaaacatcctctaggtcaagaaagagggtaggagtgggctcaaacttatccacttgggccggccccattaactcctcagctagcccaatttcctcagcataaatgggctgaggaaaatgggtaggctcaggatgattatggggctgccaagacttgcaaagttccttatgaggcttatctatcatttgctcataggtgggcccaattctagccataatagttgtaataaccctaccatccgcttgagtaggaataggacgtgaagagtattttcttaaaatttcaactgcctcctctgaacgtatattaccaaactggtatctgctaaggctagaggtgatacagatcttgtcctccttcctctaaatatctctcctgccgtagcctctgtcctagtcattctttttgtcctggatccttctccgttctcctgagtattgtccacaactttcaaattatttccataaacagatcctggagtcttttcttttactctaattactttcttcaatagcttccctctaaaaatagcctcctctgtctgctttggagaaacccccttaacaggtccctttcttttgttttaaccgtttgtacctctccccggagtaccaagaacactagctgccggaattagaattctggtgctttctctgaggatattattgtcgcaagaatttcgcaacaccaattttagatgatattattaatagcagaaagaaatgactatgaagaacaagtgcgagtattcaacctagagtggcgagtgctcaaacttggaatgagaaatgattaatagaaagctggaaaaaacaatgagacaaagaattatagtggttcagtcagatcacggtctgcttagtccaccgtagcaagagtttcgtaggtgccatttcatagtggatcactcctttatatgcaagagtttcgtaggtgccatttcatagtggatcactcctttatatacaaagcaggtgtccgatcagttatacaaggattgcatttattgtcaatctgtttttacacattgaattacaataattaaactaaacaacgttaacattaataaatgaacaacagttcctaagttcatcaacgtatgcgtcttccaaatctgcgagtcgatttgttcacgtcgtgatgttaacttcgcaaaattatttttatgtttaggatgtctgcgtccttagatagtccccttttgtggacatcgcatgacgagctgatag

SEQ ID NO: 238669 - DNA, 950 bp, Cannabis indica
taattgataggatttatgtaggttttactatatatattattaaagtgatctgtgttaatttggatgtgaagaaggtcagaagtcagattgaggagatctagtgtggttgtgtccttgtccccatatagtactcatggaatataaataatgaaaagtataggtggaaattatatataagaataataattaaaatgattacataaggaagaaactagatctagtcattattacataaagaccatatttccacatccaaatgcatcatcaaaaatttatattttctattttaaatcctaaaattttgtactaaattattcatcaactttatatcttttaatattaagcattaatttcaacggaaaacaatgtacaaaatcttggaaagagatgaaagaataagaaaataaaatttatattttctttaagatttctattccttcacgatgtgtgctagttcgataataattagaaaaataatttcctgtttaattaaataaaactaagaagaaattaaaatttaagtataattagaaaaattaaaaaccagttaacatgccttatatgtagagatgaaaatttatttggcgtggatggataattaaggggatccgcctttaatggggcggaaatttcccatcttagtggttaatggggtagtggtgagggataatgttattatgttaatacccgaagcaaaaatagagataatactatccacactatatttgacttcgatatatgttttcatttttattcttaacgtatatataatatatatatcattgataatcaaaattatattaattatcatccataattaattaaaagtatatatcatatgcttaaattatgaagatctaattactaatataaagatattttcttcttgatttttagtttcatctttatttaatttttaatttgttgggagacttgagaggtatgagact

SEQ ID NO: 238670 - DNA, 1199 bp, Cannabis indica
atgccgtttacaaactcaacactttaagtacttatgctactatttattatttttaaattatataaaatttaatatttaattagaacaataataatttaagacggaaaaaaatattaaagactaatggtacattttatcaattatctatttttttattattactaataattataaattaacaatagtgaggagagacagatagtacaatcctcagttcctcacacgtgattcattactactgggtagttgtagatgcattaattcatcttttctattattcaatactgcaagactagatctaaaattctgcaccactgattttgcaattggcattatccttatggaaagggatcttacatatgcctacttttctattttcacaccatatcataattgctgccatcaattacaccatcttcaaccttaattttactttaaatcatctttaccttcaattttttaaccttttatttcactttaaattatcatttcatctccaatcactagctactttcaattttatcaaagatattctttttttattctctttattcatcaatattatgtaataattaatatttaggtatttaagtacatgtttattattaatagatatatttaattaatagtaattaattatcattaatttaaacatacaatataattattgttgttgttgtttttaataaacaaataaatatgtttctagctagtttatatttgtaataatagtaagtgtatgctgtgttatttttttttaattatttttgttgttttttaaggaaattactcatgtattattttttaacgtttttttttttttcttaaatttatcgtttgggttccttcgatagtagttacttcggtgattcttatgtgggttgctccgttagttactatgtggatttctatgtgtacataaaaatacaaaaaagaaaaaaagaactattttaaaatataaaagttaaaaaaaaaaaaaaccccaaaatttttattttattttatctcacatatttacattacatcctatatataaacttacctatatcatctccatattatttaaaaattagggaactaagctgcgctttgcccgatgttgcccgatttttgtaattttatttttaaaatttgattgtttttactaattgtgatataatcaaaaatgtaatattctgatgtgtgttttctaaacaaag

SEQ ID NO: 238671 - DNA, 1628 bp, Cannabis indica
ggaattccagtcaggagaatatcatcaagaccatgacctatcactgtgggaagaacctgtgatttccatggtaggaaattggagcaaatccaatttcacagaaggaggagttgagggagttctaaaagagattccattgttgggtgaccggagctggggtgggagcgggagcagcgaattgttgaacagaggagcgtggtggatttttaaggtgactaggatttatcttcgacgcttgtcaatgacaatttgataccatgaatgagctcgtatatacaaagtgctaccagtaatcaatctatgagagtgaaaaacaaagatttgtaaaagctacaaagtctttgatatgagcctttatttatagggaaaaaacccaaagaagcagtagaaaatatagttgaaaataacagaaaataaagaacaagaaccgttattacaactgaaaactacagctcacaacacatgctaagtaacagaattagttacactatcataacaaaatgaatataattatataactgttatattttaggggaatttctaacaagccgtatattttagaagacaaacttagatagtgtcgaaagttcaagagacaaaaatatcaattactcatatctatatatagtgtgtactatactttgttagacttagatggttcatatttgttttggccagtcggattgtcactaaatcttatcctattatcaaaacttttataggtagtttttcctttccataactttgtttagtggtttaatacttttttgctataatatatgcaaagtatacttattattatcttttctaatatgaacaacaagatattcaaaggtctagagaatcattgcttgaagaattgcaaaaaagcaaagcaaaaattataatttaacctatctctattagtttggactcgtttgtcttaagatatagatcaagtttagaagcttgtcaggatcaatatgaatatcaagtttgatttttcttaaactaatgttgctttataatgaattttcttatttgagaaataatgtaaatagtttttgaattttgatattcgtattctacttttttgttaatttatctataaatttgatttaaaattaaagagaagatatcttgataatttataaggtattaataaaacatttttagtcaattttttttaatgatttcaatttaatttaaaatttaaaaattttaatttcttataattaatgaattttagttattcgggcaaataacataacttgcagtaataaagatataattaagtataactaaatataattaagtatacgcggtatttaatttcaacttagtgtatatatatagggtaagattatggtagtacctagtaaaagttccctaccggtaaaaaattttttttgaccattgattttagatcatgtggttattatgatgtaaggtgtatactcttacgataagactgcttacatacaattaaaatcttatacatattataataatattttttttatagataatattaataattaaaaagatttattaatttttattctgaattattattattttttataaaaatttaaattatttttatatatgtatttatttacaaaaaataattttacttataaattttg

SEQ ID NO: 238672 - DNA, 763 bp, Cannabis indica
ttaaattttttttcttaaatattaaattagaattaataattaagttgattctactctagatacttttaattatttgtttcttatatttaatatatatttaattaaatagaaaatcaaatatttaagttgattttattttagacacttaaatattagttatttttaggatatttaattagataaaatattatatttaagctagaaattttaatttcagaaccacttaaattagaataattttcaaaatatattttatttttctttatcaatcattttcccactaaatttcgaaatgcattgtttaatgcagataattttgaaattctttttgaaaaatagattaaaagttgaaaattaattttagatcaacttaaatcaagtaaatttttcattaatgatttattaaaataaataaactaaaatatattatattttaattagaaaataagtaattagtcaatgaaacatctagatagttattttctgtatacttatggtatttttctagttatatttaattaaataaaaaattaatatttaagttgatattattcaagatacttaaatatttgatatttttcttataagtttaattaaataggaaaattatatttattttggaccaacataaattagattaattttttaggattaattttattttattttatacataaaattcgaaaatgtgtttatttttcaatacattaaatttcaaattttgccttatatatttatagaaaattaaatttaagttgaaaat

SEQ ID NO: 238673 - DNA, 879 bp, Cannabis indica
aggatagaagaagaagaagaaagaagaagaagaaaagaaaaagaaaaagaaaagaaaaagtaaaaagaaaaaaaaaattatttaaaaataaatttttttaatttttaaagaaaagtaattttttattttttatttttaaaatatgaattttttattttaattttaatatttattacgtggactaattaaattgtgccacgtatacactgtatacacgtagacattccaacctgtcacttaaccaaaaaaaaatggatggaaatggctaagtgctaacaaaacttgggtttaggaggttttaccaccaaaattttagaattgagggttagttgtaaaaacctcgccacttaaggaggttataccgcaaattacccttttcataatatatttggactgagaaatgaaaataccttgatccatttgcttaatatgtaactccagaaagaatctaagatcctctactaaactcatttcaaactcacttctcatgagatcaacaaattttataacttccttatcacatgttgaccccaaatataatattttctacataaatttgagcaacaaaaataccaggatgaaaatgtttaatgagcagggtgttatcagtattacctcaggtgaaatcatgtgaaataagaaatgaagtgaatctatcataccatgctctcgaagcttgtttgagtccatatagagccttttaaagtttgtacacaagatctagaaattatggatcaacaaatctttgaggttgtttcacataaacctcctcttgtagaataccgttgagaaaggcactcttgacatccatttggtgtaatctatgttggaattatttaccaggatgttagatttactaacaagtatgttgtttaaaca

SEQ ID NO: 238674 - DNA, 1127 bp, Cannabis indica
ttttccaattgagatcgttgtgtaaatgttatatcgggtattactatttgacactagtgcttagcattttttataggtggcgttttacgattagttagtaatattgcctaaaaattattttcttatgttatatgagactcgatatttaattacaccaataacgatatgacatcaaggaagatattaggtatcaatagtaccttttagtaattctcgttatattattcaagtgagaaacattagaagatggtgttttaacaaatataataggtgttatatcagtacaattttaatttgataaaagtctaactaggatttttgcgtcaaaatttttccttaataatattgatattgttggattcaaaaattttcttctaattttactaatagatgtttgacgtgaatgaaatttcaggaacacagtttgatataggtcaaagtttggttataatttgatacatatcaaagtttggggatacgatttgataaatgtcaaagttcgagagtagtacatggagaatcgtcacgttagtaaaattgaacggaagtcttcaaatcaaaaatcttaataatttggagagaacttttaacagcctaaaaaattttaagggcataatttaacacatgttaaaatttaaggggtaaaattcttaattagcctttaatatatcactatagggtctcgctaattacatataaagttttacttcttgtggtaataatcaatttaggtatttaataataatgtcttctatataaatataaatagtataacaatctaatttggtaacaacataaagaaagagtgaagtttaaaattttactcaaatttagttcaaattaaagttcgccccattattgatcttcttggtggcagtagaactagttcaggttcaaagctctccaagtcgtggagatgacagttattctctccaccattaataaccataaaaacaaatgtatatgttgacagtaaaaactcgttaattatttatagtagacaattaaagcttaaatatgaaatcaagattggagatgaaatcttaagaaacttagagacatgtagagctttaatggtgaaaataagtattctattactttcatatgcttgtagttataatgatttt

SEQ ID NO: 238675 - DNA, 1896 bp, Cannabis indica
cacttgaatgaatgattaagattcaaagcttctgcttgagttgaattcacttggccaagaacatgaactgaaattctagccactaaattaccttgccaatatcttacaacagcccctaatccaagcttaatgttgttgcaatctgttgcagcatccacattcagttttaagaaacctttaggcagtggtgataggttgccacagcactttactctgatttgcatgctcatgtttcattcttcccattgatctaatctaagattccatgtaatcataaatataatataagaactaatccaatccgcaatgtatatctttagtacgtattttcccaaatagagaatcgttcttgcagtaccaaattccccacaacaccaaaaacaaatccaaatcatctaagcacacaaaaaaaattctttaacgtcacaatgattattcttactataaaactatttgaaaagtgagactcttcatatgtatttcgttttagaacaatctaggagagcatgggtcactacagcccctgcaattcacaaggtaaagcaaatagataggaagtggaggatcataacttgccaaccatcgatgaactgatcggattaaccaaccgcttcaatcattatatattgaagagggtcagatgagttatagcgtacttaagctcttagacaatcaaatatgttaacatgagaggggacatatttactaattcatttgccttagcagaattagaagaagcaggaagaagagtttctgttttagctaaattataagttgttttgaccaaaaaaagcagcccgaagaatgtagtccccaaatgagactatcctcttgattcaatcacaatctgaatttgaagaatctgatttacagtttcaaaatcaaaataataattaagctttttcgcatcccaaaagccaagagaactaataaaataatcttattagatgggataaaactgtgagtttggtaagtagataaatctaaaattagagttgagtgtgtaatttagaagaatcacaacatttactcattttttaactaattggaaagggtaaatatcattttggacgttttacaaaagttaccaattgaattctcggtttgttaaatgacaaaatagatcttgtatttttaaattgtacaataaaacctgaattgatttttgtctaaataaacttaataataatctaatatagatgtcaaaatacagagtttaaaatagtatttacccaattgaaaattgatgtacttaaaagtgtcttaaatacactccaattctattagccccatcttcttaaatctttgttcttttttgtaactaaatatttgcaaatactccattcaaaaaaatatatatatttgcagccataacaataaaattcatgtataattaattgttgtattttttttttattaatttttttttttttttttgattgaacacacaatgtggaactttgagagggctgtttctttttgtccaaaggagaaacttcagtggatccatccttgcaatcaatactatcatataaatcaacaagtggaagcaattgcttgtaatctatgtaagaaatgtgttctaaatcatacgaacggatttgtaatctagtaatctatgatttgaatattctggggctttgtcaagaaaaaaaaaatagaaaatatcggtgttagttactatcatatatatgccaccacatacattcctcaaagagctttaaagatcatatcagctgaatatgcgatcacgttctcaaaagtatgtaacaatatacctataacaatttttataattaatataaattaaaagaggggacagcaaataaatcgcttaaaaagtagaatggaattgtccaatggttgaatactgactgctctcaaaattcaccgtcg

SEQ ID NO: 238676 - DNA, 780 bp, Cannabis indica
taaaataatttccaacaaagttcagggtctgtggtctcagtccatgtctgggttcgcagtctaggtctgggttcgcggtccaagtaggggtcaaggtcgaggtcggggtcagggtcgaggtcggggtcagggtcagggtcggggtccgagtccgggtctggggtccggggttcgggtcaagggtctggggtccgggtcctggttaggattggggttagggtctgggttggggttcgagccttggttggggtcgaggttttggttcaggtcgggatctgggtcaaggtccaggtgttaggctattttgagcttaagtttcggatcactttttatagttgtctttcttctttcttattatttttggaatataattacgcttgttttctttgattttagttttcaacacttggaatgtataaattgatcatattttgaaaaacaatgatctataaaatagagaaaattttataagaaaatgaagctgaaacttcaagcctaaattagactatgttcttctcagaatttggaaaaagtcaaaatatagaagttttagatctctttttttatctttttaatgtatcttgatgttacgaaaattatggacaatacgcaagtgcacgtaatcaagtagtaaactcacgcatgtgaggtcaaaccacagggaattgaactgaataccactatattagacttatgattctatttggtagataaataattttgatagattttgaaataaagaaaaaaaacaagaaaattaaagaaagcaataaaggtgtt

SEQ ID NO: 238677 - DNA, 1193 bp, Cannabis indica
atttatgtgtgtggtgtgaaatgtatgtgatgaccattgcttatctttcggcgtaatttagaatggtattatcattgttttaaattttacttataaaaaaaattaaatgaccttaaaaatagtcaacataaatttgctagattgatgagataattattaaatttaaataaataatttagagagacacacaaaaattataataattcacttcccatgttgcgacagtaataatgttacgtctactttgagtttttatttttcacgagaattatagaataatgttaagtatttaagctctagtttatagagagatactctgaccttgtaggtagttttcagaatgtgaaaaataagctaagagaactttctttttataagtgaaggaggcccacaaaaataaggaaaaaaaaatacaaattagatgtttttgactgtagatgatgatctaacggtaaaaattagctcttggtggtgatggctattttccagagctcggcaggtctcgctgcgcgtgactagagcttattttcgtaactcttttagagtgaaatttgacggtgatagctttattattacaattgaagtgtgagacatgacttgatagagcattgaattatctttgaaatgcaagttaaattgtgtcaatcaaattaatattgagtgaattataaatgttttactgaatgtagtttaagacccagtacccatgttgacatccaacgcccaagttgacatatggcgttaacctggacgctgggtaagtccaaaaatgtccaatggatgtactttaagatgcctaagtgatattttgataccatttagtctgtttctgagttctgcaaagctagttaccagttcttagagatgttgttgtgtttgtggaaatgagagactcgaaactcttcatttttgagtgagtttccgatgttggaaatgagaaatgtgaagttgtgaatttaacttctctgacttcatggatcttagttattgtgaaaaactagacggacgatcaaaaataaaatcaaaatcaaataagtagaacccagtgcactaggccatttgtcaacctgggcgctaagaacttattctcgagctcctaggatcttgttttaaacttccaaggcttttgaatttaaggacgaggtctcctacctcattattgaccatttggaattcattggtcgaatcagatt

SEQ ID NO: 238678 - DNA, 809 bp, Cannabis indica
gttgtatactaaggtcaaacatatcattatgcaacatcactagaagatatagacaacagctcatgctcctcttcagcaaacgaatagtggaagttctttcggtcactccaactgccactgaaactaagaatttttgcttggcgtgcttacaatgatgcattacctgtggctactacattggttaaaaggaaaatcatcactgacgctacttgctccatctgccatcaagcttgggagtccattggccatgcattattcggttgcaaatatgcaagggcagtttggcgacattcgaaccgtgtactcgactggtgtaacacgtccacaatgcaaaaaggtgattatcttgttcacttgtctacaattttcaaacgatttgaaatggagcaacttttttgcacccttcgatcaatatggtctaaaagaaatcgggtgatacatggacactaagcaaaacctgccaggaatcttgcattttttacatagaactatctgcataattttcgagtagcacaagctaaattcaggcctgatactggtactttagcacagccccacacaaaaacaactccaccagtcccgtgacacctccaacaccaagtaaccttaaactaaacgtggatgctgcaattgattcaacaaaaaaaaaaataacaggaataggagctattatccgtgataatgttggcaatgtgaaagcagccatttcaaaaccaatagttggcaatttcgctgtccaaaaaatggaggccttgacaatgtttcatagcttaaattgagcactttaactcaatttgccaattactcac

SEQ ID NO: 238679 - DNA, 1853 bp, Cannabis indica
cgcattcaatgtcatgttaggccaactatctctatatgatttaaaaatcaattacctcaatttacaacctatgcatgaagtttctaactaggaatggtgtagggcatctgaaaggcaatcaaaaatatgcacatggatgatataacctcactttgataaaggccagaaaggaagaaacaatcagccaaagctcaaggaaaggcaaataaattgccatatagggatctgcccaagggggatgaagacatggatccccgctttagggaaccaagtataaacattgggtctgtagaagaattagaaaaagttaaaattgatcctactatgccgaccaggaagctcaaaattgggaaaggtttgtttctcgaaataaaatccgctttgataaaatttgttaaagcaaaccttaacattttttccttaccgcacgaagacatggtcgggatcgatataaccgtaatttctcatgccctcaacattgatcccaaattcggttattgatatttatgagagaatctctcaactacttgagaaaatatctcaacaactttgaaatatctataactacttttcaaatttaaatatttatctaattaaattaattaacccaaaaagacaaacgaatgttggtgtcttttgtcctatcaacttttatctaaacaaatattgtcttgaaaaattttgtcttaacactttttatcttttccctatttaattaatttaaaaaaaaattatttatttcaaaaataaattactattttgccaattcaaaatagatttttcaaatttaacgtgtattctacaccctttcgtttgaggggagataatacagaataaacaattatgttatttttcagtttgtttcatcctctatttgttttagttagaaagttagttacagaatagttgttgtaacaactctcaatcatgtattaccttctctataaataaaggcttgagctcaaagacgagttaagcttttgcaagtctttgtaactcaattcattttatttagttgtgttcttgatagtcttgtattgataacttctatagtctttaatgagaatcaaggttgtgatccccttagggacccatgggtcaaaccagattgaagtagaatgtccattcccaatttgtttacatagccctgttttaagaaagtctacatctcttgctccaaaggctatctaagtctgttaacacctttccaggcccacttaataagaaaatcattattcaaagtttctaagtgttctaaagctcaatcccccacaagctttcggtttgcaaatagcttgctaaactactgcgtgaatgtctctttgagcttgaatcccccagcagaattctttgaaatagcagtccactttcttagcaaatgtagtaatgatcacatctgaggtagcgacataattggccatgtaaaaacccacgacttgagtaagtcaggctcttccgacattggataacaactttgtcttccaactctgggctcgaatcagttccggtcaactagttatggttgatctttagtcctattgatagatctaaggagcgaaagatccaagtagattgcatctttcttcatacttttcatccaaataatttcagatatagcccttgctttagctgttgacactcccttggagagcaatattgttgttttatggagactgactgcttacccaaaaagattagtagatgcgcccgcaattcttgagcaaacaccaaattagccgatttggactcaaaaagagaggtacataactattgtgcattgcacataattcttcgggtaaataccattttagaccctgtgttttacaaaagttatcaatgggaccctctgtttt

SEQ ID NO: 238680 - DNA, 1227 bp, Cannabis indica
atcgacttcttgagtttgtaaacgatgtgttcttcggcaaacttctcaaaacctacaggttgagtcatgtacacatcatcagataggtcacgattcaagaaggcagtccttacatccatttgtttgagttttagaacaaaataggcaattatagccataataatttgcaacgaatctttggtggaaacgggaaaaaaagtttctttgaaataaatgccctctctatgactatagcctttagccaaaagtcgagccttgtacctctctacttacccgtttgagtcacgtttgatcttatacacccattttcacccgatgggtctacaacctttgggtagttcaaccaactcccaaacttcattttgtgacatagaactcaattcttctttcattgcatccacccacaatgcagatttaggactactcactgcttcttggtaattgcggtagctcaaaatcatctcccacatcaacctcatgtttctgcatatagacaagatagtcatcactaatagtaggcctacgggctctttgtgatcttctcaccataacctcattgccccccaaatcaagattttcatcttgtactagatcttaaggttcaccatgagcttctactggaacttgttcaatcacaggatcattagtcagattagaagcgaaagcggaaacaacaggtttagggaaatagacacagtcttccatgaatacaatttctcctgacacttgacttgaaccaaattcatctttaaatagacaactcagtctgattccatcaccctaatggtgtgagagggaaaatagaacccagaacatcttgaacaaatagtgtagcctacaaaactcccactgattgtcttcagatccagcttcttagatttagaattataagcccttacctcaactttggatccccaaacgtgaaaatgacgcaaactcagtttcttgcttgaccacagcttgtatggcgtctttgggactgacttgctaggcacatatcaagaagtgtgcgattccttctttcagcaattccattctgctggaatgtacctggcattgtatatcttgcatcaatgccacattcctgcaagtatctggcaaacggcccagggttccttccagtttcatcataacgcccataatactctccacctctatcagaattgacagctttaatcttctttcccatttggagctcaacatttgtcttgaaaatcttaaaggcat

SEQ ID NO: 238681 - DNA, 2071 bp, Cannabis indica
ttttttttttcccaaattatttaaattcaaaaattcgtaaaacacaatttgatactaaatttaaactaaaaataatcgtcatgttaaacatcctttaataattagacaaaaatatttaaatctaatatttaatattttaagagaatttttaatgatttaaaattaaaaagaaaaaaaatcataatcaaccttatttaattaattagacaacagcaaacaaaaatcataatattaatttaattatacaaattattacatacaaaacataaattaatactttatttacaaaaagctgttaattatatttttcctaagttatggtagattaactatctcaaatattctcacattaccatccaattccgaagtcagcacgtttagactgtgacgggtcaccgtctcaccaactctctccccgttaagaaatcatttttttaaccaatacaccggtcaatttgattcgtccacgtggcggataattacaggccaactatagttggcgcggtaggtgagtgacagtacttgagtcttttgcgcattttctcttatcgattctctttattttatttatttatttatttattttaaattttggcttcttaaacaacttctttgcatttgcaccaacttggaccagagcttctccagattcatttttctctctttcggagcgctggtctttctctctctctctctgctaacgtacgcctccatctttgtatttttcaggtaacttccacggttgatcatattaacatacgcctctccttaacaattataattacgtattatttttaaaaacgacaacgaattgctggcctttatttatgtcgttttttttattttgattgtcgtttttggttcagtgaaggaagaagaagaagaagaagatggaaaagcttgtgatcgaggttaaggaatcgacgatggtgaagccggcgacggagacacctcagaggattctatggaactcgaatttggacttggtgattccgagtattcatacgcctagcgtttacttttatagacctaccggcgccgccaatttctttgacgccggtgttatgaaacaagccctaagtaaggcgctcgttcctttttatcccatggctggtcgattgcgccgagacgatgatggtcgtatcgagattgattgtaatgccgaaggtgttctcttcgttgaggcggagtcaaacctcgtcatcgatgattttggcgattttgctccgacgcctgagctccggagactcattcctcctgttgattactccggtggcattgcttcgtatgcactcttggtgttacaggtatgcatgttttgcttatttatttaatttgactttttctagaaagaaaaaaaaataattattgaaattattgtggattaggttaattcatgaaatcattgaaaacaaaatctatgaatttaaaaactagaaatttattgggaagtaattatcaatatagcgtattatgatgattgattgtatttgaagatactatatagttttgctctgttctttaagaaaggcattttgaaaaaagtactcttacaaatttctaccaacttttttaatatgaaaagtcatttactaatgaaattaatttgagttaatttattactgtaatgattaactatttatttcgttgggtcctcttgaaaaatatatacctgttagattttttcatgccctgtgtgtggaccactctttattggcttatatttatagtttataggccaatttgaatgctattcttatctgaatgaattccatgttagattttgaggattgtaaaattgtattatttgcaggttacatactttagatgtgggggtgtatcacttggtgttggtatgcaacaccatgctgcagatggtttttcaggtctccattttgtgaatacttggtctgatatggctcgtggtcttgaccttacaattccaccctttatagataggacactacttcgtgctcgtgacccacctaaagctacatttgatcacattgagtacaaacccccaccagccatgaaaaccaccaccaccacaaactctcctcgatccacaccc

SEQ ID NO: 238682 - DNA, 1425 bp, Cannabis indica
tatataatatatataattaatgtgcaattaatatatgatcgaagaatttttttttttttttttactttaagagaattatatatacgcactttcaattttaacagtatatatttctaatttaaatttaattattaataaatatatatttttaaaagtagtctacaatacatcttctccagcaaatatatggaagatatataccaactcattgaaaaaatcaagctatatattaatttctttatatatatatatataaaagaataaattctagttattttactaataaatttaaaaggattattaaaagttaaaatgcaaaatataaatcaatatgaacacatcaaatttgtaagtttatcaatcttagaaacacattctaggccgctagtgtttgagttcttcgaactagggtaaacaacattcaataagaatcgggtaatttgcggccagactccttgaattttgaactttggcacgatttaacttctatactgaaaaaattatggctaaactccctaatttcaacaatcgttttggtcagcacttttttcgttaatttttgattgttaagtgccaaatagacctgacactttatacacaacgtggcaaaattttcttaggccacctaatataaataattaaaaaaataaatttaaatattttaaaaattttaaaaattaaaaaaaaataaaaaaaacacaaaaaaaaattaaataaatacaatactttttcttccttctttctttcttctttcttcttcttctgaaaaaccctaatctctctttttctcactcagctctccctctccacttcgcctcctcctcttaaggtttgccgctctgatgagaacatcagggacgaggctcggtgccatcgccaagtacgtgcccttcaacgctgggttcaactcctctgattcgtactcgttcgaggaaatcatctacaagtgtcgccccggaggcctcctcaatgtccaccacgacatggctacgtgaaccaaccatcccaagcaagcctaatgaccctaacatttttcatttgtttgtctctgtctctctctgtgtatataaatatgtgatttgtgctgatgatggtgagtttgaattttgggattggtggcttcatttttttgggatctgatttattatttttccttgtttcatatgattttttttattgtatattttttttttagatgtatttttatttcattttgtgggatttgaaatttatttagatttttgtttgattttgttgtgttttgatttgagaaaatatttcacagtggtggtggtggtttcggtgggtatgtagatgtgagttttttggtgttcatagattgaagaagaagaagaagatgatgatgatgaagaagaagaagaagaagaagaagaatgaagaaggttattgggtagaagaagaaag

SEQ ID NO: 238683 - DNA, 678 bp, Cannabis indica
taagactaatttaaggtaaagatatttaattttaatttttcggttgtaaatcaatactaaatttaatttttaacggtaataatacttaagttataattttagaactctataagtaactgaatcattaaatgttaagtcattatctacgtgttatttttctcttagtatatttaaactaattttaaaaaaaaaaattaatgacttggattgtcacgtggtaatttacttaacacttaacagctaactacttacaaacaaaagttctagaattatagcttaagtattattaccgctaaaaaattaaacttaaatatttatttgtaactagactcatatttttctagatgacaaatcatttatatcctgatttggagttctccagatccataatggcatctcgccaaggcgaataagcttctctgaaagcattttagatgagcagaaggatgggcttcacacctatttgagtcccatgatatttacatccgagatcgaaccttgctaatttggaaaggcattctcccagaatacgaaggagcaattgagaccctctcgatgagcatctgggatacatccagaaggacattacaagaggcactttgacttaggggtgttcatcaaactgcctgcactgcaccacaccgcaaaaaaaatacggtttgaaattctttgcgatgc

SEQ ID NO: 238684 - DNA, 1253 bp, Cannabis indica
aaaaatcaatctctctgcctgctccgtagccgcgaccatagtcgcaaccatgaaaaaatgtcacgaccatagaaaatggtggtcacgactactgaagcaaatttgacagcttcaccatcttttagtaaaatatgcataactttcacatacgaactccaaatgagttgaatcaagatgcgttggaaagaagaaaaagaaatctaaagcttctatattttgactttttccaaaatctgatcagaagatagtcaaatttaggcttgaagtttcagctttattttcttacaaaattttctctatactatagattgttgttttccgaaattcgatcaattgatatattccaagtgtgaaatctaaaaccaaagaaaacaagcgtaattctatttaaaaaagaataacaaagaaagaaaacaactataaaaagtgacccgaaacgtaggctataaatagcctaacacttaggcatcaaaagatacattctcagtgcgttttcccactcatccagcgtccaggttgacctcacatgtcaacctgggcgctgggcctagaacaaccttcagtagaatggccataaatcactcaatattgatctgattgacgcaattaaacttgtgtttcgaagctatttcatttctattttagttagggttatatgtataataattttaaattatagggaattttgctcaaatatttcaataatttaagagcaaaaaattcaattactaaaagaacattatttagtaactaattacaaaaattaattgataattataattaatttaatataaaataaaaataatcttaattaagatttttaagaaaacaaaatatattaataaataaaataaaatcaggttacatgtgagttattaattatttttatttaatttttaaataaattacaaccattcaataatgatccaatgaattaaaactaatataactatcatggttacatattttatgcgatcattaaaatatttttcatataaatatatatataattattattaaaaacgatctttaaattttttagttactattttttgttaaaagaattatattgtaagcggtggtttagttgagttaatcatttttatttagtaaaaattaataataaatggaaagtaactaaagaaaaggaaattgacccctttttttaatgcattgagtattctactcatagtaacatattcattttaatagttacaagttatactaaggacttttcaattataaataattaa

SEQ ID NO: 238685 - DNA, 796 bp, Cannabis indica
ctgatccatcgaattttttgacatccagtttaatgttactcacgttagatgaacacaataacaaaacaagaatgtagcaaattagatttaggttagagcaatcttgttcatatgttcttgatagaaaagattgctttcttcttcatttttatcttagtttttagtttcttgaccttgtttctaggtttaattgaaactttctagcttgaaccaagctctgtaccactgtaggaattcaattccagaaataaacctacaccaactaacactaaacaagagaaaccaaggtcactaatgaccttttacacacattttttttggatactaaagttcacacctccaaaatgacaccatgtaggtatggtaaaaaaccaaaacctagaaagatcggaacactttcgatcaaccccaaaatgctagcaaccatgctttgtcttcttcctcaagctcgaatctttgggcttcaatctctaacccttgaacctagaaaatccaaacacaaactagagccaaacaatagcaaagatctagatcgatctttgttggttagagataaacaaaaaatacacacaagaacacaaagaaatttgatctcgaagttcaccccaaattagggctatgtctctattaagctcgcctcagatgcttgatcgtacactatcaatcctcaacagtttacaagataatggtggagattccaagatacagtccagcaggtaatcttgatctctttctgtaatacccggaattaagaaaaggattagcaaaaacttaattagataattatgagttaatt

SEQ ID NO: 238686 - DNA, 899 bp, Cannabis indica
cttcaaaaatgtctcacaaaagcatacacattcaacagcaagatagtgatttgcaatacatccttctggtcgtgcataattagatacaaaacctttcaatactttcatgtacctttcaaaatggtacatccatcgaaagtacaccggaccacaaagtctaacttctcgtgctaaatggacaaccaggtgaatcattggatcaaagaaagaaggtggaaaatattcttccaatttgtacagaatttcaacaacttctaattctaattttataatctcctccttatcaacaacacgctgacacaatccataaaaaatcgataaagtcgaagaattgtctctctacaaccatcttccatcaaaccccttatagaaatagccaacaattgttgcataatcacacgaaaatcatgagatttaagtcctattagcttctgttttttaatatctacacagttgctaatcttagaactatatccataaggaaatttcaagtcaaatagcctcttacaaaataaattcttatctaattttgaaagagtgtatgctgcagcaggaagaccagtaatgcccttatcttcataaggatggagatgagacataatgcccatctctgttaaatctaatcttgagttgtagtgattttttgattttcctttacaatccaataatgtgtgaggtatgcttttacaaaaaatttctcaacatgcataacatcaagattatggcgaacaaccaatacttcccaataaaaagctactaccactacttgccctagaaaacaaagaagaggtatttatacagaaagaaggacttacacgatgagggcaaggcaggggcagaggacaccgtacaacggtagtgcttttcctagcaaatgcggaggaaaagtaggaggaaat

SEQ ID NO: 238687 - DNA, 756 bp, Cannabis indica
actgtgttgatttggttacatctagttcttggacatgatcagcaagcatatacaacccttctttacgcattcccttgagcagtaccttctcagtttgtttgtccttaacaaagcaacatattttgtaaaattcaagaaacacatcattatcacgagttaattggaacacactaactatttttgtcattttaggaacatgaagcacagaattcaatctaagaggtattgaattaatagaggataaattgctagatccaatatgagaaattgacaatttcttaccgtttcctactgctacaccttttgatccagtgtaggtgactgtagtgtccaaattttcagtataacaactgatgtagttggtggcaccagtgtccacgaaccagcctgaatcatctccaaagtcaggcaagaacgaagtagcataggcctgtggatcataatcaaattcatgttctgtgacaagagcacgaggagaggggttagatgtgtgagcgggttgactagttgtgcctggtttgggaggagcccaattcttgtcaaacaggtaatggcacacaagggtacgaatggccaaatcgaagacacaattggcactggggcatgttattttgattaactccacgaaagcctccacgattgccaatctcagagccttgtggtggtatgcaagagttggttcttaaaccagagtagtgccacattggcttgtaatttcatgctgagattagtgactgagttgtgatgttctaggcg

SEQ ID NO: 238688 - DNA, 658 bp, Cannabis indica
gagtatgatcaagcttaccacaataataacagaaatcaggcaaacgctcaaacttaaaatcaatccacttaataatctcccttcccagtttaataaacctaacattcaatccacgcctaagaggaagattaacatcaagtaaaactctaatcctaaggtacggcccagtaccctccttaaccgtggattgatccacctcaaccaaatcccctatctcagaggctatgaacttagcaagttccagagacttgcacataaaagggatcccataaacctggacccagaatggaacataatgcaactgctcaggaagaatggggaaggcactgtcaggagcagcaaaaaccgtgacactttgagcaaagtgccatggttgtccctcaaggattctacccttatccccctcacacccaaaagttacaaggaagagactatcagcatgttcagacacaaccacaggaaaccgacactgtgatgaccagatttcagataaggttttcataagagacggacggttaaaatgacgaatagtgtgaagacgaagaagaagactaatggtatgtggagaatccacactacccacctcataagtaaacacagttgactcatcagtatttaaggctaaggaattagacacattagcaaaaaactcatccat

SEQ ID NO: 238689 - DNA, 951 bp, Cannabis indica
acccttgttcctttctgtcgtagagtagttttaagtactgaacctgaatcttcttctcctttgattgtgttcatcacagtcttctacaaaggttcgagtattaaattgaatagtgtgggatgatactcaaaacatattcgaataatttagagaaagagatttactagtgaatttcgaaaatcaaagaaagagaaagaagagacattatattttttatattacttctcttttttttatataggcattctactttttttttttttaggaaagaaagcttatatatagctttattgcggtgagaactcatcaactaacttgttagttagaaaatcaaactccacttcaaactcaaaactaagataaagaaaaaagtgaagtataaattcaagtgtctatctcaaagtagagagaaaatgaaaatttctattactctcaatatggtggttgcaagattaactttccaaccccctctcacatgtgaggaagaagtatttataagctctaatgacttgagatacatggtggtcccaaagggacaaggtgtcacttttaagctggaagtcccaggtgcaagaggtggtcttgcgcctcgtactcttgtctggtgtcacatggtccggagttgcaggggtagtggttgcagcgtacccttggtcaagtcctaaaaccttgtaggtgtggtgcttccactcctcgtgcctcatcgctttcaaaacttgcaagaggtgtggtcatactctcctcgctaaaaccctaaaaccaatctctctctctctcccaatactctttttgtttccctttgcttgtgcaacgccgacgtcagaccaggaaggagcaccatgctccgacctcctctcataaatcaagtggaccacacccaaaaaccccgaacccagcttctcaaaacctagaaccctataaacctcatgtggacgctgggcctgagaatcc

SEQ ID NO: 238690 - DNA, 503 bp, Cannabis indica
ttcctcaagaccctatgactgctaatcccgatatttgtattccagccacgactagaatctccacgaacttgataatgtggccaagcctgccatctcggtaggcatcacaaacctggccaccacaactagatcttgtcctcagtattctaccggggagacgggaccatgaattgttaagccagccatcagcgagcctcatgtagaattgggagaagatcttgagttagccagacttagagaggccatctgccaagttagccaaactgaagaaccacgcattgttggttatgatgtatttgcacaatagagacacaaatttctcagaaggatggatgactaggagtacatctttcgatctcatcaagaagagctagatcgttataatagaaaagcaagtgacctaatatgccagtttaatgaaagaactatcgggagaggtcaggatctcatcatagatcctctccaagagagactagttgatagattgagtagggtctacagac

SEQ ID NO: 238691 - DNA, 1022 bp, Cannabis indica
agaatctttctagcaccttatctagataagttgcttgaaaaatggctaatgttatcctctttctatctttatagattttgatccagagaatatagcttgcttctcccaaatccttcatttagaatttatcggctaaccacttcattacatttgataacatttctacattattctcaataagtagaatatcatcaacataaagaactagaaataccactacattacccttaatgtatttgcatacacaggcttcttcttcatttttttcgaagccatactctttaatagttttattagaggtaatattccatgatctaggggcttgcttcagtccataaatagatttaagaaacttacacaccttttgatcatcccctggtaacacatacccttctagttgttctatatatatggttccatcaatatcgccatttagaaaaacggtcttgacattcatttttcatatctcataatcatatgcggcagttatggaaagaagaatacgaatggatttaagcattgtcataggagagaatgtatcttcatagtcgatatcttctcactgtgtgtagcatttggccacaagcctagcttcaaaggtctctaccttccctttagcattttttttcttcttgaaaatccacttacacccaatgggagtaatatccttaggtagagtttcatatacccggaccttgttagtgcgcatggagtccatctctgaatccatggtattattccatttgtctaaatcagagtcatccattgcttctttgttagtcaatggatcatccttgtctgtattagaaacaagaacatgtgattcgtatttgtagaggacaggctgtctcacaaccctcccactacgacaatgtactgggattttttttcaggaactgtggtaactattttcgatcgttcaactaatggtgctgaaatctcatttctaattttcttgataacgacttcgtggcttgtgacttttcatatagtcatgcttaagagaagagagagagagagag

SEQ ID NO: 238692 - DNA, 978 bp, Cannabis indica
gatagctcatttccttgggttagctgattgtttctagctagacgttcttatggctcgtactgaggttcagtggggatatagacatctatccttttgttcgaatcctgtataatcaaagtatttatcactgattgctgtctagttatctgataggtttgcctaatcaacacggtagccttcctggaacggttgtcaattacctcttgctgggctctcatgatttccatttattgatccatccattcttggaattggcgtctctactattcgaaagcaaaatttacatgctaatagtggtgaagagtgttggtatgctcttgcacctgctctagagcggctcacaaattttgcagtttggtgtcatcaccaattgtcctttgaggatctccaatagacggatttttagtactaggagcagtttgcttagcctaggtattggtggttctagtttcttgcgcacccaaagtgaacccagccagaagggttgtcactccacaaaatcatggacttgatcgagacttatattgcttgaacatttagggagagtatccttgaagatattccagctgcattttctctggtcggtacatgtgagctgactgcaaactagttgcttgtgtcataaatcaccatggacggtacatcatgaatcaaaatgcccgtccaagttatgaaatcctctccacgtgtcacacaaatagatgccacatcactttgtacagaaattgggataacaatagcatttatgagtctaacactccagctactatgttgaatattttgtattgtgaatattaaatttaatgaaattgctatttcatctaaataataataatatttatggccttttatgtaaaacctcagtttggtttgaggtttttaaaacctctaaagggtattaacccttggaggttatagaatggataatttttggaatgcaatggcttagattcgaacagtcgatgaggggtaataaaa

SEQ ID NO: 238693 - DNA, 1804 bp, Cannabis indica
ccgcatcctccaccttgccttccttgacttccccctcctcgtctatcaagacgatcgtgcctaaaggggcattggaggaggacctcccgggggtcaccgactgggtgggagccggaggcagagaagcatcaggattgtaggcctcagcaagagtagccaggagatcttccataggcctgactgctgcaacaaagaaataagctaagtgttaggatattcatgagaaaggcatgcgcccaaacaaaaaaaaaaagcaataaaactagtcctaccctgactctctaattcagccccagcaaagtcttgaatcataatgttggcttcatcatccccgagaaagctgtccaatgggataaatcagctggaagataaatgggctgaatggtccaggggaataggcaccagaggtccagaacccatccgggatcgacctaaaaaatggcctaagtgggaaaaataatactctttggcgtgattcccccacagggtagaaggcattctaaacatatgaaggtgctcatcgaaccctataggtctaaggtgggtatactctcggacgggaggaacataatgtattattaaaggagacttaccagaacctgaagtgctggcgtcgggagcaccagtattggggaccgggaccacaggcttgggcctgggggtcctccgctccggcagagctcccagacaaagggtcctcccggcaggcgcctgggccttgatgtaggccagctcctgttccctcttaaagaggtacttctggtaccggtcctccgccatggcgataatgtcttcctgaaaagccctttcttctaccgaagccctcacgttcgggccgatgaccttggagagattgaagtcatccaccgactggttccccgatattagcttggccttcggacagttctccgtcgtgaccaactccccaacgtcgagggccttcttatcatacgtggagaaggtcttggcccgctggaggaatacttggataggcacgatacgcatgtaaggagagatcctaaaccactccgtgagaagcttcgggcggtccatggcctggaaactggaggagaagaagaagcggtggcggtacttcttcacatgtttttgatggttgaaagggattgggccctcattcaaaggatgggcccggaggccataaaatctgtctttaaatttatcccccttcttggggatagaaacaagctcgtaaaaatataaaatttcagccggactgggcgaaccccaactccgggcggcataaaaaataaacaagcctgaaagcaggcagtaagcttgagggtttagttgatatggcgcgaggtcgacaaaaccgagaaagtttacaaaatagtcttgaagggggggcatagcccggacattaaatgggtctgggtccaagctccgaagcccccatagttgtggttgggtgtctcctcgtcccgaggcagccggtggtaggtcccggagaccgaaggtttgatgcctgccaccaccacaatcttttcaagctagtgagcgcaggtcagtgtggagtggagctcagccgcctcccatccgttggcacgggacttgtaattctcctgggccacaggaccctgcatgacctcctccagggtggccagtcgaacttctccttccttggaagatttagaaccggatgcggaagcagacattttggttctgaaaaaattgagaaaatccagcagttaggccccaaacaaaaccctaatgttcaaaaaagggaatgggggttccctaactgctggaaagaggccccctccggacacttgccaaataagaa

SEQ ID NO: 238694 - DNA, 1555 bp, Cannabis indica
gactatattattatatagtatgcctgtgttgtcttttcaggtgtgttctgacaggttggcgcggtatagtcacaaccgggtatttcgggccgaaccgagttcgggcccgaattccagattggattgatttaattggcattttatttgattagtgataatctgaaattaattggaatttatttatgcatgaaatgacaatattacccttgtgtcatgtttatgttatatttaagccctaggggcattttggtcttttgaccatttgattaattatcaacaaaaggaagttttacaaaatgagaaaaccaattttctggttttatagcacaccaccgacccctccctctctctatttctcatcttttcaaattttcaatccttgagaattttgccatggtttaagcttgggtttgggaagattttggtgcttggctttgaggaaagcttaaggtagctttctatttaatttactttgaattttgctactgaatatatgtgaaaattatgcttttgatattgctaaattgattggttgcatgtatgtggaagattagcttaatcttaaagctttttgtttagttgtgttgataatccttggttattgttttggattaagtttaagagagaattttagggattgtgctggtgcttcttttctgttatgcatctctgaattttattgttgagcttgagcttgtgttttgggtttaaagattcaaggattgagcttgaatttgttgatattttgctcaatgtttggaggttaatttttatattgattaaatctgattttggtgcatgaaatttgtattttaactctctattatgttagttttattatgtgggaaatgattttgagatatatgcatgtttgggttgaatttggggtaagtttggcatattttcgaagctgaaaactgggttttctgggtttttaaacccagtggtcgcgactatcataggtctggtcgcgaccatgataatggcagattaatattatttttgggtttttgttttcgccatgacttttgactcgcgactccgtttgggatgttctttatatcgttagaaagctcgttccgagctctatgtgattatctttaatttgaatgccaattctatattttgtggaaatggatttagggattaaccctatacttgtgtatcccgggattgtgactaggattaccggcacttggtcaggagcactcggggatttggaatctccatatttgcgggacatcaggtaagacagtagctagcatgtagagttatgcgcggtggtgcttatatggaatatgatatatatgagtaactagaaaccgggattagagttattactctaaagtgagcggtttattggcctagagttattaccctagtgaattgttaataagtattgatatgccatgatatatgtatgtatattgagattatgaattgtgcgtttaaggcataaataagctagacttggtaaactaataccttgagcttaattaaatgtggtctagagttattaccctaaatattataaaggtaagaaagcaatgatgta

SEQ ID NO: 238695 - DNA, 1152 bp, Cannabis indica
actccacctgaaactttaggaatccccttcttgaaatggtacgttgatttgcaagatcactccccacaaaacgccctgctttggaagcaatcgtgcgtgtgttaatggcattgaggtagggcgtgggtagacctgatgccattacccaaaaaacagagatccccatattcaaatgataccagtccccatcttcaggccactcccttatgataaggagttttccgttgatggtccatggtctatttcggagaatggccaagcagtcttcagatttgtcaaaaaagataccccacacacctggtttcatagttttgaatttccacttccctttcaatttccatatctgattaagtatctctttcaggcgagatttggatactccatttcctcccagaaaacttactaacactccagtgcggaccacttcagctgtgagctcaaaatccggttctaactcaagggtcatggactccaagaagttgtttcgaaggacttcaatgtcttctgctggtttgtttgcattgatgatattaggagaatccaccccatcctctgtatggacattattaggctcagacatagtaatatcaagcggatgaggtggttgagagttatcagcagccgtcattactttaggggtcccatcattaggtacaatatcctcaatagtgggttcacgtgggggatcattattgttattgacccccgaggttccaccaataacccccataccagacataaggaaaaagcaacaaactttatcaatggaacagtgaatatatgacaaagcaccaacagaacagagcacaaaaatgacttaaaaattagagtggaaaggtaactcaatgaataaaataaggtgcaccagacaagagcagaagactctttcagagataggtaatggggaagcaggaatagtgaacgaagaagtgatttactgaatggacacaaggtcaagttggactcccaacactctcatttgagagaagattttaaggccttcctgaagtaatttttctctttttttttcccttttttttttaaaataaatttcctaaaaaacaattagtcatttttttttctgaacttttaatagtagggtttatgaaaaaaattcttaaaatataacacttacataattatgtttctttg

SEQ ID NO: 238696 - DNA, 1004 bp, Cannabis indica
gaatttatacattaaatataatcatgaataaatcatgttaaccatgcaacataaaataatttctgatctttattaattagtaaatctgattatattgaaattggttttatttagggcacaaaacccaacaataaagatttggatgaatttataaatcaaataaacatatacatgaccacatgaaccaaatgacatactaaataagtaatgaaattaaatctgtttcttatttgataattgaatagaaaagattacattgaaatagagttttatttagggcacaaagtccagtagtaataacaatgcagctcgctaataagagaataaagagggttctcgtggataacgggagttttgtcaatatcctttacaaagaggctttaaagttgatgggcttatgggaagcaagattgaaaccatttatggttaacttatgtgagttcacaggcgacaatgtcataagcttaggcacaattgaacttccactaaccatgtaacaccctaagattaagcaaaatagattagcaaactctaactagtgaaatgtgtattagtatggaattatattattatataatctattatatgtgaattaatttgatatatgacatgttaagaccccgttggtgagccagggacatttttgtaattttgacccgagaagggtaaacctgtggaatttatattatgatgtgcttatggactatattattatatagtatacttatcttgtcctatttcagatattttctgacaaatcggcgcggtatagtcacagttgggaatttcgggcagaactgggttcgaggtcgaaattcatttttggaattttgcattggtattttattgatgtgtgaatattttaaaatttatttgagtgtgatatgtgatggaaatgacttaagtgcccttgaatgcttatatgtgtgttatatggccctagaggcattttagtcatttagcctatatggattatttgtaacaaaatggaattttgagtaaaa

SEQ ID NO: 238697 - DNA, 584 bp, Cannabis indica
ttaataataactaggctgcaatgtaattaaggtgctgtctgtttctggtataagagagacgatttgatcaaaatcaaaatctcatcatactttttctgttttctttttttagaaaaatatatattcgtctatgtttagaagttaaattttaggaagaaacaaaagataagaaaatataaaaaataagaataaaaaaatgtgaagaataaaatatatatcaatttttgaagttaatttaaattgaaatttttttgttaaattgagtgttttttatataatttttttttgaaataagtgggggtgcatcatcaatacacttttattaaggtattgcattgtaaaattttctaatatatttttaatatttaacattaaatggaggttttagggcttatggcaatatttttttttgtcatatatgaaatataattatgaaaaattctacaacattccttaaaagagatgcacgaagtaccctctatcttattttttgatatccgaaagaaatttttaatccgatttttcttcatggtcatgtacgttgtagttattaattgagacatcgtgtaaaatcttgagaaatt

SEQ ID NO: 238698 - DNA, 1515 bp, Cannabis indica
aatgaccccacatgccccccttccctccgcctctgattatatgttctggatttaacaaaaattgtatccattaaaccataaacatgaaactacatataaacataaatgacttctaattttctattgataacaaaacagattatattaaaatgggttttatttagggcataaaatctaacacgaaatcttattgttggtttggtaggtagccttttctctatatgatatttaagggtgtcagatggtacaactcgggtattgatacgtgtcgtcccagggttttttctttttgaattttccttgtgtccctatctgttggatttaccatttatattaaccaggggttaccatctgtaaaaaaaaatagatttaccatttatattttaaaatatttaatatttaaaaataatttaaataattattctcataattattaaataaaaattatattatgacatgtgttaatttagtcaaaattaactttttttaagcagtcaatagaaagtgtattgctacaaattcttaacaggctaattagaatttttttctctcgaattttggcatgtaccaaatcatactccctaaacttttaaggtcgttaaaaatgcctcctgaactattgagattgttagatttaaggacttttgtccgattttagtaaaaaaaaatctaacataagtgaaagttcaagaggcataatttagtacatgtcaaacttcgagtggcatgatttgatagatatcaaagtctggggagtatgatttagtacataaacaatcactgaaatagtaaagttgaatgaaattagacaaaagttcttaaatctaacaatctaaatagtttaaggggaatttttaacggccaaaaaaattcaaaaagcatgatttagtacatgttaaaatttaatggataaaaatcctaattagccttcttaaaataaagagttttactactaaacattttacatataaagttaagtgctacaaaatgagttggaagttttgtcactattattcccatttaagaatgaaaaaactccttttttattttaatttttagaaaatctcttttgtaatattggaaagttcggaaatattagtcattaaaaaaaaagtgtgaagtgcgaacaaactaacacagcgtggcaatctcgagatttggagaaagattgaggtcaaaaagagaagaacctgtcatattctcttcttctcatctcaatctcatctttgttctcttcactttatctttttattttcggacttgtgcactttatttttgttttctttatgtttttcttttaattatttttctctctttctctcactcttattttgaccgttgctttttctcaacggctctctttctctctcttcactctcactgtgatcaagcgctcacactctctcccttccattccattttcttatactcggccgtttttcccggtacgtttcttcctccgttgtcttccgctcaccccattttttttactgcatttcacacataaaaataatc

SEQ ID NO: 238699 - DNA, 1213 bp, Cannabis indica
caagtgatttcttattcgcattatgtgatttcaaatttttatgttactgtctttgttttttctttggataagctctctctatcgctgactcaacctttctattcctcaggacacccatatcagttttcatggtagatagaagcaacggcagattggttaacatagccaagtacggcgaagaatatggtaagaacgaagaaaatcccatcaatgtcctgtttcatggctatggccactatgatatcttggaggctccattgggcaaaagcagtcaaaaacaaagcatggtacaagtttgatatggtttttagaatatactattgcagttttccataataaattaatctcgtaatgagagagtttcaccagtagcaaaagatgtcaagttcaatagcattggcttgttcaaatttttgtaggtttcttgttttttcttcaaagaattcagtatacagtagaaggagatgctttataacttaactgtctaccgtgtttttaactttaattggtcggttcacattatcttcaaacctgagtttttaacttttggggttgcttgaacactcttttagtttttactctcacacacttacctaccatctttttgcgtatttggtagcactgcactatcaattaatcttatggacaatctttaccccataaaataagaatagaagagtgtcaatttacataataatttctaaaataaattctattagtaggtggattatcaaaactgcatatttttgttcattattggctagtcaatattatataatgttgtcgaatctccaaacactttcaaacttggaatactaaccattacagtaagtatcaatctctgtaaagcacttatgaccattactgaaacgtatcaatctcttttgcatttttcatcacaaaaaagggtagaggagtcgacaatcagaccctcaatattaaaaatctgaataataatcgagttaattgtgagttgttgtgactgactgaaatctgttcgagtttgtaaaattattataccaaatttctattattgagattgataacgttacaagtgggacaatgagaaccgcaactcttaaaataaagataaaacagtgtaaaatataaattaaaaaagaggacttaattttcaatggacaaaaagaaaattgaaggctttttgtccttttttggtttttttttttttttttttttttttttttttgtctgg

SEQ ID NO: 238700 - DNA, 1607 bp, Cannabis indica
ctagcaatgttcctaccattagggataatgagcacactgagagtaatgaaatagaacctagaagaagcaagagagctagagtagaaaaaacttttggttcagatttttgtgcttacaccttagaggaggatcctgccaacctccaagaagctttgtcttccatagatgctgacctgtggcaagaggccgttgatgatgaaatggactcacttattaagaataaaacctggcattatacaaacttaccacctgggtgcaaaactataggttgtaagtggattctgaaaaagaaattgaaacctgatggaactgttgacaaatacaaagctcgcttagtagcaaagggttttagacaaagagagaatgtagatttctttgacaccttttcacctgtcactagaataacatccattagagttttaatttctctggctgctatacacaatttagttgtgcaccaaatggatgttagaacagcgttccttaatggtgaattagaagaagaaatttacatggatcaacctgaagggttcgtgatcccaggccaggaacataaggtttgcaagttagataaatctttgtatggtcttaagcaggcacctaagcaatggcatgagaagtttgacaatttagttatctcagatggtttcaaagtgaatgaaagtgacaaatgtatttactataaatctcataatgacatttgcacaattatttgcctatatgtggatgatttgcttatatttggttcaaatatccatgctgttaatgctgtgaaatcattattatgtgctaactttgatatgaaggacctcggagaagctgatgtaatccttggtattaagattactaggtttgaaaagggaatttctttggataaatctcattacattgagaagattctcaagaaatataattactttgactgtaaacctgcttgctcaccatatgatccaagtgtaaagctatttaataatactagtgacggtgtgagacaatctgactatgcgagcatcattagcagtcttcgatatgccactgattgtacgagacccgacattgcctatgtcgtgggattattgtgtaggtttactagtaggcctagtatagagcattggcatgctattgagagggtaatgagataccttaagagaaccatgaaccttggattacaatatcaaaggtttccaactgtccttgaaggatatagtgatgcagactggaacactttgtgatatgactccacagctacaagtggctatatttttagcatagctggtggcgctgtttcttagaagtcaaagaaacagactattttagcatagtccagcatggagtctgaaatgatagcactagcctctgctagtgaagaagtaggttggcttagaagcttgctagctgagatctctttatgggaaaaaccgataccagctgtgttgatccattgcgatagtaccacaactattgcaaaaagttcagaactgttattacaacggtaagaaacgacaaatccatcgtaagcacaacactgttagagagttcctctcaataggagctgttagagtggatcatgtaagcactgatggaaatttagcagatcgtttgatgaa

SEQ ID NO: 238701 - DNA, 972 bp, Cannabis indica
aagagaaaaattaaaaatttgtatcagtttttaataaattttttatagcatataataatataaatatagaaaacagattaccccttcactctactattttttttttaaaaaaaaaaaaaaagtatagccaaattcttagctagttcgccaacttaaaattataacttacaaattttacttggatattaatatgatattcacaatcacacgtaaaatgggattagtcttaagaaaagagtaggaaaattgaattgaattataaaacttgagttgaagtgtattttgatattgatgaacggcctacgtgccgtacggtgccaccccctacaattcaacataaaggagctttattaactaaagaaataatatatgagaaatgctttttattgcatgaaattgatgaagcataatttcgccaacatgtttccgtgcgtaatcaacggaacctgaaaaccataaatcacacactcatttttataaaaatctataactttatttcttcaacaagcaacaccttatatatttcttttcttttattttttgataaaaaaaagcttatttgaatcacgtgatgttgcctatatacttttgtttttgttcttagatttcaatatgatttggccactataaactcaaggttgtccgttccattttgaagcaatatattaaaattatttaatgctgacaacttgtttaaatgacttgaagtttgaccaatcgtatttatattaaggagatactttatataattaattagtaatttttgtattatttattaaattaaagtttaattttggaatccgataataaaatatattaataataatatgttattgtttgtagtgtttgataatttaaggtaatgccatttcttagcatttttcaattataaatacatcgtttacttaggagtgctcaaattagctaatatgatatatctcaagtgttgggattcaaccggccagtcttttt

SEQ ID NO: 238702 - DNA, 741 bp, Cannabis indica
tttatgttataatgtttggttgagtgttgttttattcattcagggaagattaggtggcttgagattcttcttaccacaaccatagatggaaatatctgattatatgatagggatgtgaatttatgacaataactaagtttgggtaacacgtttaataatcaagtcgagtagtactgttcatgtttcactttttgacatgtttaatcgtgttattgtgttgtgttgtataaacctactaaaaatgcaaataatcgtgtggtgttcgtgtttgagatttcaacatgtttagtaattgtatcgtgtttgttgtttagatttcaatatgtggaataattgtgttgataactacaatgataacatgaattgtcagtctttgcaaataagctttgtttaattttcatattctaattgagtttcgggtagttttttctttttaaaactaggatccccgactaaccatacaatattttgggaaccaggaaagttcgagtactcgaacttcagaccttgtgggagaaaaccacgtgcctaaccatttcattttcagctacctctcttgggtagttagtagttctaatgtaaaggcaaaccacatgccttaccatttgagcttccctcttgagtaatcgagttccgggtagttagtagtttgtaatgtaaatttgaaaatcagtttggtaattggtagtatatacaactgctatgtttctcttctttcggtatatgtcaaaatcttatcca

SEQ ID NO: 238703 - DNA, 1136 bp, Cannabis indica
agatttctttagagaatatcttccatcagtaacaaataatacaaaataaatctacagattaaaaaaattaaaaataaaaatgatatacccctcccctaaaacctaaaaaaataaaataaaaataagagtacaagggtttggaaaaacattaacaaagtggtacaagtattttttttcctatctatcaaaagatggtttatttaagggaaatttgcagcaaaagtcatcaaaaagttcagtttgatacagataagtcctcaaactcatgttttttatttgtctgttagtcctaattttaactgagccgttaactctattaaaattgccacgtatcgaaatatcattggtccaaattattattttaattttaacaaataaaaataaataaataaataattttaaaataatttatttttactttttctttttcttttctttttttttttctttttctttttctttcttttcttcttcgtcttcttcttcttctctgcacgaatccatgaagacataacagagaatggtataagtttcaacctcacaaatagcttaaaaaatgaatactggtcttcaatttctccaaaatacaacaaaccaagaagctgagtcaatgcatctctcactgcccatctcattagaatgaacccagatagcctcttaagccctaaccttgacccatcccagattagacacgatccaataatatattttctcgtcaatgtcactcttttcctccttagagtcacttccaggctgaaattaaacacaaaaaaattacattttcaaaagggtttctaagtataatttctttttttctcaatccaacacaaaattaggttttcattcaaaaacaatacctgggtccagaatcgcgatgccatattttcgcaaaagaaaaactattcaaaatcaaagggcaaaaatctgcattcggaaaataagggctccattgtttcaatcaaatatgcctaaacagccacttgcggcggcgattgtgatggcggcggctgagttaggtcggggctaggtggcggcggagactgtgaaacgggtttagcgttgggcggaggtgggactaggtttgagtcctgcggtggaggaggagaagtttgagtttgagtttgaggtggggttgg

SEQ ID NO: 238704 - DNA, 1328 bp, Cannabis indica
aggagcataaaggggtatggccaaaagagcttccacatgttctattgttgtataacacaactccctgatccacgactggtgaaacccccttctcgctctcttatgggtgctaagccatggtaccggtcaaagagatgtattcaaccttagtaaaagtgtattcaaccttagtgaaaatgtagataaacaacttaacttgatctcttagaagaaaaatgcgatcaggcccatctgaagaacgtggcctatcagcagcgaattgctcgctatttcaatttaaaggtcaaagagcgaactctgtgagtaggagatttggttctatgaaaggtcatgccaaacacgaaaaacccagcacatggagtttttggcgacaattgggaaggaccataccttatcgctgagaaaattggccatgcgacctatcggctggtagatttcgatggtactgcaatctgaagggcttggaatggcaaaagtctaaagtattattatcaatattacttggaatgtaattatagttagccaatgtagtttaataaatgtcctaagtataaggggtataacctacctttgtactattgattattataataaagattctcgatttttaaatttcttgtactttaaattttttgcaagtttagcatttgtaattcgttacaccgagttgtaataacaaaaacattgcaaaagataaaagtagttataattatgcgagtaccccagtaacacttaaaaacaaaaggaaaaaaacctcgaaaggatgttgtttgaaagaggaaaaaagctgaaatttgttccaagtacaaaatgcgagtacccatgtactacttaaaagagtttaatagctaaggcaataaaacatagataaattaagcgggtgaagcaattggagcagttggagtagtggagctatccgcgaccttgctggcagctccatcagcgacttctttagtgtccgcagactcttcctccttggggaatgcacccctgggtctgggtaggtgacatagcatgaaaagcctccgccatctcacccgcctctgccctaaggatagagaagtcgaagtctggcaccttggataaagtcatgtatatatagtcagaaacaacttgatcataccatttctttccattttccttctcgaattccaagtcgcgagccaactcttcgaccttcgactgagagagcttggcttgcagttctacctgctctttggacttctaaaggttctcgagatctttgtctttagaatttgcgtcctgctttagcttcttgttgctcttttgaagttgagcaattttctttttcagaagatcaacttctt

SEQ ID NO: 238705 - DNA, 566 bp, Cannabis indica
cagaatctaaataatacttgaatctgaaatatttagactttattatataataatattaataaatgcattaaattatattttatttttttaaaattaaatataaaatttatattattaaaaaacactcattattaatatgttttactttgcatttgcacaattaaattgctcaaattattaatatttgtgctctccaattatgttcatttataatttgtgctctttcatttatctaattgagtccgatttaaatattttatatctaaatatattaatatagtgtaaaaagatatattttttttagcatttttttaattaagtagttaaactaaatataaatattaagaattttcttttattattcgtcataggattaaaatctaataatttaataattttaaaattaatatttataattaaatttatttagtgactatcgattaatatcattaagaagtattctataaatatatatataaaaagttataatgatgttgagtaatttaagagaatgaattatatacctaatgagaattggttatatataacaatataatatatgattt

SEQ ID NO: 238706 - DNA, 703 bp, Cannabis indica
ttacctaattttcttaaggtgatacagtaatgatggagagtacttcataattgactgaatagtcaacatggtatttaaagagaccattaaaattcttggaaaagataaccttattaagcaattatagaaaggcatactcacccaaaatggagaaaatcttatgaattgagatgcaatttaatggacatgtatttgagtgattagtgaatattagatcacaaagcaggttgtttattgaacaaagagctatataattgagtgcaaaataagttttaaagtggttaaccaactatgaagatagtgatgattgcaaggaagcagtggtagcgtatgaactagggagcgaaaccttagtggtaatgatagaaaagaacatgagagtcttagatgttgatgaatcagcgtcatgaacgggagactcactataaattggtatggtagttcgtaccatgggttgtcaataaaataaagaatatacttgaggtatgtatatttctggatgtgtttaaaatttcaggatcacggaatgatctttgatttaatgttattagttgagaattcgagaaatgggtatttccagtttagttgtgggtacctagtatgagcagtgttgcctctcctgcataggtttagttaatttactttataatggtggttaaccgtaaatgattgggaaatttaaaagttgtgtcagttcaagaga

SEQ ID NO: 238707 - DNA, 767 bp, Cannabis indica
atatcagtagaaagaggtacgagctttgtcgaatattcctttgacaacggcattgatgaggggctttgtcgaataggcaggaatcggatcattatttgctagaataagggaaaatgattataaataataaatagcccacgtgcgtgtagactactaattacatcactccctgaggcaagaggcaagtctcaagtctcattttacaaaattgcaaaaataagacttgggaggtaagtgttgtccctcttttggcccaatatacatggcaagtgagtcttaagatcaggaagtacttatgataaatcctaagtaaacttatctttattggatggatgtgtccgagaggccccttcgggcgcttcatctgtattcatatgccaagatattttattcttctccaggagctaggcaatctctagggtcggtcattaggtcccagacatggcttatataggtgcattaaatgcggcatggaagaagcatctgcatatgggtttgaaaagacatgtcagacgcattaaacctatttttcgacaattacactctaattgatgagattagtgatggctacataatgaaatgtcacgtcaatcaaagaaggttaatggtttgtcttacctaacacctagcaaaactctatgttacctactgtgcaaacatacataccctattattcaaacctaagaacttgtgcaagccatggtttaaacttgcaacaatagagaccttttggctctcttcataaagctataaataccccaaccata

SEQ ID NO: 238708 - DNA, 1206 bp, Cannabis indica
ttcttaatggatctttacatggttttttttttgaagcaaagaggggtctaagacaaggagatcctttgtcccctctcttacttgttttgggtatggaatatctttcccgtatcatggttaagattgggaagaagaatgattttcagtttcatgaaggatgcaaggatctcaaattgaatcatttgagattcgcagatgatgtattactcttttgtcatggggacttcaaatccatctatctcttacttcaaggtctcaagttgtttgcgagcacttcgggacttcaaccaagtgattccaaatcaacttttcactttagcggaatggatgattttaaaattcaaaaagtgtaaaatgcttctggttccacaaggagcaagctaccatttagataccttggcattcccattgctaccaggagactttcaagtgctgaaactgaagttttggtagaaaagatgacgaaaagaatcagcatttggagctcaagaaacatctcatttgcatgtagagttaccttgattaattctgtatggatttccattcacacttagtgggcgcaaatcatgattctatctaaaaaactcttgaaaagagtgaatgtcgtgtgtcgggcattcctttggaaaggaaattcagaatatgcaggcccaggttatgtcgcattgggagaaatgtgcaagccaaaaaaagaagggggctcggctttaggaagattataacttggaacacaagtactgctattggaaaatatgtttgggcaatctcatccaaacaagacaacctatgggtgagatggatacatagtgtgttcttaaaatgtagagattgatgggattacaaaatcccaccctcagggagttagtatctgaagtgtattggggctgtcaaagatcatctcaaagacaccaactttcagacacttataacaggcacttacagcattaataaagtttatcaaatgttggttggaaaccaaccaaaggtccattgggtggatgttttttagaatagactcaatgtaccgaagcatagttttatcctatggctttcggtgctaaaccgtctctaaacaaagactagactgaaaaagttcaatgttgtgatggatgcaaaatgtgtagtatgtgggatgtttgaggaatcaactgaacacttattttttgagtgtacttttagcttgaaatgtctaacagaaatcaaaca

SEQ ID NO: 238709 - DNA, 657 bp, Cannabis indica
ctcatggggctatctgatttttactctcaagtcagaggtaatatccttgtcatggaccctttacctgaaattaatagagtttttcatttggtttctcaagaagaaaatcaaaggggtggacaaagtgtgtcctcgaatccaaatggtaatatggcatttgcttttcaaggagaaaagaatgcaggaaaatcagatggttcaaaaaatcaagcaccaaaacgaggcaggcccttttgcacacactgcaatatgcatggtcataccatagaaaaatgctacaaaatacacggctatccgcccggatacaagaaaactgggaagtcgaaagatgctgctgcaaatcaattccacactccgaatgaaaccagtaccagcaacagtgaaaataatgcagtattgccccagttaactccagttcaatatcagcaactgctgagtcttcttgctgcccaaacttgtaatcagcagcccactgatccagggccgtcgacaggtaagtcaggtatagtcttgacaaattattctcattttcctgaatttaattcatggatcgttgattctggtgcgaatagacatatatgtgctgatataaaatcttttcaaagtgttcatgttattaaaccaattaaattggtcttgcctaataatgaacacctg

SEQ ID NO: 238710 - DNA, 984 bp, Cannabis indica
tgttggttaagcaagtttggaggatccaccatcacccaaacttattagctcttaaattcctaaaaggtttttacttcccaaattcgactatcttggaagttggagctccctctaaaatatctttcatttagagaagtttattatggaggaaagtgctagctcttaacagttctcactggtttattggaaatggaaaaaaatttaggatcttcaaagatatatggcttaatccaagccaagcgacaacaacaattttaccaaagaatttgcctttagatgccaatgttagaatgttaaagaatgaggataatagtaggaatatatctcttatcctttctaactttaatgttgaagaagctagaagcatcctcgccattccttgttcgatatttcagctagaagataaaagggtgtggtctcatgatcaatcagggaggtatttagtaaagcgtggctattgggcggaaattagagcttgttcaattggtgaagtgtctacgtcttaaggagattctgaatggtagaaagttttgtggaagcttaatattcctcacaaggtaaaactcttcctttagcaaccttctctagattggatctcaaccaaagtcaacctactaaaagttgaatggatctagatggtttatgtcatgtttgcggtgctcagattgaatcaacgactcatgaattgatccaatgcaaaaagcttagaggtctctttcttttaaggaagtggagctttttacgcatgcactgtgatttgttggagagtttggcttaggagaaacaattgcatacataacatgagtgtacagttttacaaagggcgggacagttggccttctccaaagttttcaagttcaaaagacttctcaagtgtcgaccacttagtccatcctaggcccaagtattgatatctctactttaactaactttaacgttattacagtgaaagtggatgcaactataactactgatttgaaaatt

SEQ ID NO: 238711 - DNA, 641 bp, Cannabis indica
ttaaggagagaataaataaaattttattttaaatatatataataacattataaaaagagtaaagaatattctgttaattaataggatattctggtaaagttaacgtagaaacccaaaaagaatcgttaaactaagaattctgttacatagccatattttatataaatatatacatacatatatatatatatatatatatatattttatgggggctattacaatagggatgaagtattttacttattaataaggatagcaatttataacttttaatttaatctaatggctcaaatttatctttgaaaattacaccataattaataaatatttttaaatttataattaatcttgaatattattaattataggttcaactaacagactccaaacctatttttttttcactttttattttatgtccattaaaaatttagttataattataaatatatatttttttaattttgaatttacatgaaaaaatattttaattaaattaatttttaaaatgataaatacacttataaaaaattataacatactcaatttataataatttaataataattactcttaaaataattaaaatgtcatgagttaaatactttagaagtaatattttttttacttatatttattt

SEQ ID NO: 238712 - DNA, 1145 bp, Cannabis indica
gatcacctatcacccaaacagcgtcatgcttcaaaggtgttaatggcaatccagtaaaaaaagtccattgtaatcgtatcccacttctatactggaataggcaaaggttgaagtaaacttgaaggtctctgatactcgaccttaacttgctgacaaactatacacttaactacaaagctagccacatctctttccatacatttccaccaatattgcctcctcaaatcgtggtacatctttgtacttatagaatgtacaataaactttgacctatgggcctcgatcaaaatggactccctaagatcagggatatttacaacaactagtcttcccttatattataggtacccttttccgttaattgtccacccatctagctgctcaacattatggattcagttcaaaataagtctcagtttttcatcttgccactgacgttgcttaaattattgaagtaagaatggtgtagcaactatattagagatacaagctacctcttccccttcatagtattgcaagttataatcatccattatcattgtccttttccagtcctcagccaaacatgccaaagtaccatgaggctttctacttagtgcatcagctactacattagctttcctagggtggtgttgcaaagtgaaatcatagtcctctgtatacttaacccatcttctttgcctcaagttcgaatccctttgagtaaaaagatacttcaagctcttatgatctgagtataactcaaagtttgtgccatacaaataacatctcaaaaattttaagacaaagattaccgcggcaagttctaggtcatgcatggggtaatttttctcatgtggttttgattttcgagaagcataggcaacaaccctatcattttgcatgagaacacctcctacgtcagtacctgaagcatgagtgaataccacacatggtcttcactattaggaatagtgagaataggcgtcgtagttaatctttcccttaattctctgaaagcttcttcacaactataattccacacaaactttacttccattcttgtcaactttgtcaaaggcatgaaaattcgagagaaattctccacaaagcgatgatagtagcttactaacccaaggaaatttcaaacttcagtaatattcttt

SEQ ID NO: 238713 - DNA, 1238 bp, Cannabis indica
tcagatcttcgtgatactctgctacagaaaggatacaagggttagagatctgtgcggaaggagtcatttaattccgctgcaaccactgtaaggtttctcataccttttatgtgtttactttcatcgttttagaaattcatattaggatgttaaaaacatacttgttagtaattctagatcctagtaaaatatattccaacagattatatgtttaaaagtttaagtcccatgatttgtttatacactggatttagactgacatgataaccagcaataaggtatacttacaccttagataagtgttatgtcctttccaggtcattgacaaagtataccagtatcggatgtatggagtatacatcggattagaccaatattgaacttacataagatatcataaacatactgttatatctttctaagtcaatatcactcgttgatcttaggtctatagatcttaatcttaaaatggttaggttcaatctcagttgtattatttatgttcttagagttattcattcaagctcgtatggttgaacacatacatctggggaacattgtagttcaattgattgggagggctaattatagatatggaatctatagcttctataagtatttaaaagtgaaacgatgatttcctttgagcttggcttcaaagagataaatgattgaggcctcctttcagtaattatattagtttactaaaatattatttatacgtagctaagtgttttcaggataaatacattgaacggtagaataataaatttgttcctattcaatgtagatcatctaagaggatcttttattatttagattataacaatggttaatttcataacgtatctatatcttggtacatatcgagagttctacataattaagagtgcaataacaaatctacaatgacgcaaggacgaattaataagttatggaagttacttcgcaaattctagatctatttattggaagcttcattatataggtccatggtcccgacactagttgagataatactgcttacagactcagttaattggttttaattagtcaattataattctaaaattagactgtgtcttatttatgaattttcactaaccaagggcttaattgtgaagaaaagagattttaaggtttatttgttaattaagagactttgttaagtccaattaataaataatgtaaatggaaattttattaaatagtttcgatatttataggattgaaattag

SEQ ID NO: 238714 - DNA, 605 bp, Cannabis indica
cctactgctctcaatctttcccataagaaaatcttgtcatcctctctttgttctctctgctctaagggtcttgaatctgttactcatgcactagtagagtgttccagagcttcgagagagtggaaagattcaaggtttaaagatttttaccgagttgctaggaattgtgatattagagagtatctgttaagaggttttcatgatttgtctaaagctgatttgaaagttttcattggaattgtttgggaaatttggaatcgtcgaaatataactttgtttaacaagaggagttccttctcttctactgaatttcaggttgaaggaatgcttcaagattatgatgaggcccaaattttcaatagtcaaagctcatttgcagactctcaagaaagttcttgtaacaggttcattccagttcctcctaaggtgggttcttttaagcttcttgttgatgctgccatcagtactcagttgcaaaaagttggaattggggcttcagtttttgataataaaggtgattttgtagccactttgtaaagtcctttttttggaaagttagttgacaaaataatttttccttttatggtaagattcttgtgcattca

SEQ ID NO: 238715 - DNA, 1057 bp, Cannabis indica
taaaatttttttaaacaatttttctcttaattaatatttttgactttgactccaactagaccttagaacttggacggttcctagccctgaccttggacttggccctagcccttgattctagcttcggcctgaactcaatttgaataaattcaagaaaataaaaataaaatttatattatacacttttattttctgtttttaaaattgaataacaaaagtggttataaaacactgttttttaaaatgaaaattttaaaaataaaaattttactttttatttttgtgattaaaaaatttaaaaataaaagtattaccaaatacattctataaaagtcgttgtaattgcattttagttatttatttaaacaatttattaatataacaatataaatttaatcaaacatagtttaaatgtacaaacaaaaaataaatacataaccaacagtctaataaaaaaattataaaagtatgtactgcaattatatttataactcataattacataactaaattattttaaaaaataagcaagatgtaaatggaaagtgatatttgtaactatttggatagttcggggtaaatttttacaacaaaaaaaaaatttaagatgcaaaactttacaaatgtcataattaaggggcaaagatccaatttattcttcaaatgacatacaatttttgtagagtttatttatttcctaggccacatctaaatataataatagtgcgtgtatattaaattttttttttgttctttctctttcttattattttatttaattaaaatataatatttaaatgatatagtgataaaatataaaaaaatttaatatttaaaaaaacataaatttaagtgatatatttgaaaagatacaatataaataataattataataaaataataataaacacctaccactttgagacaaagaaaaaagacatggctgtccaattaatgaatattctcaataatgttattattccaaaataagtatttgatatatagtcccgttattgtactttcacagattgtaattcgtgatgtatgacagccgtca

SEQ ID NO: 238716 - DNA, 902 bp, Cannabis indica
gctagggattgatcattgaatttcttgtttgttctgcctccaaattacattattgcttgtatgctaaagtactaatgtaagtttcattactgtaaaaaataaatcgatttttattatatgtttttgtgtagttttgattattctaatgtagttattttatagagaaataaaaagttagacgaaaatatttacggtctgaattttttttgaatattttgggtattttaggttataatttgttaatttgtactatggattgctagtccttgttattagtagctgttattattatcttctcatttctgtgtagtttaaggctttgttggtgagttgcatccagttaagaataatgataatgacaagtatgtggtgtacacacattaacatatgtattcacacctctaataaaagttttcaggatcatatcattactcagttcaagtcacttatgactttagtttgttttgggcatgtagcattaatagttttatttatgttgtgtgatatggcatataaaatgctcataggttccaacacgtttcttggagagtttctaaaagtaacccctataccctattcaaaacaagtattgagatatgaatgtggtttttatgtacattaatgacattgtgaaagcgggaagattcgagatgattctaaagaaaaggtaatttatatattcctttaattatgtaaatatctgtaactaatatactaatttataattaagtaatatataactaatttatattttaattttacagtttggaggaaagtcaaactacgatgaggacacaaatttgctacaattgcaacatcaatggttatcaaaattgaaacttattatgtaattttatttgtaaggataacaaatatactttaattttgttattttataatta

SEQ ID NO: 238717 - DNA, 907 bp, Cannabis indica
agcttgtcctaaggaaggccttggctcatagtggccttgcacgtggactccacgagggagcaaaggttattgagaagcacgctgcacagattgttgtgctagctgaggattgtgatcaaccagactatgttaagttgatcaagggtctatgtgctgaccacaatgtcaagttgatctcagttcctagtgctaaaactctcggtgaatgggttggggtaagcacattttataacatgtaaaaagtcttgactttgttctatatgttttcaaacacatctgctgatattttttctttcgttttgattaatatgttgctacatttcacatccattgtctttctctgaaatttctccaggaactgcctattgtttctggatctttgattgatttcttcagattccaatatgcaaatagatctgctgatctttgattgatttatttttacaatatctgataatattggttgaaaatcttcctcatagtattcgtttactttgttttcacagttatgcaaaattgattcagaagggaaggcaagaaaggtggttggttgttcctgtgtggttgtgaaggtatgaacaaatccgagactgcaatcctcgtctttcttttttgctcaatggaaattagtacttgtttttttaattgctctctactcattgcttgattattttgcaggattttggtgaggagacagagggtcttcatgttgttcaggagtatgtgaagtctcattaaattagtcaaaatttggagagggctttttaccctttaggaagttttgaatatttttgtgttttcattaatgatatgcttggacactgaaagacccatttgttatcgatttcagctgtatcttttagtaaacaatatttaattatttataaatacttgtctgttttttttt

SEQ ID NO: 238718 - DNA, 624 bp, Cannabis indica
gacaaaaatacaacaatcttggaatgttaattttttgaagtaagaaagggtaataaagaaagtctaggcattagatagcccaaactgaaacatcaaatatttggggcttcctatatttagaacacatcgaaaggatattgaattcaactttgtcttgaataatctttcttctacgcttcgaggatggaaacacatgaaaaatcttttcgaagtaggtcgtgccacgcttattatatcagtgggtctgtctctcccaatttattctttgaaaacaacgaaatcaaaggttggcgttcaaaattaatcgcatggcccgaaaattctggtagctagggaagtgagaaagggaaccatggtttatgactcaaagtgtggaataaagtttttctccccaaatctcgaggagggttgggtttctaaaaaactatagagaagaatcgagcatttttctagcgaaattggggtggcaactcatatcaattcttatgttgcaaagtgaactactacaatgtaagcctttagcttcccttttttcaacccaatttataaaaagggaagctaaagggggtgaaaatatctgcattgacatttagagacagttttttggtaaaaaccgtaagtata

SEQ ID NO: 238719 - DNA, 1078 bp, Cannabis indica
aaccatcccttgattctctccaccttcctttcctgaaaatcctccattcgatcgcaccatatcagcaggattaatgtccatatcgccactgttattccggtgccgttctcctccgttagccgctcctccttcctcctcacgactggaccgaagccattgagccccaatgagataatttttcctccttgtggttgctttcatccactctccatagggcttaacattcggatcaaagtgagggtcaaaacgtctgggacaaaaccgatcactatggccaataaatccacagaagaagcaaaaagtagggacatattcatacttgaaattagtccaaatccatgttccatcttgcttgatcaacttcatccgccgcttcaaaggtttattaatgtcgattgtaacccgaacacgaaggtaatcacgccatatgccaataaaattcttagcatcagatttgataaacgtacccacataattccccgcattcttaaccaccaattccgacataaaaccgtacttaagatcatgcaactgaacccacatatctaactcatgcaacgagaccaccctaggatcctctcctcgtttcaaccgatgaaacacaagcggcatgcgattaaacgtccaaggactcccatcgataactgcttggatatcaatttcatggtagaactggaagagatatcggttagtgtccaattcttgatataaactcccttcccaggctgccacagtgaagccaaagtatggcgcatagcatcaaaatcgaatgtccgattggtaaggaatttaccaaccaaacaccaacgatcatcaaaagcttgaacctcttcggattgatcctcagcaatcagaacaccctcttcctcgccttcgatattcaaatgagcatattgatccatccaatcgccaccttggtgactactcgaagccatgatagccaatcccaaaatacagaagcaaaaagacaaagaatactttcaaaacatgtcaaaagacaagacgttagaaaatatagctacaatatattgaaaattccacttttaattctatttctccaatatttcttcaatttaat

SEQ ID NO: 238720 - DNA, 1781 bp, Cannabis indica
caatgttgaccggtcatattaaaggatgaatgaaaagtaataataatagtattgttgggcttggctattgggaatgggtagtgggaattgagttgagtatggcgtgtgcatgttgtttgactacgttccaagcctcaatgacatgagattcttgggtgagagtggctccaacagcgaaacgaagcaaatagataccaccaacaaccgaatgggtcatgtaaatcccacctgacccattaatcgactccatcaatttctggttcacttcattcaccaatcccatctttgtctttgttcttgggctactaatatcattactgttagttatctcacccaataccccattactacttttagtactactactcattactgccgaaggcgttattctgaagcatacgttggcaaaattccttggaaccacaacctcaaatctgttgtcagcttccacaaaaccttggaacaccttggccatcttcacatggcttcgtaggaacccacgtagtttctcgactccatagcttcggagcacaagccacaatttgagagaacggaatcgtctgcttagagcgagttgccagtctttatagtcaaccacttgctttgattcggtggccttgttcttcaaatattcaggatcagtagacaatgattgtgtcaacgctgcggggtctttgacccaaaggcagcaacaatctaaggtggtgaagaaccatttgtgagcgttaaagctaaaggagtcagctccttccactccgtcgatgaagtgtcgaaattctgggcaaatgcaaatgctcccagcataggccgcatccacgtggacccacattccgtaatcctttgccacgtcacatagaggtccgagtgggtcaacagcagttgtggacgttgtcccgacagttgccagtaaaaatatgggaacgagtccagcctcaacatcagcaattatagtgtttcgcaaagctttgggacacatggaaaatgaagacgataaagttgtggggatgactcgaaaattatcggggttaatccccgctatctgggcagctttcttgaaagcgcaatgagtttggtcggaacaataaacgacgagctttccaatattgtcgtttccaatgattctgagagttcgatctcgggcagcaacgagagtacacaagatcgcctcgcatgtggttccttgtaggacaccgcctccgtttccagagaaaagaaatgacttagggagtctgagcatttgaccaagccaatccatgactatgctctccaactcagtagcggctggagaagacatccagttgaatccaacaacattaaagccagtggctagcatttctccaaggaagcctgcaatgcttccgctggaagggaagtatgcaaagtagttgggactctgccagtgagttattcctggaacgatgtggtcctggacatcacctagaatcgtctcaatagattctggattcataggtgctgatgttgggagccgctttttgaggtaacccggttcaacttggctaagaacgggatacttctcgatgtttttgtagtaatcggcgatgaaatcaatcaccatgtggccttggcgccgaaactcctcagggtccaacgggttatcattgcttgcgccaccgccggctacgtttgaaagaatgttattctggggaagatcaaagtcgatgagcctacccatttgaatgaagatataaaaatggaatattaattagttgtatttaggtgtgtgagagagagaaatgaatctttgatttgctagttgtggt

SEQ ID NO: 238721 - DNA, 893 bp, Cannabis indica
tgttaggagagtgtgtctgttatgtttgttagcagagttagttatttctgttatctgcttttccttttcagttgtaactaattctgttagattgcatctaactctcctgtaatctaaggctatataatgcctctaatcattcaataaagattagattgctctttctttcaatctctctctttctctgtctttctcttctctttcctttcttctctcttcgtcctctgttcttgttagttctgttttcttctggttcattcatggcgaagagatttgacatagaaaaataatgaaatttgtatgcaagctattttcttcagtatcctatgctccaatatatgttcagttttcctccgttgttccactgttattttttagttgttttgattctttttatttttgatgccttctcttgcatgttctcttattgtgtctcagctccccacatttgttgtatttgttatgttgtttctttttccagccagctttgagcctcttttttttgtttgtttggtcttcggccagattttaatcattcaaggggaggtaagactattacatctttcacattttgtgctacatcctactcattttagtgtcctattgggtacactgttccttaagttgctagccaatttttcttggtgtagtaatctgaacagagcttgtgtagtaacaggttgcacgtgtgtgttctctctttgaggtctactgtccaagattatttcattttaattaccttaaacaaatattcagtggttggcttaacctgtgtaatttaaaaccaacatttgttaaacatacgagacaaaagtggaataacccaaaaacaacattagaaaatccatgacaacctagtattaatgattttaatcactactacaaaacaagcc

SEQ ID NO: 238722 - DNA, 747 bp, Cannabis indica
tatccaaagaattttggatgcttttcgtttttcaaaacaagaagtaccattcaaatatttggatattcccatttgcccaaaaaagctttcagctaagcagtgtgatcttcttgtggaaaagatggttgcccgaattagaacctggagctctagaaatttatcttttgcagggaggatagtgcttataaattcagtgttaatggcaatccactcatattggagtaaaataatggtcctccctaagaccattataaaggaaatagagtctatctgtagaggttttttgtggaatgggaagcacaaagtgacaggtgtggctgttgttgcttggagtaaggtgtgcaatacaaagtcagcaggtggattggggttgaaatcagtaggggattggaacaatgcagcaatgtttaagtccatatgggcggtagctaaaaaagagaataacctatgggtgaaatgggttcattgtgtgtatattaaaggggcagattggtggcaatatagtgctaacacaaatgatagatggtattggagaaaattagttgcattgaagggtaaggtcatggagctttttgatgaaaatgaaagacaaagctgctgtaatcagtataaagtatcaactggctatacaaagctggttcctgctggtgtgaaaaaacagtggacatctgtggtgtggagccgattgaattgtcctaaacatagttttattttatggctcgctatgctacaaagattgaagacaaa

SEQ ID NO: 238723 - DNA, 824 bp, Cannabis indica
tcggacatgacgtacccatgatttaaagtctttgagaggcgaccgatctctacagcaatctgataatgcaagaaaaaagagtaaggacgggaaattaagtgccataaagtaaagcccaaagaacattaacagagacttacagcggtcatagcagcgttgatatcctgaatctgatagaaggagttcatggaagcgcaggctgcatatcgttcggccaggagttgggtcaggttagagacaaagtggctcgtcaactcggaggcgaagggagcaagggtaggcccgatgcaacgattgaaccagttcgttagggagtccatattcaggtcccaggaattcttaaaggcctcatcacgcagggaattctcttgggcctccagtaagacctttttcaaagcctccacctcgccgttcccctttgtatactcagccatagcataattgtgcttggcgatatgaagttattgtctctcctcatctgcgggaacgggggtaaggacgatgctgggaggcacagtttattcctccgcttcaggtggaaaccccgaatcagagctgacggccaaagtatccactctcttaggctttttggaagactcaacgtccaccattttcccttgcgttttcggtccaagggagccgggatctcaccttcttcctcctcctcctcgacctccctatcttcgtcaatcaagacgatttggcctaaggggacgctagaagaagacctccccggggtcaccgtctagtcaggcaccgggggaagagcggagtcagggctataggtctgggcaagagtcgctaaaagctcctccattggcctg

SEQ ID NO: 238724 - DNA, 1734 bp, Cannabis indica
ttgccaaaactggaggtgttgacaataccttttatgctcttaaaggcctcttcgccttcttctgtccatttgaactttttgttgcctcgcgatacattaaaaaatggtaggcacttatcagttgacttcgaaatgaatctgttaagagctgccattcttcctattaaggcctgaacttccttcagtttagttagtgatggcatatctatcaaagccttgatgttctcgagattttctttaatgcacctcacgttgaatatgaatcccaaaaatttgcctgaggaaactccaaaggaagaattttccgggttaagtttcatattgtacttttttagtgtcccaaagcactccgcaaggtctgttgtgtgatctccactatttatcaattttaccaacatatcatcaacgtagacctccatgtttcttcctatctgttccgcagacatttcattcactagtcgctgatatggtgccccagtatattcttcaaacaaaatgacatgatttataacaataaagccccatgttggttacaaagcttgtatgttcttgatcaaggagatgcatttttatgtagttatatccataatatgcgtccatgaatgacataagctcgtgtccagcagttgcatctactaactggtggatccttggtagtggaaagaaatcctttggacacaccttatttaagtccgagaagtcaatacaagttttccaagttccatttggttttgggacatgaacagggttggatatccacaagggataaaacgcctcgcgtgtaaagtcattagctaacaacttgtccacttcctgtttgagtgccacttatctcttagaatccaagggtcgtctcttttgtctcttggctaggtaacttaggtcgacattgaagtggtggcagataatctttgggtcaatcccaatcatatctgagtggctccaggtgaactgatcttggtttgccctcaaaaaaattattagttgctattttagttttttcatccaagtttttctcaatgaatacacactttgtgggatttgttggatccagaataacttcttctaattccttagttggtttcaatagattccgttcatcttgaatctgaggatcaagatccttatcctgcttctcgccttcttcagtcatgactaccattagctggtgactggcctttctatcttgcagctctatgcagtagcattcgcgagccagcatttggtcacctcgcactactcccacacctgttagtgtttgaaacttaggggataggtgcttaattgaactacttgaccctagtccaatgaatgttggttgacccagcagtaggttttaggcatatggcaggtcgataactaaaaagtcttgcattatagtggtggataaaggtgcttcacccacggttaatgggagctcaattattccttgactaacgacattgtcgcctgtaaatccacatagatttaccatgcaaggttttaactttactttttctagcccccatttttttcagtgtatccgtataaaggatattcactgaacttctgttgtccaccatcacctttcttacccttttgatggctagatggatggtaattactagtgggtcgacgtaaagatacctcacgtgctttgcatcttcctccgtagaactacagccgggggttcctcggtcttagctttcttagaaggtttcaaagcaaaaacaaactgctcattcttaacttcct

SEQ ID NO: 238725 - DNA, 1316 bp, Cannabis indica
gctgaatgctaaatatcagatcttggtcgcgagccacaaagagatctcttaccacatcttcatcccaggcccaagaatccatctgaaatagacaactaacagttttattaacaagggcaggatgccttgtttcaacaaagccattagtgttatgagggagccaagggtcatcaagaattgagacattcaccccattagcaatagttctttgagctcccgagtatatcaggcttttggcttccatgatgcttcgcctaaagcttgggttatctcccaactcagttgagaataaactaccatgtgcatagtactttgccttgtaaatcctactgaccaacgaactgtcacaaccaaaagacgccagaactgcttccttagaaaagctaaattaaagtctctcaaacatctcaaacccaatccccctgcatgcttatgacgacacaacctatcccacctcatccagtttatacccttcccactactagaatccgaatgccaccaaaacttagccataagtctttctaactccttacaagtttccaaaggccaaagaaaaacattcatggcataatttggtaaggcttaagctacaaatttcaacaagacctctttccccgcacgagacaatatacaaccctcccaaccttgaattctcttacgaagcttgtccttaagaaacccaaggatagcattcttgttcctcccaacggaacatggaaggcctagatagtacccattttcatcagcttcatagatttccaacgaagcacaaataacatcccaaagatcacaatttgtattgttgctaaagaacacggaggacttagcaaaattatctttgacccgaagccacttcataagtgtgcaaaagctccttaacattgtgcacttcctcctcagtagctttacaatagatataactatcatccgcaaaaagcatatgagaaatgactggcgcacctcgagcaatcttacaacccgtgagcaaaccactttgctcataacttcgcagcaaactagagaaaccttcagcacataaaacaaagaggtaaggcgataacggatcaccttgacgtaattccctttgagcaacaataggtctcaactccttcccaccatgcaagatagtatacgagaccgaacaaacacattgcataactaagtttatccatcgcccatcaaagcccatcttttccatcatagcacgtagataaccctactcaagtttatcataggctttactaacatcaagtttgagagccatatagccatccccctccctcttcactttctcttcaaatgatgcataatctcat

SEQ ID NO: 238726 - DNA, 997 bp, Cannabis indica
aaacaagtgagaaaagtcacttttggcctaggagtcgccttaggtgacctgtgtcataagagaatggcagtgctctccaaaattggagaccactaccatagtgaagtggcacaggtcggttactacactaggaagaggaattattgaccaaattatattttcaacatccatgtaccaaataaaagtgagagacaccatccatgacttcccacaagccatgggtgacctgtgccattatccgaccccaactagtggcaatggtcaccttttagggttctggatgtcaaaatgaggtttttgggtcccgagacctccaaaatatgcctcaccataaaaaaaacaagttaaagcacacctcgaggggtccgagaacatgcatagccgacctctgcaatttggccatggcagtgctcgcaactggtacaagacaacataaactgccttcagtaaaataggcataactctctcaatttttatccaaatgacctggttcaacttgcgttagaaagatatttttgagaaggatcaaagtgtgcctcacagacatgactcaactctgaggttatcgggtccaaaattagcttacaaggaaaattggtgcattttactctagaattgggaaatgcggctaagcgagggttggtggagcacactgccacagcctatgtagggttgtgcgcaagcatcggcggtccaaaatgcatgtgttcagcactccatcttaaattggtgcatcctcaattaaaaataatcaattgtccaatattggtgggacatttgcctagattcaaggagcttgttattgatatttatttatttgtaatattttattcataaaaaaaagtggtatacacatacatgatttgttaataagatatcctgatgtatgagggataactaacaaaccctctagcttatatatacatcaagtaagaggctgagaaaggggctagaccttcatcttcctttttgaccatttttctctctcttttggatc

SEQ ID NO: 238727 - DNA, 735 bp, Cannabis indica
attgcctttatgttttaaaaaatgtatatttaatttaagtgaaaattaaataaaatatgggatttgataataaaattaccaaaatatgacatttaaaaatttgtcactcttttatgatattttttcacatttatgattttctatggtacttgatatgccatatttttgtaaatctaatatcctgtcaaagggaattaaaattgtattgatattcctctgaaatacaagagtatatagtaccacatatttataataagtggagaccaaagaagggacacatgtcaccatacaataaaagcaagaaaatacaatgaaataacattatggtttaacatatccaaacccatatttcatattttttttttctagcctgattgattttatctttttctttggtttattttgtatttgcattttagagttttttactctatcttttccttctactctaatatttttagtaagttttgtgtttacttgagatattatttgattattagagtgtacaatattaatccaactctatttttatatatcatttctctctctctccttcttttttttttttttgtcattcttttatgatttttattgtatttttgtctgtataattttctttgttttccttttttctctttggttttagtagttttttgattctctttgtttatttttactccatattgtatgcttaaaatcaactctggtttttcagcaagcaaataaaaaattaat

SEQ ID NO: 238728 - DNA, 846 bp, Cannabis indica
tgtaaggatatgccggcatcagtagtgaagaagatccttgctggcgtttggaggaggctgggttattggcgaatgaagaagtgtgacgatggagttcttggattcttttttgaggaagaagaggactaccattttgttatggaaaaaaggccatggattatcaatggtgttcttcttaaccttaaaccttggccgattgaaggagaggtctcagttggagaatttgatgtggcattattctgggtccaattccatggactccctactcgttttattatcaagtgagaatgtcccaatccttgcgaagaaagtgggaaacctggttaagatggaggagaagcgtaaagaggacattgtgagaaggggttatcttagatgttggatagaggtttggatggctcaccccttcccatcagggttctttcttaaagctgatgggaagcctgattcttgggtccaattcaaatatgagaagcttccccatttatgtctttaattgtggcaaattggctcactgggataaagtttgctctgttcagcctactatggtcattcccacggaaggtcctgctgttccaatgtatggaacatggattaaaagcgatacgggacggtcaaattgttttaatatgaggggcaaggggactatcagatcgatggtggtcagggaggaagctcctgaatgggacgttgggaaaccatatcggaggcacacatggaaacgaaaccagagatcggaggaggtcaagaacaccactgctacatcgtcgtcggagggccaggtgctgggaccagtgaccgttactgaaaaggacaatgatgttggacagaaaagaaaattcgtac

SEQ ID NO: 238729 - DNA, 1175 bp, Cannabis indica
agctaaaagagtaatgagaatgcaaacaaagtgacttcaactccaaaacagtcaaatatgttgcgttgactagtcgtataggtaagtaataaaaggtctctattcccaaccaaagatttacttccttaactttcttctcagctgcaaaagctaaccatttatctaggcggtggtccatggttgaatcatagctagtaatcttaatgttaaaactagttacgacagattccctgatataaaacatagctttcttacggtgttccaagaaacagccaataaaattgcacaactttaccttgtccactgaagttttatactcagaaggagtaatggagaaagagaggttggggactaaataccacatgagtttccaacgatttgaaagaaggcttgtggaaacaatatccacagtgggaaggaacgagagtatgtgtagaatgagagcatcaggtagtttagaaattctgtcctcagcagatggtgatgatgatgatgtcattttcagtctcttcttctccgccggaagaagactgttgccattttcagccatgtgagttggaaactgtggattgattgaggactgtaacagtaatgaatacaaaccctaacaatcaattgatttatgtaataataatgaaaattgagtagagaaattaatttatgcttacttgtattgttggttttctttggagagaaacgattatgatgagagattgagaatcagagcagagaagaagaagaagaattcatttcctttagtttctcctcgtaagcaggtgctaggtttttactgtaactctcaggttatttactcgtaagaagatttggggttagtggtgaatggtgatggttgagattttaagttatgggcattaaggtggtgtgggtggttgccgttttgaataaagatcttaactaatgtaaatataacacgttaatagttagttgagttgacacatttggattggtttaacatgtaatatggcactaatttttcacaagtgatattaatgggaatcaatagtaaggtaattattcatttacatttgttacttgcattattaatattaggaaagggagaagttgattaaataagggagaagagaaagggagaacttcccccactaattttgtaaggaatgccattaaggtaatggatttttattatttttatt

SEQ ID NO: 238730 - DNA, 1247 bp, Cannabis indica
tacaatctataaaattttgaaaaattacaatgatttacagtacaaaaagtaaaaattttaaactacatgcatataaaataaaaaatgcacatgtttaacaaactgactaaactttgcttatagagtagtaaagttatttataatttctcaaataattacatgatgtcttagataactatgatctatacattgtcatataataataaaaaaaaaaaaaagattaaaactatctagataccaaaaacacaaaggcattgtctgaacttcaacgctcatcagcaaacaaatatatttagaaaactaaaaattaatatttataaaatatatgcaaaaaataaaaaatgaaagtataacgccctactagctaaggcaaaaaaattaattttttttaattattttgctaacctttgctaatttaagaatttcaatataaaaatatgtttaataaaattttcataataaataaagccttgataaactttgaacttttacaaaatatttataattcgagatatcgaaattctatttattaaacatacctagtatatacaataaacaaaaaaatttcatctaaccacacaaataaaatattgtcaggggtgtcttttcaacccttcaggctagacaacgagatatgtaaatcttcataagcctatcgctcactgttgtttagcttttactttgcatttacctacacataaaaatatatatcagacttataattgagtgccaatatactcaatttccataactcaactacccgctccaatgcgtatgtctaagtcttgaacattcgtaactatagtacaattaaccaaaatacgaaactgcacccagtaatctggttgtactagtgttggtagtagtaatttatacttttcgatattgtgtaacatatatttgtcagtatcctagtagtatcctagtgcaactctatgtacaacataccactatttaagacatgtcaatctaaatggaaaaatataatataggtatatatgttaatcatgtgaatatgtgcctctgaatactagtcttgccttaattttgaaatcaagtgtgtcagtcaagctaagtagaaaaactactcaacgatcagaggccctaagtcacattaatagtaaattgataagtatctcactaaaatactttgtaggacttaaattcataatttgaagttatactattaataaatagggtggcaataccctaaatattaacaaatacaaaaattgaggtatccttag

SEQ ID NO: 238731 - DNA, 1351 bp, Cannabis indica
aaatataaattgaataaacattaaagtattaaacaatattttttaaaaatagaataaaaaacatatactcatatgtaaattctaagtttcaactttaatattcaaataccgtcaaaattattagctataaattctaaatttcaaattaaactctataaaatataaactttaaatgtaaaatagtttaactattaaacgcaatttatatattatattatagataattttagtgaaaaatatgtaaattagttttttcagtttattcaggttatttgggtaggttagaataatgttcaacctgtccaatatattcattgtgcggttggaatttttcgtaaagttattcgagttgtgttttttgtcggtttattcgggttggacaatttgtaaaattttttgaacaacactaatacttacatcttataaatttagtagtgcaattgagtgggagcgttaatcatataaatagaatctatagcttctataactatttagaagtgaaacgatagttttcttagagcttcattaaataacataaatggaagagctcatatttcgataattatattattttatcgaaatatcatttattagtagccaagtattttaaggataaaatatattgaaaggtaataaggtaattttatccctacttgatgtaaaccgtctatagaagatgaatgactgtttagattgaaataatagataatttatagtatatctatatttggtatatagagcgctctatgtaattatgagtgcaattttaaatctatagcggagtcaggaggaattaataagctagaaagtttacttagaaaattttaaatctacttaatgggagcttggttacataagcttataatctccacattgtttgggataatatcatcttatagattcaattaattaatttaataaatcaattagaattcgaaagtagactatgtcttatttgagaatttttaccaatttgggcgattttgagaagagaaataaggggtttatttgttaattaagacactttataagtctaattaatagatatatttaaattatattttatttgatgattatataattaattataattattaaattaaaattagtatttaaataattagatgtgataagaggtaaaaattagaaaagacacattatttcactaagttgaaataaagtgagaaaaatctaactctatggcccattagtggttttcggtcatagcttagattttggcccaattgtcttttgattttaagcccatctcatctaacctaacctcagtgtgaagactataaatagaaagagaggagagctttgtcaatctaatgatttcaaccctagaaaa

SEQ ID NO: 238732 - DNA, 1001 bp, Cannabis indica
tattgttttcaatttctactcaaaatactctctctttcattttttttctctttttattcgtcgctcttttttcctcttcctcacaccaccgtgaccacccacacccaggcatcgagaccaccaccaccgaatctcatttcctctaccaccgaacctcctcatctaccctaaaaacccagacaaaacccagaggcccaagatccatacatccatagcactcaagcattgaaaaaacccaaaggccccaaacctctatctttgtctacgagcgtcgtccatactgaagaggggacctcgtctttgagcccgactagatgctaaccagatttcgccttcatcttcatcttcgtgtttatttattttttttattggatttgtgtttgtttcagtccttagatggttgtggttatggtgttttctaaccaaaacgtgcttatcaatagtttatcgatgatttatgtttgtgtaacagttttgtcaatttgacatatatcgataatttatcgatgagatttatcgataggttatcaatagtatatcgatgacatttattaatgatttctgtctgtgcacaaaaatagtcgtgcatagacaaaaccatcgatagagtatcgataatcacattttggtcggaaaaccataccctttacctccatctaatgtctcaaaaaaatacaagttcaaaagaggaagatatagcgaggaagagtttttggtggtctgtctcgatcttggttcgtggtgtggtggcgccgttcaatgagcttttggttgggggagggttaggtgggcagtgatgaatggcgatggtggttgagaaaagttgaggaggaggaagagagaaagatttgggtaggtgagatttgggggttgttagattgagttttgggtaaatgatgaggttcggtggtggaggagaggaggttcggtggtggtggtggttggtggtcttagtgcccgggtctgggtgtctcggtggtgcgaggaagaggaagaggaag

SEQ ID NO: 238733 - DNA, 1068 bp, Cannabis indica
tgtagagcaactgtatatacacacataaaaaataataagaaaatgtaagattaattggtaaagcaaaaaaaaaagtgtttaatatgtcaataataatagtgtattaggttttagctatggctaatatttttgtgtgttaacatgtattaggtgttcttttcttttagatattaaaacttgggatatttgcggcaaaatttctttaatatttacaattgttacacatatgaccttaaataaaaaaagtagcgacaaaaatattttatcttacgattttattgcagtcgtatccttttttttttgccatgggttagctagaaatatgtggcgatatattattgaaccacgtattaaataagctaaagaaatatatcgccacgtggttctgagctgacacttaacaggcttaataggcatttaacaaccaaaaaatgatacgactacgacaaaatcataagataaatacttttgctgtcattctttttaatttgggtcatgtgtaacaattgcaaatatttagaaactttcgtcgaaaatatccctctaaattttaatggtgcccttttaatctttttaatccaaaaaagtgattatgacaaaaaagaatatcgagatcacacacctgggagataaagtaaatgttggaaacaagtgcagattgaagtataataggcatgttcgaggtgtaaaacaatttgataggatacgagccttgttgtccacgagcattcttcgatctcacgcgaagaagaacacgaaacccttgaaagtagacaacaacgaggaaaatcatgaccgttgagagcaaattcgtgacattaggcaaatttcccctaaaaaaatgcttcatgaagagcgccaactttgtctgtttgggttaatagtttatggaaaagagctataatagcgccttcaaactcaactccgcgaccactattgctaatagtgaccgggctaaacgccttccatattatattctcactgaaaaaatcatatgacattatccaatcattaatcaaaatcaattaataaaaagagtcataaaaggaaaaagactaatacttacca

SEQ ID NO: 238734 - DNA, 1581 bp, Cannabis indica
gtaaattaggctcaaatgatcaacctccctgtatcggtggtcaagacggattgtaaaactttagtggatgagagaataattagcattcattgtatgttgtgtaattaaagaatttatttactcttagcctattaatactagcctatttcgtagaaatggtgatcgatctgaattttcaatcaaagagctcttatgctgcaaaaataattgtgtactcttataagaattattggaaaactcatttgccacagattcaagtgattctaattattcttaaagaaataccaatcaaaagggagtaatttattatcaataattgggaccgaacatttataaatctcttgtataaattattattcatcaaattcatttttattattttatattatagtaaatatattattgtaaaacttgacttcacgtcgtgactaaaaataagtcaatattttagtgctttcattgatagctaaaaatatattctcaaatcattctcctcgatccaagcaatccatattaaaaatggtgtaaacaagaagatcatcatctgccaaaccatgtgatccaatggcagttgatccccatgttcaagtaccattggctagtaacttgaataacccgaatgtgtgcctaccaccatgtaatactacttctgtagagacaagggttggtgatgacccagtctcgacaggagggggacagagaaatactaccattccaattggcgaacttggtcgggtgaccacgactagtgtcactaccgggccgactggaggtagaactgggtggctagccgttaatcaaacacatgttaacctgggaaacaatacagagattgaaaacctctaagatgcgttagggcaaagtccaaagtcacacaaaaaatctccaccacgatcaggaggagactcgtgctgtaatgaatgaggctttttactagcaacatgagagttccaagaatggatggatcataacaaccaaaaaacgagcacctaacataatgaaatcaatcaccgagcgaaggaagttgtcgaactaatcaagtagtttgcccaatagactaggggcaaaagaccaatatccacctcccaagaggaaacaacaactaggggcaagatgtcaatgttcctaaaaattaaccaaattatgttctagtagaatctccaaacaactagaaatggaacggagataatggtcgcctaggacaaagggcccccacaaatcgcaactagcggctacctattgatgaataatttctagctgggcttcaccttaggcataaaaatcaaaataacttttgaccaaggtcgaaaggaagaagagaggcaccacccacccaacttgtcaagggctcgctattagggttttatgcctatataaaacctcatgtttcttatatgtataaacatttatcaataagacaaatagaaatttatttactttattaaatgtattgtttacatgtttatttttatggttattaatttaacatatgttagagtttataccttgaaaaacctgtaaagatatttatgtactccactttggtcgaccagacatggttgtgcaacttcttaacggctt

SEQ ID NO: 238735 - DNA, 625 bp, Cannabis indica
tgctctgtccaatagttaaagaatctaaacggcttaacacctatctccaccataacagccgaagaaatgacaatagcacagtgatctgagacctcttcccaactgaaagaagctgaagagttaggaaacaagtccaaccaatcctcattcttgaaagcatgatctattctcgaatatattctatccttactcccttgattatttgaccatgtgaagaaagatccctgcctcttcaaagtgtccaccatacccaaactaagccaaccattaaaatcttcaatctcagcccttgaaaccggtttaccaccaactctatccccataattaattaaggaattaaagtcacctaaaaggatccaaggcttaaccgggaatctcagagtggctaggcccttccataacaccttccgctcatctaaaccattcatcccatacacaaatgttacacaaaaagcctccgtgtgacttgccaacttcacatagcaatggacaaattggctagtttcttcaataactatcactcttgcaaacgtcttcttccaaattattaacaatcttccctctattgttgggctattatagctctcccaaccacaaaacgtttttgacatcatttcttgcacct

SEQ ID NO: 238736 - DNA, 563 bp, Cannabis indica
aatttgggttaaattcttaagaaaaataaattgaagggttaagtactcaatctcaaagaagaactcttaataaatttattataaaagaaccacatatttctttagaaaatcataatcatgagattgttgatgttgaaattcttgaaaatatggttccaaatgagaatgttccaagactacccagccaaacatagtataaagttacggatctaggtcaattgtcacaataagttgtaaacacccaacctaattacggggtgtttgagaacgatcctacgatctgattgggttcctgagatttctgacacaatcgatcgctaaaataactatagttcgctaaattcggtcaaacatagtatatagttgcatatctaggccgatcatcacaataagttgtaaatcatgcgcacccaaccattacggggtgttttgggaacgatcctacgatccaattatgttattacttttcttgctgagttattatgactcacggatgctttgtggtacaggtaagggcaagagtaagatgtatcagtcgtgagttggggtcttctccagcaagt

SEQ ID NO: 238737 - DNA, 1108 bp, Cannabis indica
agtgataaagtaccttgcccactcatatcaagtcagtactcaatcatagtgtgaaagattgtgaagaattccaacacctgaaggagattcaagttcagatcttgtcattcttatgcgacagaaaggaacaagagttggagatatgaatggaaggagccataatatttcacttccaccaatataaggttttctagaactgtatatgtgtttaattcattagtttaggaaattcatgtttagaatgttaggttatagaatataatcaaacatacatattactaaatctagatcttggtaaaataacttccaacaatcagaggatgtactcctggtcatccatccatctcaaaatttgcgtctctgttgtgcgaacgcattgcaaccaacaacacgtgattctttaatttgaccggcttggcagacaccctttttaaatttggccaattcaaaatcttctcccaaatctacatgaggcttaccaatggctagctcgccaatttttggccctgtttccccaacataataaagaggaccaggttcagttatggtgcccgagggtcgctcaacattggctaaacccttagtatgaggtgccaatggtggattttccctgggtgacagaggttgatcattgggatcagccaggttgttagggttgacctgaccatttgtgttggtcaagtttgttgtgctagccgggttggtagggttggctacatccattggatttgtggagatccagtggtggttggaacacaaacatcaagattagcagtcatggtgtcttaaggaagacctgatgaggcaggagttatagccagatgtctccttgttacagccatggtgatagatcagatcatttgacaatgctctcaatgaaagtaccaaattattgacctttaattttgccaacagatagcaaagtcatatttatgactgatatcaccatgtgtacacaagaagaatgagtaaatacaaagggacacggtattttatagaggttcgccccccttagacggtgagtaatgagctactgccattttgattgtattaatactagagataataccactcacatcacaagcgttgtagattttggagtggctct

SEQ ID NO: 238738 - DNA, 2261 bp, Cannabis indica
caatttttaatcacaactataaatattttgtgattaaatgagatttttagtcaacaactaaaaaaattatttataactaaaacataatatttaagtacaaattatcactaatttagttttagttcaaaataaatgttgttactaaaaatatatttagtcacaagaaattataatttttgtaactaatacatttagctaagaattataatttttaagtctacaatttttttacttttagttataaattttgttgtaactaaaagtaaatatttttataatatcgaatctcatataatttaatataataattttataaaatattattaaccaataataaaatactatttatactacatatttttataagaatgctctaacaagaataagataagcccatgtgatatgtgcacatgttttcatatactaccgccacatctttttaatttcttctcacaagacaagagtacatacatgaacctgcaactacacatctttattattatcaaactattttggttgtatttttaattatttaattttcatatattatatttatttatttatgtaagtatttgcataattcagctcgaaaattttctaatagtacatgtatatttctcttttttataattttggactcttatttcttaaaataatataaaatactctaaatttaattttgaattttttaaatataattaatttgaagataatatttagcatctataaatacaaaaaaatataatcattcttatcgtagcacttctaattcgggttattattaggaatttttacaaaaaatactagattttaagtaaaacttttcaattttattgccacacagtaaaaattacatttatattgttcttttttttttcttttatacggtaaacacaaaaaaaaaggtctccatcttccatacccacagataaaaccatcacaacacactaggacaactggaaaacaactattaaatattccgatgagattgaacaaaaacagtgaaatcgatgtcaaataaataatcatggtaaaacaactttaaaacaacactaaaataaataaaaaataaaagataaaaaaagattaaaaaaaactaacaatcttctacacagtctcaacaccagatgcaataacggctatatttgcaagcccagtcctacaaaattaaaattaaaaaaccactaaaacaaaactaaaataacacaaaaataaatgtagaataatgaagcagatataactacttaaaaaatataaaagaaccacacacctcaaaactcttttgtcagtgagctcaaaactcttttgtcacaatccaatttaatctttaataaaatagattgtcaataacaactttaataaaatagagagtctaaaataatatttatcctaattaaaacatatttaaatctatacacataaatgtaatggagaaataataaagttatacttattaaaaacattattacacatttgtaattggtatagttcctctaaataaaaaagtctcaagtcgagtcttcaagaaagctagtcgtcgtttggaaaggagtttcagaatgctagcttgaccatccgaaagaagtcttgtggagagctggtctggagagttagtcatcctccagaaaggagttccgattgggtaggtgttaggaaaaggttctggatagtctgttccagtaggctttgtgcctatccaggacgtctttccaaattgtgcttcattagtttgggacgtccgtccaagaagtgtgatacttgtccggagagatcttgatgccaagaattgacttggagatctcactataaggagcctgttaagtcagttaagtattaaccgaattaactacctagctgttggaagccaccgcctttgggattcatatcctcaatctataaatatagccatcctcttcatttgacacacggcacaccagaagcatagtatgattgagaggtaaagaaaaaaaagaggattgggttttggattttgtaaagagaaagcttctgtacatgaagaagcttctttgggttttgcaaagtcagttatgctttaatggaaacatgcccgtgaatggcttttcaatcctcttttagtgcccctgtagctgtcactggtggtgtgaactagtttaaactagaagttggttttattaaaattaatgttgacggtgcgttatttgccgctgggggtgcttacggtggtggtgctcttacccgaggtgttaatggccacatcattgaagaatttgtaacgtata

SEQ ID NO: 238739 - DNA, 694 bp, Cannabis indica
attaattaaaagggtttttttttttattttttttattttttttatatatataaaaatgaatcatatattataaaattatataaagcacgtgcatagcacgtgttttctcctctagtatataataaaaaagtgaatatattttagtataaataaatgtattagtcttttaattaaaatatttttaattttaaaattgagttgtacaaatttagcttttaactgtagcttctcaaaaaaaatttcaaccagttaatttttaactatttacaaaatatttttttttttgataaatcaggacattgtattgcacaaaacggtatttacaacctaataacaccccatccggggcctaaacaatcatacacaaacaaatctttctatacaatttcgcaatataaagcattgaactaatctttatctacatcattaatcttttttggcaaaaacattgcaattctcatctttacactcaagttagtgtctttaacaattcggctggaatttgaggaacaatcctaccaaattacagtatttctcagcctccaaattgcagcagcattgaccattttccaaaatttagagagctttgctctacctactcatctcaacaggtggggtaggctgattgttactgcattccaattcagccaagccttgattttcagtagtctgtgaagagcaacattacactcta

SEQ ID NO: 238740 - DNA, 1060 bp, Cannabis indica
ggatttctcagatgtgttatgtgtagaagttgcaacctgctgtttggctgtttcgatggcaatggatttagggtataagtatattattatggagagtgattcgaggctagctatcaatgcgctcaatgggaaggtgtctcattgggctcttgagaactatgtttctttttgtattaaatcttctcctgcttttattagttgtaatttttctcatatcagtaggacttgtagctttgttgcccataatgtggctaagtggattttctcctaccaactgtatggctctattccgatctcctcgctgccaagaaatctattgtgtaacgaccacgcagtctaaatgttttattatttaacgaatattatcacgcttatttttttttttaaaaaaaagaaagtgagtagagatgagatgaaacaatactaattactatgaattcaagagtgggtgatcgatttatagggaagagaaaaagtgtagagttttaggaaatcttctttaattagagtttgatgatcttcttttcagaacagtaaaatccttagtcaactagatgtacgaagtgagatttagacaaatgaaaggttgacacgtcatgatgtcggttgtatccatgcaataccattaaaactgactagttccgactcctcagtcctctcagtatagatgaccacagccctcagtgccagactcatttgcattaactctttcttttttttttatttaacaaatttgcaataactcgttttaaagtttaaacagtaatattccttttactttgtctttctccattctctctctatctctccatttttttttacctttagtttaatctcttgtaattatacctgaataattgcaacaaccataaaatatattaaaattgaaaatgtatatattgatggatgtgttaaatctgtaacatgcctaaacttgataaatttagcaagggaaatttgattttctatacttagaaaatcaaaaaaaattttccctaaactaaaatttaaaatctaaaaaaacttactttttttcaaacccaaaatacccctcacatat

SEQ ID NO: 238741 - DNA, 704 bp, Cannabis indica
tttcactccaatggaggtattgaatccatgttcatcctcaaactccaacaagtctggcagtgtctggtccatattaacttcaagaaggattccaggatagctcaatcgttccctctctctagttatagcatccaccattattggtttccccatttggccaactattttaaacaaggacttttccccctaatacttaatttctaagccctccaactgaatccaaattggaacactatgcacatcttctttgctgaaattagtattaggatcccatggtttcataacaaccggtcttcgattaaagaagataaaacccctattcagcacctgatctctatactccatattgccaaatctgattatgaaaataccataagaaagcatcttaaccttgtctactttatcaccccaaattctcttagcaaacccctcaattatctgcaatggagggtttgaacccaacacatagcagacaattgaaggttgccaaaacaacacctcatcttcaatatcctctattgtaattttcacctttgctttctgttcttcactcttaaaagaactatccagattcttcctcacttaaccaaaacgatgaacagggggaatagaggatttaccttgcttaacgtcactgttacattgctcattcgcccttaagaagtgtgcagagtcactcctaatctcatcttgcctctgaatct

SEQ ID NO: 238742 - DNA, 853 bp, Cannabis indica
cttcaaggctaatgctcgttcttaatctagaaaccttcacttttgttggactggccggaagttaggatcgatattcagaacatgtgaaatgatagaaggatcaattccaaccatatccgcatgtgaccaggcaaaaacgtctaggtttgatctcagaaattttatcaattctggttttacatcgagcaacaaaccctttccgatctttagctttttggtcgggatatctagatcaatctcgatctcttctaactcttccacaggtcaaacattactacttgggtccctaagttgaggatccacatcttcatccccgccttgggaagttccctacttggaaatgttttttcccttgtctgtgctctggcttgaggatacttccttcttagccttggccactgcaaggttgtaacattcccaagcagactacttgtttcctcttagacaccctaccccattctttgttggaaacttcaggcatgagtggaatattgatgtgacaacctttaagtcatacaaggtcagccagcctagcattacgttaaaagatgaaggaacatctaatatcaggaactctaccatgatagtcatgctcctcagagcttttccaacagtgaggggtagacaaatttttcctagaggtgcaactccttgaccggagaaacactagacaagctggagacatggggttagatccttgagttggagtcccatcttttcataatcattttattggctatctggacttccacgaccagcgggtcgttgtgcagacacttaatttttacagcgtcttcatcattgaaagttatggtcggccctcctactcctagaactttgggcttcctttctt

SEQ ID NO: 238743 - DNA, 663 bp, Cannabis indica
taacaaagcagctaggcaaaagaatccgtgctcttctatctccatcacagcatatttcgatctccgcacaggattgtcggaaacacttgctataatctgccgctgacaagtctggcgtgcactgcaccaatccgtacatcatctctgaatccgaactgctcaggttctgtttccacgtggcgaacttcttgctctgctcgcgagaaccagccgcttggattgccaacgtggagatacaggtttccagcaacagtttgaactgatcatcgttactatgatttctcgatctaacatcaaacctgatcggagctaagctcaaaatgtcaaagattggttggtcagagtagcgcaacatgcacttgtcgtaccagattaaggcctccttattggcgggtcacaaacttggtaaacgtgtggaagcactggcgatgcactgctggcataggaggctagccacgtctccacgacagagaaataggctgaacaatacaccgtgtagtccacgccgggaggtggcgtagttgaagccgtttcttcctaaggcagctttggagaagaagaaatttagagtgtgttgattaaaatccacttataaccagtccttttacaacagatatccacatcagtaacatacaaacatatacaagtaaatggactcaatcc

SEQ ID NO: 238744 - DNA, 965 bp, Cannabis indica
aaacgacatatcgagcttgcgctctgtcatttagcacaaaacggtaagctgtgttagaactgagattagatagctccactcatgaatagtagaaggtctttttttttctttcttttaacttggttttaccatagtgaaaaaggtgggatgagaagtgagattactataagcatttcccatttgacagtttgtatgatacttgtttttccctgtgaaaatagatattggactaggcatgtaatgactaatatttctttgtgaagttattttataatttttttttctttgtaaggagaagttaatgaccattttgctctgcagatgacaatactagggagttcatatccagtggaggggtgaaagagttacttcgaatatcaatggagtctagcaaagaagacatcaggaacctagccaagaaaatgttacgaatgaatacagcatttcaagctgagatgcaaacgaaaaagtaatagggtgtacagacatacttacagccttacaagctttctagtcatctgtaataatattagatacaaaacaatatttttgttcaaggtgaatgagtccacctcacctggtgataatttaagctgtaaaatagaaccaaccaacataactaaattaaactcgagttcatccccaaaaagctgtgaaatatttctctattttcttttagtgctcagaagtagctagctgtgatgcacaagatgtttcgcgaaggtgaattatttaatgtataaattgtagaatactagattacaaaaaaggtaaaaccatgataggaattttggtaaagataaaagctttcctgaacgccaaacactcttaagcatttgccttccacaagaaattattctttatgagaattttaataggtacagcattatgtctcttttggtgtgaacatttatgttttcctttggtagagattttgtttgggaaccaattataggttttccaga

SEQ ID NO: 238745 - DNA, 1337 bp, Cannabis indica
aaaagtcagacacagcattacaagagtcaaccccgaccgtattccagtaatgtttaaagaagagcaccgacatcccgtcagggccaggggctttatggtttcccatgccaaaaagagtattcttaatttcttccggggatgggcattttactagttcctctttttcctcctcctgaatccgctcttgaaataggtgagaacagttgagcacttggccattatccgatccattaaatattccggagaaaaagttcataaactcaagcccaattgatgccctgtttgaaatccactccccatcctgattcaaaatgctttcaatggcattcctcctatggcggatggtagcagagagaaaaaagaacttcgagcacttatcaccttccttaatccacgacactcgggccctttgcttccaatacatgtctttcctatggagggcctcattaagagagcgacggagcgagcattcagaattccaatcacgggagcccgcaggtaaactctgtatccagttaagccgtctttcaagatcattaatggttgtgtccagtttaccatattgagatctattccaatgcgaaagagcgaccctagtagcacccacccttttaaaggcacgagcaggggcccaagagtggacgaccgagttccaggcctggtcaaccaccaagcaacttcgctcgtctctcgtccacccctcttcgaacttgaaatctcttttaacccttccttccatcccattagtaagaagacacagcggtcggtggtcagaattacaggtctgcgaagaataaatgacagctttgggaaagagattgagccaggcaccattaacaatacctttatctagagcggatttaacatggttacgaccggctctatgattatcccacgtcatccgatccccctgaatattcaggttaatcagacctcgagagtcgacaaggttggaaatgaacggaatgaattggtccgtcccagaggaaccttgacgttctgagttacttaacacgaaattagtatcccccaggatcagccaaggaccgccaaacctatccccaatcttcatgagatccgtccaaaatcgtttctttgcatggaaatacgggggaccatacacacaagaaagaagccaagggtgggtcgggggatcagagtaaacaattccagaaatgtgattacgggagcaggagagacattcaaagctaaagcctatcttccagagaagtattattcctcccgcaataccaatcggtggcacaaaaatattaaagtaaaaatgcagtgatttaagtgaacgtaccagaggagccgcatcaactttaagctcagtg

SEQ ID NO: 238746 - DNA, 935 bp, Cannabis indica
attggccaggtctgtggcaataacttccttcacctcttttggggcttggtgctgccctagaggttaacggggttaatactctagaattttggaattaggccaaacctaagaagtaactcagttgtgacgaactcctctacttgtaactgatccttagtaaaggctttgtactaggcctccttcttttttatatcagtagttttggcacttcgggatgggacaactggcgaaaagtcaaagtatacaataatgccatctataaataaaccaaggtaaaggagatctgagaaatggaaaaattaaggccgtgcgtcgacaatacctagtaattagaagttcagttggagtgagggcaccctttttactgggaacccaaaataaaagaactaatactctcagaggtcatgggtacagttgttgtggctaatgggataatgagaaccagcatgcttgtccaatttttagaagcccagtttcttcttatttgtcctcattgggttggccttcacgctgtaaaagtaaaagatttcctctggggaaggcacttccagattgttctacttacaaaaaacataccaccttgccaaaagcttgtatgatgaggggatcatctgaaaatgagctatcctaatcttggcaataatgtttacaaaataggacctcaatggaagatgcactctattggaaatattggaccagctctaagcactgaatccatccatggttgtggacacagattctcctgtggcagacatcctatgccacattaaccctaaaacgttgcaaagtccagaaccatttgcatatgccaccaacatttcaaaagaatagaaatatttttccttctgatccatcttctagatgaattcattgaaaatttgggcagcagaggggtcttggtcttcctttccctttagccttcacggagggttcat

SEQ ID NO: 238747 - DNA, 2183 bp, Cannabis indica
gtagcgtgccttagcattagggcgttacactcttcctccaagaagcttgtgtccatgttgggattcgccacccaggctcgggtatacggtacggaggtcgactttgttgcattgttatgtggttttggcttccttccttgcgagttcgccatccttctcagtgagcttctcggcctcctgtttgggatgggtgatttcctgcagggcgtcgtcctgttgcttaatcacaaccccgcattgggctactgatttttggacctcgccctccaggtatctgagctgctccaagattcgttgattggaggtaaaagagaggaaagaagcttggagaattatgagcaaatgaatatgaggaacaaaataataataataacaataatacgacaaccttaccatgagggtatagtccaagttcctcagaaacatctcttctggactcccaagattgattagatcccaatcacggggaaggagagcgttaagtttacgccaccaggcaatcccaaatgcctgggaaaatttagaaccagcctcctctcctgcaactgacaaagtttcaatggcctggctcgaggaggcagaggcatgagccatcttaggaggaggtgctttgatgtttagatcaactagaggaggaatctgtttatgggtctcggtatcagagacctcgaggttaatgggcttgggaaatgtcttctttttatgggcagtggttttcttttgtcctttagagggcaccaccttggcatttgtgggaacccctgggttggttccccttttcttccttttttggtccataatatcttcaaaactcatgtctggaagacaaaatgaagtgttacaattataaaacggtagaagaaaaaaaaaggggaatacaattttccacctaagggatttaccaaaaccactagaaggcgagctatcactagaagagggggtaggaggaccgtaatacccactaaaatccctacagcctattattttgaatatatcaaagggattgatttgttctagatcccagctcgcgtctacatgacttgccttatctgtcatggtgccatattgctcagctataccataatatgactcgtgatagtaaaactggatgtagaatctagggtaccagctgtaaaacctatgagcaactcggtcaacgagaagggaattccaaatataaaaattaaggtgggtgtctcggaaggtgactaatgtgttacgttcagccctaagtactgtgggagactaaccatattgattacctcaggatgctccttcaccggcttcgcgagggacagtgttttaaagattttgtgctcgagccacacgatcctaggccttatcctcctttggaacgggaacctgctgccaagaagaatatttgggaaacttataatcacaagtgtactccttgtcagtaagaaggcccacatctcagattggcctcgttcaagaggaagtcgcatgacctaaggctgtggggaagagtcaacaggcgcttgtgccgactgaccatctcgggagtagggacaggtatttttgagagggctgtaaaaaaaaacaaacaaaacattggttagaaaactaaaaatgaaaagataaggatccgttcaactgagcatgaggaaaacaatcacttatgaattctgcggaaggtggttgtaccgatcagggaaaggccagttgtccacaagaagtcgtctttgaaagatactttgtttggcaggtccacaataattttaggttcgctagagtgatcaccgagataataaaagccccctgcggcattcttccttactggaacaaccttaaccgagtactcaatctctactggcgtagggcactcccacttaaaaattttatacaagaccttcaaactagcgagaattttgtaggagataggagtcagctggaatggggcaaccccaaagtggtttatatggtccccgcactgatgtgtacaaggctccaggcacccatgccagtcaagcaactggtattggtctcaccactagctcctgaagtatcacctaaaaaatgcgcaggggttaacaactaaactcaccctctgacctaactagcatgctcgctcaagttcgattccacaagtcttcaatatatcacctgtgtggcctaagatagatcgcaccttcgattctattaactcaacttcaaaggtgacg

SEQ ID NO: 238748 - DNA, 1370 bp, Cannabis indica
gatgtgatactgccaaatagcacttaagtcagcatacatttaacgatatccaatataatactaaatatactgataccgctattataatataatctaataggcttaactaacatgtacgctaaacatgtaaacacatatgcatatcattatactaatcttaccttgtttccgaatttaggtgtgccagccaacctgagtggaacagctgctcgacgatttacaggcccctaaatcacattatttgtaaaactgaagagtgacacgctaaattacttttcagggacttaaacttgaaactaaatattttgctatcgatggataacatggcaataccttaaatattacaaaaataggaaaaactagagttccctaaaatgccccaatcaattgaccgattccccaaccagaattctaattctgcgggatttcctggggaccaactggaattctggttcctacaggtccctctaaactagaatacggtttagtgtagaaaacacaaaaatccacctacacacttcaattcaaacccaaatttcacataaacttccctaattacatcaaaaagaatagaatccatgcaataacatcaagtaataaactcagaattcaaaaacaccattaaagagcaatgcttgagttcttaaactcaaagcttgctcaaataacaccacaacccacaaacctagctgaaatcaacctaattatccttaatttaacttcaaaatacaattacaaacactacttacagtcacagaaccccaacttaagaaaaacatgcataaactcaactatgaacataagaaaaccaaaggaaatagtgctaagggtttttatttcaattggattcaccaagaactagctaaaatcctccgaatcaagctgatgaaaccctagtttctgctggtttcaagtgaggtcgagagaaagagagagaaggagagagaaagtgttgaatttttcggtatttttttaattttggttgaatgaaaaaatctagtgtatatccaacttaattaattttagaaaatcagattataaaacataagtaaactcactaaaagacaaaacccaaattgccgaaaataccattttgcccttacgtaagctaaaaggaaaccttactacctagaggtaattttgtcatttctaaaatcttgaatattctcgatattctcaacgtttatctaattcgctccgctactaaaaaaatactaaaatgtgattctattggccaaatgtcgcgttccaatattgttgggcacaaaaatacaaaaatgtaaatttttatatatggcataaatggtacatcctgaatttaaataaatctccataaaatcataaatcataattaataatctactttcata

SEQ ID NO: 238749 - DNA, 718 bp, Cannabis indica
agttgtcccattgttaacttttgcaggggtgcgaagagtgaaggtggatgggcggggcagccatttgtcttcgttgatgcgcacttctctacccaattggaccctccatctaactcccctttccactattttccttccccataaaatgcttctccacatgaaggagcaaaatcctccaagtttagcatccatgaaagtagagttggtgaaatagcaagccttaagaacccgagccagcaacgaactaggattattgatgatcttccacccttgcttagctaataaagattgattgaacttctctagatctttgaaccccattccacctttatcctttggcttgcaaagcttttcccatcttccccaatgaattttgttttttgactccgaggatccccaccaaaatctagccatcatcgcatgtatgtccttgattagttcttttggaagacggaagcaactcatgacataagttggaattgcttgaattactgctttgagaagaacttcccttcccgcttgggaaaataagctacctttccaaccttggagttgatcccgaatcttggaccgaatggaatcaaacacttcttttttccttcttcctacagttgctggaaagccgaggtatttggtgtggcattccaccaaattaaccccaagagcagccgcgagcatagttccatcggtttgagtgatctttcttccaacgcacaat

SEQ ID NO: 238750 - DNA, 810 bp, Cannabis indica
tcccaaaagtgtggcagtagtcggccaagtggtttccacatcacttagtggcttctttaacttggttttgacatattattggtgaagaaatatttttggcaagaaatctcattccccttcttcatggccgaccactgccactcattgtgccacaaaaatggcaagggtcgactaggcttgttccttggtagaaaattgtttctttcacttattttgaactccttggtgtttagggaagacacttgaaaatttttcccttggtgctttgtaagtggtgaccactgccatctccttgtagcagtgctctcccaaaattagagagcactgccattttcatatgacagtgggcgcataggctttattccatgagatttttatgccattttgactttattcacaaatctaagccattttatgcttaaacgagtcaagtcatttttggtttccttagcgaattgaggtctcttgggtgaaaatactcgcgccgacccttgaactctagtttggacacacttgggtgtgagtcccgacactaaatggttggttaatattcttgagtcctctagaagtgctatggggccctcaagaagaatgtcttaactcatttgaaatttataagtcttggtcaaagtcgcaagatttactttagtatcttcaaggcactcttggcatgtgggttcttgtgtaagggtagccattttattttcttacaaaaattgggtataatgttatctactaaaatttccactattatatgaggtggtaagttctaatactagtaagaatgtaaatttggtaaaataatttatc

SEQ ID NO: 238751 - DNA, 1398 bp, Cannabis indica
acacaagaaaaataaaacacaaaaaataatctaaatctaataaatcatcacaaaaatcattttttttactggaagtttatcccaaaccctcaaaaaaccatttttctctcatgctctctctttatctaaaactagatctgaacccaaactatcgacgatgaatttgacccatcgaagccaacaccgttcagaccttccaccctcttcaagcaacaccaagacccggtgaacgagagacaatcggaatcatgaggatctacaacaacgaacgaggaagatgcgacaccttcagaggagttgcgatttagtcttctcgtttgacaagatctcgtttttgtggtcaccttccacgagaacaactagtaggtcgtcaaggagagagagagagagagcggtttgttagttcgtacaatggtggtgggttgtgagtgcgtggtctgagtattagatgagttcatgggtttgtacggtggtggtcggttatggtggcaattgtaataccctaagattaagaaaaatagattagaaaaccctaactagttaaatgtgtattattatggaattatattactatataatctattatatgtgaattaatttgatatatgatatgttaagactccgttggtgagctagggacattttagtaattttgacccgagaagggtaaaactgtagaaattatattatgatgtgcttatggactatatccttatatagtatacttgtcttgtcttttttaggtgttttctaacaggttggcacggtatagtcacaatcgggtatttcaagtcgaatcgggttcggggccgaaatacactttcagaattttatactggcattttatggataaatgaataacttgaaatttatataagtttatacgtgatgaaaatgactatatttcccttgtatgtgtgcatgtgtgaatatggcccttgggggcatttatgtaattttgcatatttgaactatgtttcaacaaaaggatattcggttgaaaaattagattattttctggttctcactctctatagaacctaccctctctatctctctctatatttctcttcttaaattgttgaatttgtgactcgcttagattcaagcttgttttgtgggaatctttgaagcttgatttcattggaaacttgaggtagctttctgttgtgataaatccaacacgcaagtatacatatcgttttaacaagtaatactcaggtaagtgagatcgttcccacagggactgtagctaagtaccaatcaattaaattcttgtttctatttggtagaatcaataataaggttgaataattaaataactaaaaattgaaaagcaggataataataataaaaagtgtaattaattatggatgaatatttaagaaaaagaatcct

SEQ ID NO: 238752 - DNA, 577 bp, Cannabis indica
gtcagtacgtgtttatagatagtactctacgatttgttagcattattctctaaaaattattttcttaagttatatgagatctgatatttaattatactaatagtgatatgatattgaggaaggtgcaaggtagcaattcccttagtcagtgatggacacacatgtatgaatgtggggctacaaaaatattatcttttaaaaatttaaatgtaattttttttaatttgataattataagttaaaatagtagaaaagcctcacaaaattaaataaatataataaaagtgattatactataggtataaatatttttttcattaataaagaagcccaacaaaataaaaattctgggtccgtcactgctcttagtgatactccctaaaagttattacattaaattatatgaaatctgatacttaattacaccaatagtacctttaaatttttctcttacatatataaagagagagagaaatgagggttctctaccaccactttaagtgttatatctctattgtaggtattgtgtttcatttaatttaatgtattaatttttaagtaatattgttaaccaatc

SEQ ID NO: 238753 - DNA, 872 bp, Cannabis indica
tcctacaatcttgatgtgatcttcagatccttatcagaaacaatggactttgggacaccatggagacgaacaatttctctaacatataacttagcatattgatcaatggagaagttcgtccgaacaggtaagaagtgcgctgactttgtaaacctgtcaactgtgacccacacagagttgtattatctcgtagtcctaggccatccaatcacaaagtccatggcaatgtcctctcatttccattccggaagattcagtgattgcaacaaccctgcatgcctctggtgttcagctttcacttactgacaagttaagcacctcgcaacataatcaacaacatcattcttcatacctgaccacctaaacatggacttgagatcttcgtacatcttcgttagtcctggatgaactgagtaaggagtcgtatgagactcattcaagatctcccttttaatatcatcatccataggcacaaaaatatgattcataaaccgaagaatacttgtgtcatccattgtaaaatcactaggaagtgtagatctccaattcactgggatgaaactagagaaagaaaagatcaaggctagattgcttgcctctccgagtaggcagaagagttatgcaaacccgaagcgtagaaatgtagaatttcaggtaggagatcatgtattcctacgggtatctctgatgaagggatcaaacgtttcaaaaaaaaaggacaagttatgcccttgatttacagggcctttcaagattctcgagaaggttaggctggtagcatatcgtctagccttgactccagtgctttcagcagtccacaacgtgtttcatgtctctatgttacgaaaatacgattctgatcctactcatgt

SEQ ID NO: 238754 - DNA, 986 bp, Cannabis indica
attatattaattattacgaccaaatttttttaatacaatgtatgtccactttatctgccacttttatggactcgatccccacttgagaaacttgcatctttgctgctatacaccagttgagagatttttttaaagcaagtacttcagctatacttgatgaataatttccaggaaagctattggcataccttccaataacctcaccttgagagcctctaaccactgtaccaacaaccacctgttgctgccgcattcacattaagttttagcttccttgtgaaagaggagcccatttgtaagtaatgtcaacttcttgtagtttaccttctttcagtgaggtagtcatttatactttcttatactcttggaaataccctgcaatccagttattaatctcttgtattggaaaagtatatctttattttttttttccaaaaacagcattgtttctatggttccagatcatccaaagaaatctcaataatattttacaatcagctctatataatttataaaaagtatttagtaaaagtcttttatatgaatgtgtctatgtgcattatagatatttttgaatggtgaatgatttcatgttttttattttgctctggaacaattcattagtcagtgagtcacagtctcattgctatgaccacaaaaagagcacataattctatctatatttcgagcattaaatatgaacataacatgtgaatataagtctcgaaaattgagagaaactatacatgagaaacgagataggttcctcaccaaagaatatgctacaattaatgatgtgtcgcgctatattataatatagctgtcaaataaaagagataaaattataaatacaataattagcaagatgacaacatcataggttcatcttggacttgaccaagataaaaaaagacatatatagaatacgaagggatgagctactagaaagagtagataatgagatttttaagagcttgcagctcatt

SEQ ID NO: 238755 - DNA, 877 bp, Cannabis indica
cagcctaggtttttatcggagcttgctaaataggcagccagttttataggagcttgctaataggcagcctggttttataggagcttgctaaataggcagcatggttaatggtagaggtgtgattaattagagagagttattaagaatgagatggatgtgtatgaaagagtttttatgagatgggatggttgtgtgtaggaagagaattgatgagacgggatggttgtgtaagggaagagaatagggagcaatgatgaaaactgagatttttagagagaaactcttcttttcttttgatgtctgttatgtgtcctctcaacctttcttttataggagctgagtacataacctaccctgtatacaacctacactacatacagcctccttgcactaaccttatcttttaatcagcttgttgatcgataaggttgaatcttattcgtaattaactgcttcacccaagggttcttattaaagataataacccttcctattatactcttttatttgtcaacatttagaccccatattgtatagagaagattgtattttctttatgtagacaatatactaaaactttatgtagttcctcgatacgcgctctatagtcctttgccactttttatggtgaacatcccttgaagattgcttataaatataccttgttgtatacttatttcatatcattttatctattagcaacgctaaaaaatgttatctgagaatagccatgtttcccgtccttcacctctcaatgtagttggtgagttaattgagcttctttctcacgctctatcatatgtcaatgatttacgtagccgtgtacattttatagaacgtacgcttaatgaatatgatgacactaaccgtattaggg

SEQ ID NO: 238756 - DNA, 593 bp, Cannabis indica
ggatagacctttcctcaaaggtttaatggtgagaatagcaagatcctggaaaatagtagcatagggggctagccagggatctctagctccgtaacaacccccattgtacagcttgtggtcggccaaccaccaacaggagtacccttggtcggtcagaggatagcactttgtccccaagtggagtgaagtgcccagaagtcaatcttcaaccgacaaggactggaagtgggtggaaacacccaaaatggaaatttgcaaagtgaaactgatcacttcagacacctcgatccaccaaactccagcaattgtgtgatctccctcctatcaacacagtcaacatccgtccatcgatgagtcttggttggccagaccctacctttataggtcttgctggccatggtagcatcacgggcggccagaccctgccctttgcaggtctggctagccatgaagaagtagtggatggccagactctaccacttgcaggtctggccagccatgaaggagcagtgggctgccaggccctgcccaatgtagttctgcccagtgaaggacagcaaccgagtgtatgccttgttggtcaaggccaacac

SEQ ID NO: 238757 - DNA, 877 bp, Cannabis indica
atgcttacttttctaaggacaaaactcataatattcggattgggactactaatcgtgttggacatcttttttacctccagcaagtctcaacttcctcttgtaattatgttttcaataagaatacttgtaattctaatgttaatactcatacttgtatcgttgtccaaaaataaaatttacgcctaggacacccttctatacgaattacaaaatcattgaataaaatattgaatttttttatttcaattcttttatatctctttgccatgtttgccacttagctaagcaaaagaaacttctttttaactcagcttacaacatggcaactactccatttgatttaatacatttagatatatggggaccatttcatacaatcagcactgaaggttatagatattttctcactattgttgatgaccacacaaggttcacttgtgtttatatgctcaaaagtaaagatgatgctcaaacaatcataccacaattttacgctcctatattgaatcaattttctacctctatcaaaggcatcaaatgtgacaatgcaaagaaactacacttacagtctttcttttcaaccaaagttatcacaccatatcattcttgtgttgagagatctcagcaaaattttgtagttgagcgcaagcatcaacatatcttaaatgttatatgagcacttgccttccagtcttgtttatctcaaacatactggacttatacatacaactgtgtatctaataaactgaacaacctctgctttattgcaattaaaatcttattttgagttgttatataacaggttgccctcttatgaccacctacgggtctttagttgtcttgtctatgcattaaccttggaaagctcacgacacaa

SEQ ID NO: 238758 - DNA, 1430 bp, Cannabis indica
tagatgattatgaataattgaggaattatattattatatagttcaatatatgtgaattaatatgaattataacatggtaagaccccgttggtgagccaggggcattttagtaattatgacccgagaagggtaaaatgatgaaattaatttaattacgtgcttaatagaactatattattatatagtatgcttgtgttgtcttttcaggtgtgttctgacaggttggcgcggtatagtcacaaccgggtatttcgggccgaaccgggttcgggcccgaaatgcaattggaattgaaataattggcatttttatttattggtgataatctgaaatttaattggaatttattatgcatggatgccatttttgcccttgtatgcttatgtgaaggttatttggccctaagggcattttagtaatttggcctttatgtgttatgagttgtaaaatgagattttaacaaaatgaaaaaggaaattctggtctttatctctctcaaacctgaaccctctccctctcttcctaacctaatccttttcacttgaaatcataagaatttgcttggaaactagcttgattgttgggaaaatttgtggtgaagcttggagcttgcttttggttcaagttgaggtagtttctctactgaatttaattgaaatccttgctgaaaatgattgtggaaaaagcatgaattaattggaatgttcttgtttatgcatgtttggaagaattgtagtgtttttgatagattaaagtgtaaatttcatgatcttgttgtgttatatgttgtggagctttggatggatttttagggtattttctaggtttgatttcatgttataattggtatgctgccactggaaatttaatggggtgcatggttttgaagttctagttcaagagcttgaactttactaagttaaagcatgatttttggttatttgtgtaatctgaattttgagagttgttgttgatgttgtttgctctctactgtgatgatttttatctgtaagaagttaattttgggtatggtttgattaaggttctaatatatggaaaagtgagcatttttaaaccttaaaatctggttttttgggtttttcaaacccagtggccgcggccagatttatggtcgccgccgccataaaacctagcagagagcaatcttcttcctgattttgttttggccataacttttgactcgggactccgtttttgacgttctttatattgttggaaagctcattccgagctctttatgattatatgtattttcaatgccaactttatattttgtgaaagtggaattagggattaaccctatttttgaaaatcccaaattatgtgcctaggattacaggcacctgatcagtagcacccaggggtttggaatctctattattgtgagataacaggtaagacagtagttt

SEQ ID NO: 238759 - DNA, 682 bp, Cannabis indica
atatatttttcatttatttttttctgccatgaaaaggtaaatgacaacaaaaaaaattccatatttatgaaaaatcctattaatttggggataaaataagaaatgcctcttttttttgtcagttaactaaaaatgcctgcatattaaaatctattcaaatttacccacttttataaggttactatctaatttacccttacacatgttaccttaattaatagctggtgggtattcatatgattggggaggccttaattgtatgaaataagaggggcataattggaataatagttagaaaagagggcataaattaatgagttttaaaaagagataaaaatgagatggactcccttaaaaagggtataccatctaatttcctcaattatttaccatctatctgttttgggcccaaccaagcccaattctattcctaaacctatcattttactttccccttctttcaactctctcatgatctctctctctctatcttctctcttctctcagccaaaaagtcgccgccgacgccgagttctgccgggtgaaggtaatttaaagatttgatttcctctttagtcgcctttttttgtttcttattaatagatatgttctattgtgctgtggtttgggaaaaacgaattgattgtggtcattattatttttaatttcttcttccgtttct

SEQ ID NO: 238760 - DNA, 1938 bp, Cannabis indica
tttgccaatgaccttacattgcccaatggtgctctgtagctcaccctccaactgtttcaccctgtcgagaccccaatgttgggcgacaaaggaaaagaaggtttgctgaaaataaataacaatgaaaatgcataagtatttttgagtgtttttgatataaaaggcaaaacaaaaaggagaagaaaactaactgagagaccgaaggcgagatttctttcaagcatcacggtcggactgccattattgaccaagtcctagtctctggacagaaaggatcggagatgaggccagcaggccgcaacatactatgtagagtgttccaaaccaatgctcccagcctcgatgggaaaagcctcaggagcttgacttgaagaagctgtggctggactagtttttggaacaggctccttggtgtgtgtgagggtaggacgatggatctggacatgatgctcagaagcctcaatatctatggtctgcgaggcacgatttttgttagcagtagtcttcttgggccttttgaggggctccacattgacgtcgaaagaggtttctgaggcagatatcctcttcttccccttttttcttgaagtgtggagaaggtcctctagatcaatatttgcgaaataaagagatgtgttaatatctattaaataagcaaaaaaaaaaaaggaaaatgggaaatgaagccccacttaagggaattaaccataatcataagatggcaaagagggaggactataatattcactaaactcctagatcttgtgatcataaatatatcataggggtttagtggatctaagttccaatctggatggctcactctatccaacatggtcccatattgctcggcactcccataataagaactagtgcaactaggttgtacatgaaaaggtgggtacaactatcgaacctataggtgatgcaatctatgaggaaggggttccaaatataaaaattatatcggctatcgttgaaggtaactaatgaagtttgaatcgccctaagaacggtgggagaccatctacattgattacctcgggaagcttcttctttagcttccctagggactgcattttggagataatgcacctgagctgcatagtcttgggtttcctcatctactgggacttgaacctgttgccacgacgtatacttgggatacttataatcacaagtatactcgttttcagcaaggagaccaacatatctcagattggcttcgttcaagagaaacttcgctgatcgaagaccaaaaggaagacctagcagaagcctacgtcgctcagccatctcaggatttagagttggtcttttcaagaccgctgttaaaaggataaaatattacaagtcagcgaggccaaaattaaaagcatggagtaatttaaaacctagtttggaacaaatagctacttacgtattatgcgaaacacagttgtgttgattagggagaggccacttgcccagaagaaatcttccttaaaaggggtcttttttggtaacccaatgatgatcctacaatcgcttgtatgagtcccaagatagtaaaagcctcctacacaacgtttccttgcagggactgccttaaccgagtaaagatagactatttccacgggagtggggcactcccatcctaaaattttatacagaacccttagacttgcaaggattctataggaaatgggaaccaataggaatggggctattccaaggtggttgatgaactccttaaataatcccgcagggggataattgctccagtcctgatgtgcttgaggctccaagcacctatcctagccgagccactagtacttgctttgccactggtttcaccactggctccctcgcttgcctcgcgaataattcatactggtggatatcaactaaattcactaggagcgatagatctaacacgacatttttatttctaattaa

SEQ ID NO: 238761 - DNA, 886 bp, Cannabis indica
gctttgttgaacttgtggtataacgcttgaatggaatcattgaaaaagcaatcagttgttgcgaaattcagtgtaacagtagaagaatattcaccttttttcctaaggtaatagaatatagtgttcatatgctgaaacaagacaacaaagaaacacaaaaaagaaagttaaaaaatatttaaaaaacttaattacagtaactaaactaaaaaataataataaaacaactgtaaaacaactattaaatttctaagagaaaacagaaactttaccgagtcattgataaacatgtcataggtagccaaatgataaaaccaggttttattttcaacataatcaacacctaatctaaacccaggggaaaatttcttcacaccatccacataacaattgcaatgcctaaaacaacaaacaaacaacaaaaaaaacaatattgaaattaaataattacaaaataaaaatagaattcaaacaaaaaacaaactacaaaacagaaagaataaaaaagtcaccttggatgttttagcaaaccttcaccaacccaagcatcaaactttgcctcaatttcaggagagacgggatcaacaaatgaatcgctaagagcgtaaaggcccttgacataagtaaccatattaaaatccctcccatctcctcctgattgagagcctaatgacattacctccattgaagtgctcctcacatcagctgatccaaaatcaacataaggcgattttaatgccggcgcacgctttctcttatccaaaagaggagtatcggaaacagtgccatcaacttcttcattagaaggaatgggagctgctttttcaacagcaacacttgtattggattttgggacctgaaaaaattaaattggaaaatcagaaaa

SEQ ID NO: 238762 - DNA, 971 bp, Cannabis indica
tcttggtcctcataatagtctttatgtcgctcttcatctctatattcattgtctaacttttgaagctcttctttttgtgcatttctttattcttttagcctctcaatttcatcttttaatctcttgatttcaacgatatgttcactatcgacatcgacctcaacctttttctttctttgcattctaccaaacacggtagaaatcttggcaaatgacttgcaacataatgtaccaacttagttacatgtctccaatcatcataatttcgagggactatagatcttgctttaaccccaatccatgattgcatatctgcatatgctgttcctataggttctcctttctcatttcactctagttttttcttgcgtacgtccttaagcttttagattgctgatgttattcttttttatcttgcctcgcccttttggcttattttcatctttttgattcgtcatctggaagagatacacaaattaaatcgtttagtaggaaacatcatactgaaaaacatcatactttttttaaaacaaacaagtagtactattttagagaaaaaattacttcttagttcacagactagccaaataaaatctttccaaaagttgtttctattagtggctcataacatgtcctagacagtagtagtaccgattgatgataactaaaacaaattaactcatacaaacatcatacaaggacacttaattttttcaagatcgttacaattctttagggcaaacactaaaagtttttaaatcattctacgaattgtggagtttctctcttctcttccatccatgacttatccattttgaaaataaaataaaattcctaacaaacaagattgaaaaaaaacttaaaagttgctagaaaaatcctaagcacgcttagcaattaaatattaaaaaacatgttcatttaaaaatccaaaaaaaaaaaattggccagagtttctcctatttctacaa

SEQ ID NO: 238763 - DNA, 697 bp, Cannabis indica
ttcaccttgttctcaaggtgaaacaaagggaattgatcatggatggtagcaactggctcccatgtagcttcaaaggttggtaggtgcttccatttaatgacgactttggagggagtagtagcagcaacaatagggaagcgaatgtccaaaatagtttcgggttgcactttaagttccaaatcaactgttaattgaggggaaatagtaggtgtggctggtgaggacgtgatggctcgacgaagttgagagatgtgggagacaggatgaaaacgagcctggtccaaaatctggagcttgtaagcgacatgaccaactcgttgaatgatgggaaaaggtccatagtaccttactgaaattttttcattagagcattgggcaaaggaccgttgacggtagggtcttaacttgagatatacttgctctccaactgcaaactcatctagttagtgctttaaatcaacttgtagcttcattatgtgttgagcttgaaggagatgcatttggagatcatcgaggatggcatcacgagattcaagtaactcgttaactgatgatactgtggtggtacctttttgtaagataggagaggtagggggtcacgcccatataatgctcaaaaaggggtactctttagtgaagaatggtaagaggtattgtaagagtactcagcccaaacaaaccatttagaccattgttt

SEQ ID NO: 238764 - DNA, 1663 bp, Cannabis indica
agaccaagtaccattattacattcatagatccaatccaagtttggatttaaaatattgtatgaatatactacacttcggatatattccttaatcattgatatgctacttgtaatcaatttaaaatcaacacttttactttgatgagctaacttgttaaggagctagctcaacctactagttaccaatcacacttagtgagtggtaggtactattgatttgagttttgtctcttgtcttgttttattgacacgtgtcgtatgcccactttagttttgacaaaataattcaataataataaattaaaagtagtcattttgaatggttttatgaatcatcaaatttaaatgttgaagtgggatattgggaaagttttattgtgaagaaaatagtggtggataatgttgttggattaaaaaaaatgcaagaatgtcacatgctttggtaaattaaataattaggctaccaacttttgaagtgtactaattcagcaaaaaaataaaatgaataaacttttcaagtgtacatatgtggctaagacaaggatttgtggtagataagataacacctcatgattaactttacaacttatatatttatatcatttcaaaatgtacataaactagaactgtgtaaaagattcgatgcaaatctcaaaaattacatgagattgttttgtaacttggtacataaaacttaaattaacacaataagtatattgttttttcaaaaaaaaaaaaaaaaaaagaagcatcctaattgattattacttctttttctcaaacccaatcttttcttcataagatacaatagaagccatccctacagggcagaagcccaccaacaaccaattatatccttctttttatgtatttattttaaaacaataatttttggtgattttaccatagctttaatgaaatataattttggaatggattgagtttcctcattgtacttgttggaatctttattcatattaagtgtaatgttcccgctttaaatttttattgggcttttacatctatagaatgatagctcttatgcacgagtacgtcactcttgctgcttcataaaatgacgactgaccctacaaaccaacacaagtgtttctagcatgttttgtcctcactcgcatgcttcttagaaaaacttcctaggaggtcactcatcttaaaattatcccaggtcaagcacgtgtaactgtggagttctttcatgatgggctaccagaaaacaagatgcaccttgtgttaattttttatggtccatatcagagttaaaaaagcggaagcaaatttgttaaaaaaaaaaggagttttatctaatatgaactataagccaaagaatctcatcataatataaatagattaaatctagactaataaaaagaagacaatacctcttgtagtctattaagggatctttggtatcttttagtataattacgatcatccaacccaagaacttcgctgaagaattcacactacaagcttccaagccagtctcaacactcatgaatagagtgggatattaaattctctaggatgaacaaatttatgtattacaatgtattcttaactcatgagatagtattgatcacaatctcacacaacactatactgtgtgtggtgtgtgaggtttaggggagagagagagagagag

SEQ ID NO: 238765 - DNA, 854 bp, Cannabis indica
tatatatttaatgtaaaataaaaattattgagaagaggtttatttataagtttttgggtgtaaataaaatttctttatgagatagaattaatataataagtttaaatacacaaaattataaatttttaacttatgcaaggaaaaaaataactaacttagaaattaaatttaatggagaattatgtttattgcataaaatataaatacatatgttatattttttaaaattataaaaaaaattaattgacttatttaggtcttaagtttttgaaagatttttaaaaaattactataatattaagaataaatttaatgtagacatctaacgacattttgcgacattcaatgatgtgttgtgacaatgagaagtcgacaacatgtcgcaaaaaagtcgataacatgtctgaacaatacatacatgcctacattgcgaataaaattgcaaattgtcgaaacatattgggaaataaagtcgcgaatcaacacaacattaaaacaaaaatattaatcaacatatcgtgaataaaatcactaaacgtcgtgaagcaagtcacgaataactaattcatattttaagcaagtatttttactgaattaacaaaaaaaatattacagaacagaatagaaacatacctgactgttgaacaatagtgcgatgtcagttgccttaacatcttgtttctgttggccctccagagtttctaatttaccattctgggaaacttggtcgcgctgcattgagcatacttcttgcccactttctcaatggtttcgtatgcccagtactgaaaggcaggtacatagccactaacagtgtactttgcctcctgagcaatcttcttccccttcttctt

SEQ ID NO: 238766 - DNA, 1621 bp, Cannabis indica
tttgtttatgtatgttgtatcacaatctattaaaagtggatgtttaacgtcagctcttaatttaatggtattttaatatttttgccgttaactttaacagagtataattaacatatagctgttagtttaattcactaatattattttattcttcatttaaattaatcaattaaaattttattaattttcttaaataaataatattaataatagtagatatttttttattttaaccataaaaatagaataagaaggtatgtaattgcaaccaacctgtgataataaatattctccttaattacaaattctttatcccaaaaagttatcgatccactttataaatgtagcttatttcgcaggttatgaatatcatagaaatcaagattatcgatccactttttgttcaatttgtttctaacaaagtaacgttagaaacacctaattatcaggagcttacgatcgaaagatgttctgaggattcatcatcacttcgttctttgctgcatcaccgattaattgtattagtgatggctatgtaggacaaggtcgtacggtcttgatcattggtgatgatttcaaatcaatcattgggccatactcctagacaaccattacaaaaaatcttacttttagtctcaacaaaatttgtgactaaaagtggaataattgtgactaattataaatcatgatttttatgttgtgactaaaaggtccgcggctaaatgtaacagtcacaaaaattacaatttgttatgactaaatatttttttagtcacaatacttgttgtgactaaaattaaattagtggcaacttgtaactaaatactatgttttagtcacaagtaacattttgttgtgattacaagagtcacatttagtcacaaaaaaattatgttgtgactaaaaaattatcactaaaaattactatgattttattagattttgcctgtctctattgttacatagtaaaaaaaaatcaaaataagcgttttataatgatataatagattttattttaaactattcaagattataaatatattgatgactataaaaagttgttaactttttttatttatttgtgtgtgttcttactctaaaatattatttgcagagcatcatattttttagacatcattattaaatatgttgattaattataaatacaaatttattatattattggaataaattcaaagtacagtttatacatttatgttaatgctatatcaacaaattattcccatgaggtcactcatcctgaaattattccaggtcatgcacgcttaactgtggagttctttcgtaatgggctaccatagttaagtgtgcttaacttgggaaaattttaagatcggtgacctcctgggaagtttttccaggaagcatgcgagtgaggacaaagcacgttggaaatactcgtattgctttatcgtagggcagtcgtcaatccacaaagcaaccaaaagtggcgtacccgtgtataagccattagttcatgggggaaggcctaatggaggcttgaagtggggacgttacaaatgatatcagagtattgactcagcctaaagtgtcactacaacaaaagagactttttatcccactttttacaatgaaaaaa

SEQ ID NO: 238767 - DNA, 1038 bp, Cannabis indica
ttttattttacaatctacttcttgaaaatctacttttttgcaactaagaaaaatgaatttttttttttaagaattattacataaaaaataaaaattgacattttatttacaaaaatacttcaataaggtgtagacaatatttatactttttatgtatttttaattatcaaaatacctcttacactatcacttacacaatcagacgatgtttattgggtaattgaccaaatattgtatcagacgaaggtttcaatcagacaaaacaactgttagcaaaatatttttgcaaccgttatgaaacattaaaaatcagaacagtattttcacgtacatgtctctatctacatgtctctttataatttaatatgaacaaattcaccattagaattttggaaaacaacgaaaatacactaagataaacattttactgtagtattgatgtaaatttttttggattatatttgagttggattgtttgggaactccagttcaattttttgagatatgcatttcatggatatgaaaattgaagtaaggacattagtttatgcaaattaaactagatttttggttaaattttaatttcttagtagtttttctatactttttttttttcatgaattcaaaatagcccatgttttgattgattctggtcgtcttctcaggtgaagtcgccggaattaatggtggttcttattctggttgaattttcgtttcgattgcattgggttgctgcgtggttgcacgatggttgcctaggaagcatgaatcctgggttgaaggtgtgtgtaagtggtatttgtgtaatttttttatttgggctgtaaatttatttatttggccagctggaagtatttttgtaatattgttattttttggttaaaactaaaaaaaaaactcctttttttgacaaaagaatataaaacttcattaaactatcaaattatttatcattgcagatggtttaacaaatttgaaagagacttctctattctcaaaactagttaatagacttttacaatcaacaattattctccc

SEQ ID NO: 238768 - DNA, 848 bp, Cannabis indica
aacaccatacgagacgtattctcaaaacagtaaatgtatctcacttctataatagaaataacaattaatgttctccacgttacaacttattagtaatcttaaagacgtaatcaaattaatatatatagatcaacttgttttatgataatgtctagtctgctgactagtgtttgtatgttttaaaagtctttttctgggatttctgttttgctcttttgtttggctttgttgattggtgtgcgttatggcttcaagtagccatacaggatttgatctaaataaagagtatgcccaaataagtttggaggaagaggaggaggggatcttgattggggatgataatgagggagaagaggtggcttttgatgatcgatggtgcctagtaggtaagttcttgacgggtagaacgttagatttcgatgctatgaggcacatgatggcgtctctttggcaaccggggaagggagtttatatcaaagaattggacaccaatagatatctattccaattttatcatgaaattgatgttcaagttgttattgatggtagtccatggacgttcaataggattccactgatttttcatcgtttgaagaggggggaggacccgaagttggttcggctgcatcatcttgatctttgggttcagattcataacttgaagactgggtatatgcttgaaaaagtggttcgaagggcaggggattatgttggaaagtttgttaagaatgatgctaagaattttaatggaatttggagagaataccttcgggtacgggcgactgttgatattgaaaaaccattaaaacgtagaatgaagctctataaggacaatggtgattggattt

SEQ ID NO: 238769 - DNA, 1236 bp, Cannabis indica
ttattctgaatgcaaaacaaatagttagtgtattgatgtatttcttttaagggagtgcatggtaaaaatattcaaaaattaattagcatataatttctttcattaatatattctaacaaaaaaaaaattatcacccatttatgtatggttattttcttttacatttatgtatggctatttttattttaattttcttaaaacaatttggtatcatttttattttgatttttctctgaatatttagaatatattttatttttattttacaagtatataaattaaaaatatattttagggtgcttctacaatgtacttttaaatgggtatactgatgcacttcttatttgtttcagtatttaggataattttttagtctaattttttcatagtcgtgtacgttattgttatttaagatattttacaaaattttgagaaattaaaaataatttacagtatagaaagtagtatttaaacaatttattttacacacgtataaaataaaataattacgtgtgcaacacaatgtttgaaacctacttttggcatgttaaagtttctgaatttcttaaaattttacagcatgtcttaaataactataacgtatatgaccatgacaaaaaatttgactaaaatattatttcggataccaaaacagatatagatgtatcaatgcactctttttaaaggggtacattgtagaattttctcaaaatatatattcaaaagtgaaattaacaaaagaaaattgtattaggtgtttctacaatatacccccttaaaagggattcattgatgcaccctctacctgtttagcttctagaagaattttttagtccaatttttttatattcgtgtacgttataatcatttaagatatcctacaaaatttgagaaatttgaaatactttacaatatagaaagcaatgttcaaataatctatttcatacgcgcataaaataaatagtcacgtatgcaacacattgtttgaaccttattttcgacatgttaaatttaccaaaattttaaaaattttgtagaatatcttaaataagtatgacatacctgaccatgagaaaaaataactaaaaaatattatgaatataaaagtagatagggtgcatccatacatcccttttaaggaggtgtattataaatttttgcaattgtattaagtgtattttttttaggaaaattctacggtgcacccctatttgtttgagcatccgaaataatttt

SEQ ID NO: 238770 - DNA, 1816 bp, Cannabis indica
atgtaaattgaatttttaattcacttgttaatgcctctcttaagaatgaggttaatgacttttgtcttagagatttaattacatggatggcaaaaaaagaatcagatccttcttaacagattgtatattagtttccttaaaggttaattctaatactaaatgattttgagcttaaatctatattaggttatagaataaatcactggtgaattaatggtacttaagaaataagatataaattagaagggtaaaatactaattcttccattctaatttatgaactaatttattggagagttgaactattgtaagatgattatatcgatggattaagaaaagattattataaaagtatctctataacataaagagttcaattctgaatttatagtagaagaatattataattaataaattaaataatataattaaagagtttaattatttagttttagtttattagagcttaatgttataggttcatgatcctgaaatatctcaattagaaactaacaaaggtaaatacaagtattaggcaaaaagagacttatataagtaaaatattttactataaataattatgagtatttaattaattcagaattaattgaaatacataaatataattaataatgaattaatttattttgagatttttggtatttaattaataaagatattggggaatcaaaaaacacatatgccctcatagacatatacatatgtgtgtaacacattacacatacactaccaaaacaattcataaattttaagccttggtgaatgtaccagggctgcgactattttaagctttgagaaaagcaacaaactcaacacccaaaatacaatactaatctgactcaaagtgttatgcaatagttctaagcccagaagagaatgtaacgctcacataaaacatagtagttatcttcatgctctaattacacagaaatcaataaattacccatattcatacttgaatttcattttctgacctaagagccataacaaatccaaggtcaagttttgaagtctatattttacagtaaacaacaagttttgaagtcacaatagcgatttaccatcttaagaactccatcaccatcatcatcaattctaagaaaactatatatgagcacaaactctaaaattctaattcagaaattaaaggagagagcatgattcatacttcaattttctttacaatctcaattgaattaaccaaaacccaaccaaattagctccaacataagaaatttgggttcaatttgataaaaaaaaatgaagaaaatacaaagatatatatacatatatatatatataaaatttgggctgatggttatgatcacttaataaaatgtggtcaaataaccattttaccttccattaatataaatcaatatagatagagactaaaaatcattctcattataacacaaccacataaatataatcacacatatttataaataaccataacacataatttcacctatttggaccccaaatccaatttgtgccacagtattttacaaaaatactgtcacacggtattttttacaaatatattgtcctggacatttttttatttcttttatactgtgtataccccaagacacatacaaagtctcaatcttcaacacgtatagactgaaccaccaaagcaataccagaacaactagaaaataactatttttccaatcataacataaatttttaaaattccaatcctgaaacaataacataaaaaatttctaaaacaactgcaaaataacaataaaactacaaaacaaaataaccaaataaaatcacaaaa

SEQ ID NO: 238771 - DNA, 2266 bp, Cannabis indica
tttgaggcctgtgatacgtggtccaatagcccctttgacctttaataacctgactaagtgagtgacaggagccttgcaaagtaaggctcatgtagaagggattgagaagaagaacacaagtagaggaagaggaatgaccaaaagatgaccaagaaaaatcaaggacagtggtcccaaggacaacaatttagtggggtagcactggtagtggttcatctggaaagactcgtagtgggccatatgggtgtttctattatggtcaacaaggtcataagaagaaagattgcccacaacgacaacaaagatttcaagcatctcacggaggacccatcgggaactatgtagagtctactccttttcgtggacagcccaggacaaaccagtctcagtcttcatcctacggtttcacaccccaatcgggccagcagtctcagtatcaacatcagttccggccacaaggttcaaggttcaacatggggtactaacaaggtttccaaactcctactcctagtgggagtcaaagagggtacaatcaaggtggaaggtttggtgcaagtacaagccatcctagtcagtgaaagggaaaggcaaaagcaaagtcgtccgctcaagcctatgctcttggggttgatgatgtacagggcagtgctgactagggagttgttgatggtatggttcttatctcacactcttgggatcatgtgttatttattactggtgcatcgcattcctttatatctttgatgtttgctagtatgttgggtttgagttgggaaacttttagtcctgcgttacatttaagtgtacctatggggggacacggtaaggtatccaccatatgtaggtcagtttgtattgtgttcgagggacacaagttatctggaaacttattagtgttgcctatggggcaatatgatgtaattctctttatggattggttgtctaaataccaagctattatggattattcaagcaagagagtgactcttttaacccctggtggtgatttcattatttatcgagccaacatgagcgcagtgagacaaaatcctatcttaagggcatgcttaggtggaaagagaaacttagagtgttatgggaatctgtttgcgatcgatgatgagtctaggaatttagaccagttcccttggatatcagtggttagtggttttccggatgtgtttccagaggatttaccagggttaccacctgatagggagatcgagttttgcattgatttgattcccgaagctcaaccagtttctattgcgccttatcgcatggcacctgcagagttggctgaattgaaaaaacaattaggggagttaatggataagggttacatcagacatagtacttctccatggggagctccagtcttgtttgccaagaaagctgatgggactttgcgactttgtgtcgactatagaaagctgaatcagatgacaattaaaaacaaatatcctctaccgaggattgatgaattatttgatcaacttggtggttcaaagttcttttcaaagattgatttgaggtcaggctaccatcaattgaggattagggaagaagatatccctaagactgctttcaggacacgttatggacactttgagtttttggtaatgccatttgggttaacgaatgcacctgctgcatttatggatcttatgaatagagtctttagacctttcttggataagtttgtggtggtattcattgatgatatcttggtgtattctaagacacgtgaggatcatgctgaacacttgacaatagtattacagacattgagagatcatcaattatacgctaagaaagagaagtgtgaattttggatgactgaagtcaagttcttgggccatgtaatttctcaagatggtatcaccgttgatcctgcaaagatagactctattctacagtgggaaagaccaaagaatgtcactgaagttcgaagttttcttgggttggcaggctactaccgtcgctttgtagagaatttctcacgaattgctatgcctttgacgaagttaacaagaaaagaagtaaagtttatgtgggatgatagttgcgaagaagcttttagagaattgaaggaaagattaacttcggcgcctgttctcactgttcctaatagtgaggaaccatatgtggtattcactgatgcttcaggtactggattaggaggtgtcctcatgcaaaatggcaaggtggttgcctatgcttctcgacaattgaaaccacatgagaagaattaccctacgcatga

SEQ ID NO: 238772 - DNA, 1273 bp, Cannabis indica
aaacactaaaatagggacatataggttagtactctcactagccaacttgtcaattaagttcctctaactattcatcgttcgggaacacataaaagcgctactacccatggctttcttagcgtggtctcccactattcttcaacgatggcctctgcttcgttaagccgcgcaggggtagccactatgtgatttcaaaagcaaaaactaagctctaagcttttttacacgttagatcaaccgtgtctaaactaagctctaagcatactatggacaccaccccaaggaagaacccatgcaaagtatgtaaaacttggtgaatagcaagtgaccaagagacttgcctacatggtcgcttgaggggtgcccataccgtacaacgaatcgaactggcacaatgaacttacatagagaaattttaaggcttaaaataagctactaaacctacttctaagtcgtgtaggcatacttcagcttggcataataaatccacagccttatatgtcaaggccattagaagatagtcaggacgatcatatgttcgtcgtagatggatctaaggctaaataatagtagtgtttgaaaacagaaggcctataggccaaagcaagagcatgaaagccttgaggtcggatatgagatcggttcgcatgcatgaggccaaggtcctgctagaactgcatagccagaaaagaactagacagagctcctgtaagggccacgtaccaggctatggctaaggcagagttccttataagaaccaagccatgttgagtcttaagttgagcattcgattgtaatagactcaccattaagcttcatatagagtttctaatgaaactacgtatgaggctaaggttatatatgcctatagagccaaactcttaccgaagtcacatgaggacagaaaactgtctacccacttggaaccaaggcccatgccagccaaggttctcaagccatgaaagggtcggccagagtcccaagactaagccaaaaactggccaaggtcaccaaatccaggcttaaataggcaagctttatagggtaaatccctaacgatggccaactcccatgattaagccttagggccggccatgtctcaagcaagacctcctagcccagacaaggtaagttttgaatcccaatgtgtgtttttctttcaaaactcgaatatgtgccttgtattctttataactcaaagagtcaagaatcataacgaaggctaaaatcgaatcttttctatcaaaaagtcatacattccaaaactatcatg

SEQ ID NO: 238773 - DNA, 955 bp, Cannabis indica
agagcccatttgagagaaaaaaaatttagacaccatacatttcttgttgctcttccttcgccgttgccagtccaccctatatcgtcgaccgacgccgacccccagctctcaactttcatgtaagttctctggacactccatgctttttatcgtctgtttgcatgttagggtagaacttcttggttgtgtgttggatttctgggaaataactttgactgagtctgttgtgtaatgtgtagaatcttctttatttgtgtttttgttattttcctccattttctttagaattgatccttctgttcgaaacactgtttagggcatggggcaatttttgctcccacattctgcgtttttcatttttcgcccactttcgctccctttgggatttttgtacccgatgtttgctaaggaaagccctttgggtttctatttttggcaaacatccgaagggggcctctttccagcggttaggggatccccactcccttttttaatattagggtttggtttggggtctaactgctggattctttcttttttcagaaccaaacatgtctacccctgcgtccggaactaagtcttctaagaagggggcggtcgctctgaccaccctggaggaggttacaaagggcccggtggcccaagagaactacacatgccgttctaacggctgggaagcggatgaactacactccatcctgatttgtgctcatcaattggagaagatcgtgacggtggttaggattaaaccgtccacgtctgtggttttccatcgcttacattgggacgaagagacacccgaccacaattataggggttttagagcctggatgcagacccatctcatgtcaggagccatgcttccccttcaggattatttcattaattttcttgtatttgttggcctcgcgccgtaccaacttattccccaagcttaccgcctgctctcaggctt

SEQ ID NO: 238774 - DNA, 629 bp, Cannabis indica
tttggatgactctagctttagcaagacttggcaaagaggatgatttgttagtaccttgatggcatgggcctgaaagtacggtcttatttttcgtgaagcaattagtaagtaataggatagcttttcgatcattggatatctagactctacgcccagtaatctcttgctcacataatatactagaagttgcatcattccttcttcttgcactagggtgacacttatagaatgattggacacttccaagtacaaatacaatggtgctccctcaaggactcaaccggtttggacaaaattggagctttagttaagtgttccttcaatttttggaaggcatctttgcactcgagtgtccattcattttttttccactcaagacattaaagaatacgatgcacttattagtcgacttagaaacaaacttgctgagtgctacaattcttctagttaagctttggacatatttatgcttttagagagaagatatatctagaagggcttgaatcttctctggattttcttccattcctctagagctgataatgagaccaaggaatttccctaaggaaactctaaaggtgcacttctttggattcaacttcattttgtacttttggatgatagaaaaa

SEQ ID NO: 238775 - DNA, 1734 bp, Cannabis indica
ctgcaatagaggataagaggtgtatggtttattctccttatacataaaagatttaactttacttgcctttccacaattgaaaaagttttgaagcatcatcgaccgagagagaactatggacatgacatatgccaatacgtaacactcattaaggcagaaagagagacactacaaaaactgcaatcacttacagaacaagactcgagagttgtaaaactgaggtttaacgacattatattagggaaattgatatggaaaataattttgcacaatccaactctgcatcatattgttcttgagacattctattacctcattcaaaagagagatggaatcacagccactgatagagcacagtttgtttgtttgccttgattgtgagctgaaaagacaaaaatgacactaatgtaaaaaagctaatattccaaatgagctcattaataacaaggatattataataaagttaacagcatacctgtagttgaaatccttaacaacaaaatacaaaggtggtccaactctgagatacttggaaagattatcaaaatacccctgcagaaagataaatcaaccatgaaaacaagacataagaattaatggaaaggaaaattcattagaagagagataaagacaaaaagataagagcagaagagaaaacctgaagatacgaatcacggggaagaacaatctgctgctctaaaccaggttcaattcttgtagatagtgcctacaaggataaaatacgtgaagagttcacaacattgtgtactcagagaactaaaagctaaaatggaagagtaactgaagggaagcttgtagacccacttacaatgcttgctaaggtaaatgctaaaaatattgcaatgacaaccatcttaacagcccaaattccgagaataggggcatgaacttcctacaacaaaacagaagttaattgagagaaacagaccgcctgttatgttctcgacaagaaattggaaactaaaatttccaaacatattgttagaaaatttagtatctctccaaaagcaaaagcataacttcattgaaaaatacctccatatatcgggtcagcaaaccagttcttctgtgactgctccctgaaaagacatgtgcattactcaatgacggagctaggggcggagggtgccatgcccccccccccccacaagatttcttaaatttatatgtaaaaattaatttaaaaaaaaaaataaataattttttattttttttacatgtgttggcccccttttaaatttcgatttggctctgccattggcattacttaagcagaatttgtagcagtttgcaacacacacgcacaccaaaaaaaaagagaagattgcctaaacacaacagatgacagacataatacagaataaagcttcgaaggaataccttcactaggatccacagacaaggaagggatctttatgcatggaaaacaatcaatcctgttatcctcagctcttgaaaagtcaaagactatcaaggctacaaaagcagtaacttgcagaaagaagtccaatagaacagccaaagctagcaaatgaaacacaatagattaagtttaaaggaaagaaaagttctaacatacttctcagaatttttcttttcctttcattttttttttaattttggtgaggtgcgccaggcccatgtgatagtgcaaagcttggcaatgcatgaaagccccaatagcaggctattggagtgggctttccctctcaa

SEQ ID NO: 238776 - DNA, 3111 bp, Cannabis indica
taattattaaatatagttttggtatttatagggttgaaattgtaaaaagtggtatttgtgaaaaatagataaaatagttgagaaaaatggcaaaaactaaacttgagtggggcccaatatgtggccggacatatggtcctattttactctatttttattaagtttttattccaaaataaatcaaccctaaccctatggaaattagtataaaaggatagctaaggtctcatcatccaactaatgcctccaaagctaaaaacctaactttctgatgagacctcttccttcttcgtcttcctcttgaattttcgaaatacctaagcctttcttaacaaaatatattcagtcattagtgattgagtgcatgcccacatataacaagttggtcctcaatcatagtgtgtaagactgtgaagaatccaatcaacaagaaggataatcgggctcagatcatggtgatactctgctacagaaaggatacaagggttagatctgagtgggaggagtcatttaattccactgcaaccactgtaaggtttctcataccttttatgtgtttatttatatcattttagaaattcatattaggatgttaaaaacatacatgttagtaaatctagatcctggtaaaatatattccaacataaggctcattaacgccccaatcacataaaagttttagttgtcattttcatatatcattcttttggatatattttctttaactctaatattaaataattagttttctaaaaatctcagtaaatattttggtgctttcattgagagcagaagaaagcagtgataccatttaagattaccttcagtaattatggtactcacccgaaccaagtctagtttccacatcaatgagcctacaaagggagatgttgatctcaatgctaaaacaagacatggaggagatcgaaataaagaaaccagtcaccgcaagaaggatcaaactaacaagaagcctatgcttgaagatcctatgaatgaggataatgaatttgaggagactaactctgttgatcctggggataattctcaagttaggcctgttgatgatgacgtcgaaaaggaaggtgatctagaggagtcagataatgtgatcgccatggctaggaagttgaaaataaatgaggaaaaattatcgttgcaagagaaagtatctttgttgatgcacaaaaaaatggcaagaatggaagccataattatggtaatgaccattgaaaatagtgccaatcatactgcccaaaaataacactgctggtaaagttgatcctaaaaattctggaacctaaaatcctcataaggagaaagggaagagaaggtaggcgagacttcaaagaaggatgcccatattgaacagcaaaggaaatctaaattgtcaaccaacctcaaaagaaaaagaaagggacccatgcttcacgataaggggatcaaactgatcctagaggtagagttgctgagaaagacaaatttgatgctagagccaagaagcctactacccaaaaggacacaaatcattgtgatgattctgttagttgaagtgatgatgtcaaaaatgtgtatccattgttagatgaaaaaagtggaagtctttccacgaatgatctctagacaaagctgacgtcaaaagagtaaaggccaaaactaagaaagccaaactttgtagagatgacctaagaaatcatatcaaggatcatatttgtggaatagaatcacttgatgctatgagttaacgattggagcataaaattgaagagttaacaaagctcatggaaaagatctcccagaagaaaaatggaactgtgtctaacatgaaggagcaggacacggaaccgtgtgtaaaaagaatcatagattcacaattgtcgaaacactttagaatgccttagatagaactgtatgatggaagagcagaccccatggaccatctatccacatacagtcaaatgatgcaggtagcgaaagctagtgatgacataaagttcctctgctttcattaactttatcaaaatctacggaagagtggtagaaaagattatctcccaaatcagtttataattggaaagatttgcaaacaatgttaagaaaacaattcatagcaccaaaagatttcaacttggtagttagtgttgggttttgtgccctaaataaaactcatttcaatataatcagatttactaattaataaaagatcagaaatcattctatgttgcatagttcacatgatttatttcattattatatttaatgtataaattctattaagtccagaacatatataaatatatatatatttgttcatgattatagtgtcgccagcacagtagaatataatcttgattatatgttcaaaagtttaactcccatgatttgtcagttcactggatttaaactgcatgataatcggcgataagttatacttataccttggataagtcttatgttctttccagggtattggaaaagtttaccagtatcagatgtatggagtatacattgtaagggaccgatattgatcttggataagatatcataaagttatcgttatatctttctaatttcaatatcactagttgatcttaagtctatggatcttaatcctaatatggttaagttcaacttagttatattatttatgttcttcaagttgttcgtggatgctaaccaatggttttggcggatatttacatcttgggaacaaacaatgatttccttcgagctcggctgaataaaaataaatgattgaggcctcatatcagtgtttatattaatttactagaaatatcatttataggtagctaagtgttttaaggataaaatatattgaaggatagaacggtaaatttgtcccttttttgatgttgatcatctatagaggatctttgactattaggatagtaacaatggataattataacatatctatattgtggtacatatagagcattctatataattgagagtactattcaattccaaatttatagtggcataaggaaaaattaataagttagaaaatttacttggtaaattctaaatctacttattggaagcttagttatataggcccatggtcccctcactagttgagataatact

SEQ ID NO: 238777 - DNA, 900 bp, Cannabis indica
tactcacttgtatgttgtatgaccgaaaagtatttgaagtcttcaataatgaacttaaattcaagcctagggcgtaaattcgaatctcctttcaattttgccataattaattcttcatttacatattatatacttactcgaggttgtttttttctccggccacacccgccaatttttcttcggcttaggtattgtttggtcggagttgtgttttgctattgcgattcgatttttgatattctgattagccttgactctgtaatataattttgaatgttttagtcttgtctctgtagtatagttttgagtattttaatcttgtctgtatgatatggttttgttttgtttcgttattggttcttatttgttatttgatggctcgctactaatggatggaaataacaagttctctgcaattgaaggggttgttagtcgtgaagttacgtaccttgcacaatagttgagttctcaagctacgaggttgaatgaacctgctcctaggggcgttcatcaaactgcccacaccacaccacacctcataaaaaatgcggtttgaaatcctttgcgctgcagttatggtttgcatttttgccaaacaacgctgtgcggtttgcgatttgcaattttgaatttaataatttttttcatataagaataaatatatgtaatatatgtgtccaatcaagacttgatgattagtatatatgttatgatgttaaaacttcagtaaaatttttttttgtattgttaaaacttcatgagattgatttttaaatttttactataatatttgataatgatgatagtgtaaatcgctgagactgcactgcaccataatgtatttttacggtgtagtttttgcagttttaatatctagcagtgcggttgcggtttgaaaaa

SEQ ID NO: 238778 - DNA, 1517 bp, Cannabis indica
tatatttacttatctatatgtatatgtataggtaccttcaagaatagcaagaatattgatattgagcctaagattccaaaaggaaatgatagctttgagacaaatagggaaattttcaatggcaacagccccaaagatccacaacaaaaggaatatggccataatatagttcaatcagcccatttcttgtccttgctcttatttaaaaaaccataaccttccaatcatcaatctggaaaaaaaaaaatagaatttccgtagagaacaataaaagaaactttcaaggtaaaggaaacaaaacaagtaggcataaggcaaacaccaagcatgcatgagttactcctactacattttatataaatccacacctcaccactaaaagtttcaattaaaatttcccatatcagaatgacttaccatagttccaagaagagtctcgctgaatcttcgaattttaaggtttttggtaactatgtaatgatcactttcaccattgatcattggaattgaatatgcgatcctatgattatcattcactctctttccttctattctgtttcttcttcaataattatagaaaaaaataacctgagaagaaaataataaaaaatcttaaaatggattaaacatgaccttaaacattattaacttggaaaattaatcaacgtaaagtgtggcccaactagtaaagaaagaccataagcaatctactctttctctatatgtataaagccaacaattttaaaaactagtaacacctactagttcaatagataattgatttattggcaattgaaagtcacctcattatcttgaaatatttccaatgcttgattgcgtgcctcacatacatgattgcaacctaatgatggtcatttcaaaatattgttcctaatcaaatataatcttagtggaaacaaattttacttatttatatatacacatcggttctttcaacaagattcatctacacatttcaaattaaaaaaaaaatagccaccttatattgtggtcatttcaagagatttttatagataaggtatgagtacaatatttttttcagctcatattttgaatagaattagaaaattaaataaagaaaaattaaagctcaccttcctgcgatttgttgttatgtactgataaaacacattttataaagcttgtagaaaggacatcatgttcttttatgaatacctcacattacattgtaattattctgtgacaatttacattcatattaaaactagtcataagtatatatcaaattaaaatagcatagcaaattaagttttgaatagcaatactttcaaattaaatacacgaattctatgagtacctttacaaaagtcataaaatggcaatcactcttatgcataaagtagagtccataattatgttataagtaaataaacaaaattattttatcttttagataacaattttaggctacttcaaatagtaataaaaataatacacaaacttaataatcttgttagtttaactatctcttgaaa

SEQ ID NO: 238779 - DNA, 524 bp, Cannabis indica
aagtttggggatataatgggtgcacattttttcactcattcttagtcagttattaaatgaattagtatttatttcttaagttttgtacaaatttgatgtgttttctgttgttactttctctgaaccttggctagatttctattcttttttagccttgttcagggcaaggttgtaatatttctttgcatttttctcattgcccctaaggaaactaatctcgtttcatgttaggaatttgacacacaagtgaaaaatagaagttactacttttaagtcatacaaggctggccgacctagcataacattaaaagcagaaggaatgtctatcactaaatattgtatcatgattattgttgtggctggagatttccctactgtgagtggtaggcggcacattccgagtggtgttatgctctggctggagaattcataaactagctacgtgcagggaactaaatcttttgaagatccattttctcataaatagtcttgaacaagattttagatgaggctctattgtcaat

SEQ ID NO: 238780 - DNA, 789 bp, Cannabis indica
gaaaaaaaggttggattagatcgaatgctcacccctagtttgtatgtttaacgtcaataaactgaatttaatgtagcttaaagctattaaataagtcattgtactacaattatacttgcaactcatggtcacataagcaaattatttagaaaaatgaagaaatcgtaacttgagggaatgtttgcaataatttgcatagttcagagggaattcttgcaactgagaaaaatttagggggcaaaactctacaaaggttataattcggggacaaaaatcctatttattcaaaataaaagcataaatagcactctaataataaattatgcaaatatgtatatacatttttagagataatttttgtatatttaatgttaatatattaaatttcaaatagcttatagttgttgaataaatattcgtactgcaattatactcgtaactcatggtcacataggtaaattaatttaaaaattgagtagattgtaactaaaaggaatattttcaacgatttgaacacttcaagagaaaattttgttacaaaacaaagttcaagaaataaaatctataaaagtcatagttcaagataaaaaagtatgtttattcttgtaagtatttaaaaactattaatcactcctaaaagcatttctaatggtgcatcattttacctaattagtgtggaatctttacattatttttactccaataacataccaaattatgcactaaattggtgtgcgccaaattatacaccattaagaccatctccatgttgcaagttattttaccagg

SEQ ID NO: 238781 - DNA, 885 bp, Cannabis indica
attatatagtatacatgttttgtccttttactgatgtgttttgacaattcggcgcggtatagtcacaactgggtatttcgggccgaaccgggttcagggctgaatataattttgggattaattattggcattttatttatgtgggaataatttgaaaattaattgagtttatttgtgtgtggtaagacatgctttctctttgagtgtatgtatgtatgtatgttatttggccttatgggcatttgggtaattttaggtatatgtgctattttgaatcaaaacaatttctagaaaatggaatagaaaattctagggttttctttcagccatagttgaaccccactctctctcttatctctatatttttaaatttgttaagtgttaaaaaattgatcttgaagcttggattcttggtgggtttttgagcttagcttggtgttgtgattgaggtagttcttaacccctttttcatgttgaatttgtagctaaaatagaagttgaaatttgtgttttgagctttgaaattcttgaattgcatgtttgtggaaattgggttgattttgatgttatgaacttgtggtgtcttaaactgttgatctttgctttgggtaagctttgagtgtgattaattgagtgatattttgtgtttataatatatgatttatagctttgaatttattttgcttgaagcttgagattttgacttggatgtgcaagtctttattgttggagttttatggattgagctcttgggttggagtttagtctagatgttgttaaatctaaactttgaggggtatatggtttgagtttgatgcatgttttatgtgttttgatgtcccattttagaacttgctaggttgtggtgtatgactttgaattata

SEQ ID NO: 238782 - DNA, 1133 bp, Cannabis indica
atatattaatacaaatgcaaaaaaatccagatctatatacacaatgtggcaacaaatgctaattgtcgcggccacaaacccaatcctctatccttggcaacaaatcctaaattgcctcagttcacatgcacagagagaaagaaacagtgagacaaaaaaaataaacccctaactgcagtgactggcgagctctatccgaaatgcccactgcatctgcgaacacacacaaaagtccaactctacatatatatatgtattatattatattataattaattttattcaaatttatattattaataaatctgagaaagtgagacaaaacaacacacataaaggagtttttttcaaaaaaaaaaaacacatagagggtacctgagatttttgagggtcgggattccaaatctttggtggatttggctggtcggtcaccgaagcagggccatctggcctgagtagaagctccacgggacggaaaataaagagggggaagagaagtgtggtgcggcctcgagaagatgagaaatcgggccttcgtcctgggcagcaagaagtcgacctgagaagagagattggggctttgaggactgaggagggagagatggtgttcctggtcgccggagaagaagctctgcttcgattgccaaaaagaaagagagagaggcgagaatgaaaaagaggcgagaatgagagaaatatatttaatgatgtgttagggttttttttatttaagcagtacatatactgccttttattttttattttatgttattgttttttaaagtaaagaatgagggagaggcgagaatgagagaaatattaatgatgtatattaggagttttttttttattttaagtagtagatatactgtctttttattttttttattttattgtttttttttaagaaagaatgagagagagacgagactgagagaaatattattaattaatttaattagggtttttttatcaagtagtacatatactgcctttttattttttatttattttattgctttttttagaaagaaactaccttattttttattttatttttgaaataaatactttattttctttaaatatttccttttattatttattttttattttttatttacatattaata

SEQ ID NO: 238783 - DNA, 1189 bp, Cannabis indica
atttccacgtgctttgttcattcatgatataccgggttttcactaatgtgaattgctgccgtgttgtcacaatataacaaagcaggtttggaatgagatatgccaaagtctttgaggatagcgatcacccaagtgagctcagaagcggcattagccatagctcgatattctgattcagcagaggatcgggaaaccgtttgttgtttctttgatttccatgatataagtgagctacctaagaagaggcaatagccagatatggagcgccttgtatcttgacaagtaccccaatcagcatccgagaagaaggataattggacattagatgcagataagcttgtctcggcatgagctgatattgtgggagttgtgttccaggggttgtctttaagtattgtaggatgcgatgtgcagcatggagatgagggacccgaggagtggttaaaaattggctcaaatgattgaccgcgtaagagatgtcgggtcttgttatagttaagtagatgagtttgccaatgaggcttctaaaaacagtgggatcgggtagaaggatccctttatcactacttagctttagattagtttccatgggtgtagagaccggtttggctcctatgtagcctgtgtccttgagtaattggactgtaaatggtctttgggagacagagatgccgcgttttgttctaccaatttcaaggccaaggaaaaaccgaatggttccaaggtctttgagtttgaatttgtcatggagataggttttgaagtgagagatagcaaagtcattattgctagcaacaatgatgtcatccacgtatatgaggatggcaagaaagaatgtgttggttctctttatgaataaagagttgtcagataaagattgtgtaaaaccatctgaaataagtgtgtggctgagtttactaaaccattgccttgatgcttgtttgaggccatagatgcttttgttgagtttgcacacggtgttaggaggtgctttgtaaccgggggggattttcatgtagacttcctcatgaagatcaccatggagaaaagcattattaatgtccaattggtggacattccaattgtgcattgcagaaagagctaagaagatcttgagggtgttgaattttgccacgggggcataggtgtcagaataatcaatgtcgtgcctttgagtgtagcctttggc

SEQ ID NO: 238784 - DNA, 2098 bp, Cannabis indica
agaggtagtatatatatatatatataactagtaacaataattgtaattttcttctttaaaaaaaaattggcaagaattaaagtaccaaaacagagattttgttgtagcaattctatacccattctttctttttctgtttcgtacgaagatatttcttccatatatatagttttttttaattgattggaaaataaaaaagctctaattcaaaatctataattatatatatatagttctttgaccaggttgggcggaggttggattggaagcgacggccttcagatcttgttcgtgggctacggaacttggactggtcggtgaactgctgctagaggttttcttcaaaactgtaagaacaatatgcaggtttttgttattatatttggtttttaaaatttctttgctattgaattcacttgtttttctgtttttgtgttgatttgttccccgaaaaaagaaattcgtgagaaaattgaggttgattttgaatagataggagaactgcttggtgctttaaggcgtttttgtttgacatttatagaaggagcgtagttacttttcatattatgtttattatggttgagagaaaagcttttaacaaacttgtgctgctttgggctatgctcggaatgtaggataaaggaaaataacattatatccttattttaatactttgctccataaatttatgtctagatgtttgccacaaaatttcattaccttttgtggaaatagaaaaagaatatgaaaattgcattttgtgttaagtttgatatttgttggtagtactagtatatggcgattttaaatatgttgctgcctctaatttgtaatatgatttttttttcttcaggttaatggggacacgttgtttatgacaggaagcttcaatgaatttaaggtagaagaccattcaaatgattcttgggatcaacataatgctatgactagcactgcggtatgtgtttctttattttttttattacctgagatgtttccttctttttttttttggctgaattacctgagatattttctgtgcacatcacaacttagtaagatcaataactaccgtatgtttgtttaataagaaagatcttgagcaggtggtagttgaggtcattttcttttccctttaattagaacaaatgcaagtgtcaagccattgttatcccaaatgtcatgtttttcaatcatttattgaattttatcaactttgttcagcataagttggcaaaattatttattggggtcttatataatgttattcaaaagaatgacagattttcttctctgcaaaaagatcctcttacattgatcaaattatactttttatatattccaggtaaagaagctgcaaagggttgttcctcttagtgcaagaaatttattggagatcgagtaaaggagttgcaccattcctgcagctcaaacattttagtgagtcgtcataaagaaaatatctcacaaggtaattaattaaagttatatttctgaaatcatgttagtgtagtttgtgagctatattgttgtctttgaagtcttaactagaaacttgcaaagtaattaacttgttatgaataaaactgatccaatgatttcaagacacaataactcatagtacaattatcaaacactttgcaatcacacttaattatcacactaagataattgaatacttgaatcattattgaaaaaattatgatcgatatgaattgaattaaggtgagaacaatctgtttattcgaaattctctaagaataatggaataagaacttagcataagtgatctgttagtatgccttatatatttggcttcatagcatacatatatagttgttattctgttaaataacttctcttcacagtattggagtactttattactagtcttaggtccatttctcttcttatataaatgatgtgatttcatatttaaaatttaaattatgtattggcttatataaattttcttaattgttgcagaaaattgctcaatctttcattataaagcatatggcgctacttagcgatacaattttaaatcgagattggataagcaaaaaggtacttcggataatatcaagagttatgaaag

SEQ ID NO: 238785 - DNA, 1490 bp, Cannabis indica
ataaaaatatttaataaaaaaaaatttcccttacaaataaaataaaatatgaaattttatataaataatcacatagaatttaatcatgtaaatactaaaacttatctattctcatctccattgctgacggtgacaacactacatttaatgtgttattattagaccaaattgaccttacaaaattaaaactagccatataataactttataaaaccaaaactagccatgttagccatacaaaactaaaactagtcatactaaccttacaaaattaaaactagtcatattggccttacaaaaccaaaactagccatactagccttacaaaaccaaaactagccatactggccttacaaaaccaaaaaactagccacgttggccgtacaaagaaaactagccacattagtcatacaaaaaaactagtcacattggccatacaaaaaactagccaaattggcacaaaaaattgagctatatttggcacaaaaagtagttttgtgacatttttacatcaacttttactattgtgctccaatgcataattttaaatcttgatataaaatttaatgtcatttaatatccacttaataatttaataaaaaaatataaaataatattaataatgcaaagataaatataaaatttaataataataatgtaagtcatttaatgtaaaagagcttgctaactaaaattaataataaaatattaaaaatggcataatggtaaatataaaaacatagtatttattgtgatgtaaattttgcatcatgctatgttgtgatctaaatttggatcactttttgttatgtgacatatttgcatcataattttgcacatcaatagaatagagttttaataaagtgagttatattttgcatttacatctccattggagatactcttagtgaacacaacttctacatctacaattatctacagggttggtcctgagagtaagtgagctaggcgtgcgcctcgggcctccaaacattcagggcctcgaaattgtgaaaaaaaaacaaatgttaactaataagaaaatataacaaataatatttgatgtagtggtaaagaatctaaaggtcaatgaatcaattcttaatttttacttttttattttttaagaatatttaatgtgtagctataaaagatttaacgctgaaactcttgagtttttaaaagttttactattacactaaaacactacaactataatcttaataataattaaactatatataattgtcaaaaatttaattttgccaccgatctgattatctatggagtgtggaaaatagtatataatcaaaatctcatgaaaaaatttaaatcaatctcttcccacattttttttttatttctcatattcatataaatcatgaggtaagaaaaatctcatatttattttatataaagtgtgcgtatataacagaattcttggtttatgagaaattcatggatcacttttttatttatgtataataaaa

SEQ ID NO: 238786 - DNA, 683 bp, Cannabis indica
atttttttaattttcttaaaaaaattagatgcatacatgagtcttagatgtgtaagtttatataatcaactaggattgttggacacaaggaaaagatcaacttggtccgagagttaaaatagtgggaacaaacaataagaaaaaaattgatatatcactactaccaaaagagttttttacgtcagtttttaacttacatataaagaatttgcttcagttagtgtaaccgatgctatagccgtaaacacaaatactaaaattttttgctttggttatgaattgaaactattttttttttcttttctttggttatgaaaaaaaagcttttgcttctgttcataactgaagcatataatagtgtaccgacaccaattaattttttttcttcgatttaaaagaaatttttaaaaaattattaaaaaaatttgaaccaccgcaccaccattcaaacccagaatacacagatttaaactaatgcaccacacctaactcgttattaccaccctaaacttgaaaaaaaaaattctatctattgaaattatacaaaatgaaatataatcacaggtctgttcagaaaaaatcatcatcaaaactataaaaaatctgatccgacaatcggttcttaaaaaacccaacaagagagagagagagagagagagagagagagagagagagagcgagcg

SEQ ID NO: 238787 - DNA, 947 bp, Cannabis indica
catttaaaagttatttgacatagttttctttttttctttaatacagatttatgactttgaccgagatcacaaggatgttggagttgctcttttcaccactaaatattttgttgtccgaaactgcctgcccaacgcaaagttagatatgcttttatcagcatggaatcctccttcagagtggggaaagtatgaacatttttcataaccaatactcaaaaatggtgccaataactattttcaattgatcagttattctacatctttttctttctgtttctttattcctttcttttgtcttgattctttctttgaagcaatcagagtgtagatattttgcataaaaaaaaaggtgtaaattagaaattcttttgaaattatgtgctgttaaatttcattatctgttttagttctttcattatctgtttttgttagattcttttattatcaaagatctatgatgtacttactgtatatatttttatttttccacttttaaaaacagaaaactgattaaaaagtgttaccaaacgacaccatagcataagaaaaaataggcacagaaacgaatagccacttaaatctatggttagtctttacctttatccaataatgagccacttagattatggttagtcttttctttctaaaacctttttttaataggcttaagattttatttaatatttttttcttctattttaagatcgcacattttctttaattttcgttacataatatttgcttaaaattttgcaaaatacatatattgttcctctaaattctctataagtagataaaaaatattattttcatatattgttatgacttatatatacacaattatattttactaaccaaatataataacacaaatattatttgaagaaaacaaatcattcacataatcatacttagttacagaaatgaaagaaaaataaagaactaaa

SEQ ID NO: 238788 - DNA, 924 bp, Cannabis indica
cccttcctctctctctctctctccgaagcagccttggaccaaggaggttgttgctggattttgtgttttcagcaaggttttagagggaatcaagcaaaggtaaaaccctagaacctttatttaagtgttcttgaagctttaattaagtttgagtttatgtttttatgttttgatggatgttagggttaggatttttatctttgttttctaagtttgatttgagttagaatgatgatctagcttctagttttgagctttggtgatgatattgctcaagtttgagctttgaagttaaagctttgatctttaatggcataaattgagttattgtatttttctgcaaaatactggctggaatatgttgtttatgcattgtttatgtgttcttgaaggtttggttgcattttgtggaagattgagcaagaaatgaaaagtttggggtgaactggtgcaaatcggctagccggttttaccagtacctctaaaaccggctagccggttttggaagggtccccaaacgcttcattttctcgattctcgtccattttagtgccgtagctgggtgtttccctatttccagagttagagtaatccctagagagtataacagaacctagggttgtgggttcaggtttctcgaattagagtttcgatcatgtgatttacccggttttattatgtgattagggcatccatctagtgcgagactttccgttcaagttggacaacacacttgaatctggaaagaaggtaagagctgtatataatatgtgatatcagtatctgagtgtatgtatatgttatgtgtatatgcatgcttaaaatgttagttgcactaccaacacttgtacagttaaggtatagagtgcattggtatagtgattattatttgagagtacattacagtgataccagtacaagtac

SEQ ID NO: 238789 - DNA, 1075 bp, Cannabis indica
tacattctcgtggttttaggtaattcaatcaaaaagtttatagtgacaacctcccacttccactccagaagtgtcagtggctgcaatgagtcagccggttttggatgttcagccttgatttgtggacaagttaagcaccggaatacaaattccaccacatctttcttcattcggcaccaccaatagtggggtcttagatcttggtacatcttggtagtgccaaaatgcagttaatatggagtggtatgagcttcctcaagaatctcatttctagttccgcactacctggaacacaaaccccagtcgtgtacaacagaatcccattatctgacaccgtaaaatgtttagcttgaccaataaaaacctcttctcaaatcttcactaattccagatcatttaactgaggagctttaattcgttccaacagatcagattacaatgtaaaactatgaagttttcctacaattaactcaattcctgatctgaccatgtcatttgctagctgaggtgaaattttaatcatactagttacctgcctgggaccctcatgctcagggcattagccactacattggccttcccatgatggtaaaggattgcacagttgtaatccttaaccaactccaaccaatgcctctgtcccatatttaaatcttcctgggtaaagaattatttaaggttcttggttggtgtaaatctcacatttttctccgtagagataatgcctccaaatcttcaaagaaaacactaccgctacaagttctaaatcgtgagttgggtatcactgttcataatcctttaactaacgggaggcataagcgatgacccgatcaacttacactagaaaatacacctcagaccctatcgggatgcatcgtagtaaactacgaacttctctttatcagatggtagggaaaataccaaagctgtaatcaatctctgttttaactcccgaaaactcactactccaaatataagaatttgggacggtcctaaaaataattttttttcagggactgttgctaaaaaaaattaagtaactatttaaatctgtcggaaaaaatttagtattccc

SEQ ID NO: 238790 - DNA, 929 bp, Cannabis indica
cactatcaagtatatattaaaaatttattcgtatcctcaagaacatgcttacattgagcatctatcaagtaaccattgaacttatgaatttttaggagccaaaagtataaaaaacctaaaaaaataaaaaaaaaaattcaaatgcaattcttttgcaaaaaattcaacacaacatacaaacaaaggcacatatctgttcaaaataaaacaccattaaacatgtaaacactaacaccaatgaataaatattagagaaagttatattctcatgaaattttttctccaagtagccaaaaatgataaaatggtgatgagagtgggtgctaatcaaaggtcgactatcgttaatggtagttcaatgtgggtttggaatagaaagaggtaagagaagaaaagagaaccaagataaagagagattgagaaaattaggagaatttaaaatgagagcggtattttagaaaaaaataagaaaggttaacgtaagtaattatgtaatgatgtttaactaaattaataaggtccaacaataggttaattttatagtctggttctctttgaagcataatacttaaaattttgaattaataaaaagtagaataatttgctgcataaattaactttcagttgcaaataaatacccgcgataaaattattaagttatatttttaaaactaagttggtacatggctgttaaatataagtaattatccacgtgttattttttttattgatatatataaattatttttttaaaaaaataaataaaatttcatgatgtaaatcaattaaagattgtcacgtggtaatttatttaatatttaacaattaagtacctacgaaattctaaaaatataacttaattattattgaccaatcaaaaattgtcatgtgataatttactccaccaagtataccaaaacaacatttca

SEQ ID NO: 238791 - DNA, 786 bp, Cannabis indica
agaatcagagatgcatatgtttaaaagagtgcccctttgtccaccccaacgatttggtggcagttttgctagctataaatcaatttgctttggaaacagggattttgacttggcctgtgtttcgagaaaagtgtttgaagatgtgatggagttcactagaattcgggataaaccaggtggccacagatgctcttgatggatcctccgctcttttagatggaagcgcttgttccgctctcgttcattaatgtcccttgtattgtatgtttctttgtttacttgattgattctaaattatttattacaaaaggcttttatagacttggttcaagagcagattagctcaagaagattgaagcacaaacagttcaggaataagtgagaggttatgagggttgtaaaagagtgtcttgtgtgtttgatcaagaactctcatgtgagatatgatgtaaaggaaacttttgattctgtgtacctcaaattactatcacaagagcaagagcatcagaaaagaaaacaaagtggtgcattattggttgttttagattttgcatctgtaagaataactatatacgttaagttcccttctccatcttcttggataaagtttacaacttgtatttactttttaactttttacatgcagtaaggcatttatacacttggttcaagagcggattagatcaagaagattgaggcacaaacagatcaggaatcagtgagagtttatgaggattgtaaaagagtgtcttgtgtgtttgatcaagagctctcatgtgagatatg

SEQ ID NO: 238792 - DNA, 730 bp, Cannabis indica
gttttctagctaatactgattcttttaaaattaattcatgttttctgtagattttgaattatgctgaaagtgtttgctagaattcttttaattcatatgatattgggaaaattttgtttcttgtagtgagttaagaatctgtaatagttatcattgactttggagcgataaattattgttatggattcgattcggttgctttccatggcaaaggtacttgtaatacgataatagggtgtcgttggattggataggtttgtttgtgtaagagagatgagttcattggtgtcacatttttatggaaacaacagtaactacgtattaaatttgtatgttagtgtgataaattcgtatacaattggtggtggtactgtgcacactatgttattgtggtgtcctaggtacaataacaatgatatgtcactactatctatggtagatcatacttaaaaatctgtaaggactctcaatatttgtagtgatgttcatctaacttcaaattaaggatagcagtaataagtaccaaactgcactagttactccagtgataagaagtactgtttcatgagtcaaaagatatctaaatttgaatatgtcccttgtaatagcagcaaaaatcttgtcaaaatccattagtcactatgatacatacaattttctagtgcagagtgtagcccgtaaatcaaccaaaaatattagaaagaaaaaaaaataaaaagagggttgttgc

SEQ ID NO: 238793 - DNA, 1933 bp, Cannabis indica
gaaagaggtggctgcttcaacttccggccaagcttttgaccatgctgctgatgcttctcctgctcgaacaacagatcctcctactccagtcggctcagaagaacaaaacccagagcccgggactccagccgtttgatcattgatctttttatctctcctgtctatatacactactacaatttcgccttttagtgacactcttcagtgactcgctcaaaagtgcgtgtcactatagagttaggagtgttttttagtgacccacataatgagactctaaatttttaatgttagtctcatgtaatgtgtgtcactaaaactataaggggtcacttaattgttttttttttttttaaaaaatattgctgacctatagagtcatgccggagggactgcaaaagcgtgtcccgacatgcctggcgtgtcactatatcataataatatatttaattattaaataatttaatattaagatatagtgacgcgctaggcgtgttgggactagtgtacccagtcatgccttgcacgtcactatatgttaataaaaaatgcagagtattagttatttaatttattaatttctttaattttttttttttttaaaaaaagctttaattttatttatttaactaaataaataaatgggatataaaaatgatagtatgaaaccctaaagccccaaacctaaccctccactctcaatcgatactctctctctctctctgcgctctacccaccccgacggcagacttcaccagaaaaaattttgccgtccaaaatttggtgtgtatggaggtctgaatggtgccaacatgttcttcttccttaagcatatggtttgaaatgaaggtctgaatggtgccaatacaaaacacaagctcttgaaagggtttcatcgtgatcgtcatcatcgaaccactaacgtcgtcgtcatcatcatcatatggtttcctccttgttttgctttctaattcaaggtctctcactcactcactaactctatctcgactgctagatttcttgtcagattctttctctgtgattttgattagtaaacacatgggaatctttgtttgcaactttggctcgttccttattctgggtttttgttggtagttaacaagataaaattaaattctgcttggaatttgaaaccagaatctttggaattctttgattctaagctctaactagtgattgtcttgttaatattgggctttctcatacattttcccaagttgatgttttttggtgtggatggataagatagcatttttattatagtgaatttgggggggtggtatttcttctttttcttcttcttcaaagatttgatttttattttttctttcttcttctcttaattgtgttgaagcaggcatttctctatatatttgatagtgggtctccctctctctctctctcacgcacaagcacccgcgggtttccacatcgaaattggcactgtgacttgtttaacttgtgctggttactgctgtgcatgagtttgcttcttcatgtatttgggtttggttttagggttggtcatcttctttgggcaatatgttcctggattatatatgtgatttttagaaatatattttgtaactaggtttgagttgtaattttaattttatttcttattttctgggtttgaagtgttgatatcaagtgttattttggttgggttcatacatttagattctttgtatgaagaaagattagtaatggtaaaaaagttgttcatttgtaaactctggtgattttggcaaaatgattaatacaaaatattgtttaattaattaaaattattattgttatattttattgtatttgtatataattaatataaattattatttataatatataaaagttatattaaaataattaaatattattttttttagaaaaatatttaatatagtggcacttt

SEQ ID NO: 238794 - DNA, 865 bp, Cannabis indica
ataacttgccctttttcccgaaaatttaaccctttacattggaggtactcgtaggaagacatgatcgtcatacctgaaattactatttttctgcattttggatctgcataacttttttgcctgctctgagaggtaagtattctagccttgatcttctctatagcctaattggaccgttgaactaattcctagacctgggtatttcctttctctggtctcatcctaatgaactggagatctacatttcttaccacacaatatctcatagggagtcatccctattatactttgataactattgttgtataaaaactctattagtggcaaatacttactccaggagccttcaaaacccattaacaggctcgtaatatatcctctaatatctaaattttcctcttagactgattatctgtgtgaggatggaaagatgtactgaacttcagctttatacccatggctcgttaaagactttcccaaaatatagaggtgaacttcagatccctatctgaaataatggacttcgaagcccgatgaagtcgtactattttttttactataaagatctgcatattgatctactgaatatcctgttttcagtggcagaaagtgtgccgacttgctaaattgatccacaactacccatatagaattaagcatgcccgtggttgtgggaaatccaaccacaaaatctatagtgacatcctcctacttccactctgaaagtgtcataggctacaataaccttgcaagtctttgatgggggggttccaccttaatctgctgactagtcaagcatctagtcacatattctaccacatctttttcatactgcagtaccaatagtaaggttttaaatcttact

SEQ ID NO: 238795 - DNA, 1661 bp, Cannabis indica
tctattattaatagcatgcacctagttcattagcaataataatattatcaaaaataacacgacctgaaataaaagcactttggaaaggagaaatgatcttatctaaaatccttttaagcctattagatataatcttagatataactttataaaaagtggtacaaagactaataggtctaaaatcacctaacttattagcatgttgttttttaggtattaagacaataagagtagaatttattttagaaaaatgaatatctttattaagacagtctaaaatagcacttgtaaaatctctacctagaacaacccaattcttttggtaaaaataagcattaaaaccatctaatcccactgccttatccccagacaattgaaaaacagcctttttaacctcttctgcagtaaaatcctgctcaagaaactccacatcaggaatttccaacccaggacccaaagcatcaaaaattgcagcagcagcatcaacattacaaccctgagtactaaaaaggtcagaaaaatgagagataactaagttagctatcccctcttgactattaaccacattaccctcattatctttaagatactttatagcattagtcttcttcctaatagtggcctgcttatggaaaaatttagtgtttttatctccagcattaagccacctcaccctagccctttgtttcgaatagacttcttctttatagagaagagcatccaacattgaattcaatttattcagatgaagtctatcagcctgagtaaggacatcttgattttgaaaattctctatttcctgagttaattgctgaattctagatttaaaaagatgattatgagtcttattccaatcttttaaatggttaacacaatgggcttgtttatctaaaaaataactaaagtgattggaaggtgaattatgagttagaaaatcatgccatttattctgcataaggtgatagaaatcagggtcctctaaccaactattttcaaaacggaacctcctattaacaaattaataggcctactagcatcatttgcaagaagaagttttaaagcacgatgatcacactcataataacctaaatgatgaagactattttcagggaaaagatcacaccaagactcagaagctactgcccaatctaaacgttcacttatagttttattagtccaagtatatttacaacccacataaggaagaggaaacatagaaaatttattgataaaatctgagaaaatagacataacaacctgatcagaggcctgacccccaagcttatcagtactaaaaagatagctattaaaatcccccattattaaccaaggcaaatgagaagcattataataaatatcatgtaaaagtttccaagtaaaatgtttctgagaatgaacaagagaaccataaaaacaagtgaaatgccataattcattagtattaaaacagacagtacaatctatatgattagaggaatagtttaaaatatttacagaaatatcagccttccacaacaaaagtaaaccccctccaaaatactgcctagagatttcaagaccaaaatcaaaacctaacaaagctttaaacctatctaccaaattcggtttaagcctagtttccatcaaaaaaataagaacaggtttgtgagacttgatcatgt

SEQ ID NO: 238796 - DNA, 836 bp, Cannabis indica
gacaaatcatcttaatgatttaaaacgtgtctttgacaggctcagtcaacacaatctcaagatgaatccattaaaatgtgcgtttggggtaacatcgggaaagttcctcgggtttatcgtcagacatcgagaaattgaaattgaccctgcaaaaatcaaagtaattttggaaatgcatcccccgcgtaatttacgtcaactatgtggactacagggaagacttacgtatatccgaagattcatctcaaacctgtccagaagatgttaacccttttcgcggttgatgcaaaaaaatgtcccatttatttgggatgaggcatgccaaaacaattttgaaagcatcaagaagtacttgttgcacccaccagtgttgagagctccaatcttagaaaagtcattgatattatatatcacttcacttgatcattccttgggagccatgctggcgcaaaacaatgaagaaggaaaagaagttgctttttactatctaagtagaactttagtaggggcagaacaaaactaccctccaatcaagaaattgtgtctggctttaatttttgccgtcacaaaactacggcattatttgctctcccaccctgtgaatttagtgtcaaaagctgatcctttatggtatatcctatccaagtccgtgttttctggatgactttccaaatggtccatgattttgttagaatttgaaatcaactttgtcctgcaaaaagcaataaaaggacaagctttggctgactttttcgcagcacgcccaattccaaatgatatggagttgtgagaagatcttccagacgaagaagtttcacagttgatacttcatcgtg

SEQ ID NO: 238797 - DNA, 1226 bp, Cannabis indica
atattttggttttgaaagatacgcttggatgataaatacttaagaaaaaataataaaataattaaaaagttgaagaaataaaaaattaaaaataataatttaataaattatatatatatacactttgtattttttaagtgttcattgtacataacttatattattatttaaaatatatatttatctatatatttaggttattaaagaaaaaaaattatcactcaaatatataataataattaaaaaataattggaaagacctcaaacatcatacccagcacttggttcaacattggtaagaaaaacattgatggtgtttatgcttttggcttggatggaacgatatgaataggagagcagtagtgccaatttgtctccggaataaacttaattcaatataaaatcttagcaactcaaccattataaaattatgcccactaattagtaagaaatatatgaaatacatgagtaagataatttaaatataaagtgatacatgcacacactataccaaaaaatacattcgtaattgattaaacactcacatatttctataaaaattgaaagtttaagagatgataaaaaatatatagaaaccattacaaaaatatttgttgcagcaaaacctcaaagaaatcaatattagagatgatattatgattatatattatttgtgtagtgataagttgtgattatatattatgattatatattagagtgatattatgattatatattatttgttgcagcaaaacctcaagtaaatatcttatgtacgcgtgtcacacacaagtctaccgacacccatgtgcactggtgatcacccgaatgtcacctagttgtcactagtggatcactaagaatcacccgtgtatacaggggtggaggtagtttagggggtggtgtggccatggccccctcaagattttataccatgtgtaatatatgtagtatagctaaattatatatacctatttgcatataaatgtgtaatataagtatttgtatatacaaaataataaagttataagtgaaaaaaatatttaaattttatttttgacactatagtttagaattttttaaaatttatcggtgattttaaataactacaacggtacacaatcatgaaataaaatgtactgaagaattttgttaaatctcaaaacagatagagcatgccagaacgacaattttataagctgtattatacatgaatatatatatat

SEQ ID NO: 238798 - DNA, 662 bp, Cannabis indica
atccatttaagccctcttcaactgtgtagtcccatacctacacagtctcagaagcatcccactcgaccttcctcaggtggtgtgggattgcacagcttacccggtatttccccttacggatcacgagactactgactgtcacacttacttttagtcataacgaaacttgtgactaaagataaaaaagttgtggctaattataaattatcattattgtgttgtgactaaaagatccatagctaaaagtattagtcacaaaaaattacgatttgttgtgactaaatgtgtttttagtcacaatattcacaatatttattgtgactaaaactaaattagtgacaagtacttgtgacttaatactatgttttagtcacaagtaacctttcgttgtgactaaaagtcacatttaatcataaaaaatttatgttgtcactaaaagtaggagttttttgtagtgtatgatttataaagaaaataatatataaattaatcaaaaatgttatatttttaaattttaagtttttaattaactaatattattttattttttaaattattaaatattttattaatatataactaaaacaaaagtaatagaatcatttactttattttattttttatttattggagctctaccaataagtttgcaattggtaatt

SEQ ID NO: 238799 - DNA, 554 bp, Cannabis indica
tattcacgtaatagtttaggtatgtgtttgtgataaattgtaatttctaatattgtcaaaggtatttctaattgtgatgaagaatagaacctaggttaaatgaattatatggtttcgtaatttattgtctagattagtctatctctattgaacttaaagttttatccaagttaaataaattacatgcttcgtgaatttactacttaggtagaagagttaattattgagcgttttgccttgattacttacaatagagagattgagatcattgactgcttcagagttatctgcgagattaatagctcgattagaaatctaaaataacatccattattagaaattaaagatgatttttgagagtggagattaacttttaactatttcttgaatatcatagtatctcattctatttgctttgtaatttttgttatttaatcttcataattccattttcaattcttattactaattttttgaataataaatcgataatatccttctgagatcgatctatatttactgtaatactggagtaattggtaatatagaaataa

SEQ ID NO: 238800 - DNA, 1143 bp, Cannabis indica
aatcttaccttaattccgaatttcaggtgtgttcggtccaacctgagttggaacaactgctcggagaattacaggcccctaaatcacatcgatcacaacatggataagtgacacgctaaatcacaacatgggacttaggtaataaactgaaaaaacctatctactgtaacctaacatggcaataccctaaactagcagggaattgaccaaccaaagctctaaaactaacacgaatttttcggggaacccagcagaaaattcgggtaaccggttttacaggtcctgtaaaactgggttgccggtttacaccagaaaaacccaaaaaattccaaaaccttaccaaattgattccaatccttaccaaaccttccacacctgcatattatatcccaatagacatattccaagcaataaataaactacagaaactcaaaatcaattttcaccattaaagagccaagcttgagttctaaaactcaaagcttgctcaaaaatctaataacagcccacaaaacaggcttaattcagcatatctaaacttatttttacttcagaaacaaaaataaaatacccacagcaacaacagtagcaaaaaccacaaaacatgcaaaatccataacttgaaactcaggaaaactaatgagggagttgcttagagacttaccttagcttggattcacttaaagctgctagatattgacaagaattgcaaagaaaagctagaaccctagcttggattcacttaattgttttcagtctcgaccaatccttgatgcattttatcttctctggatccaccttgatcccggatttgctaacaatgttcccaaggaaggacacctgagatagccaaaattcgcacttcttgaatttggcatacaacttatgttctcgaagcctatgctaaaaccatccggagatgttgctcatcctcctcttctgattgagagtacacaaggatatcgttgataaacacgataacatagatatcgagaaaatccttgaatactctattcatcaaatccataaaagttacgggagcattggttagtccaaaagacacaaccaaaaattctcgtctcgaaatgtcctcctctcggattctcaactgatgatagcccgatcagagatcaatctttgaaa

SEQ ID NO: 238801 - DNA, 645 bp, Cannabis indica
ctggagtttccaaacaatccaacctaagtataataaaaaaaatacatcaatactacatattgtaaaatatttatcctggtacattttctttattttctaaattttctaatggtgaatttgttcatattaaatcacgaagagacatgtagatagagttacgtacgtgaaaacaatgttgtgatttttaatgtttcataacagttgtattacagttgcataaacattttgctaatagttatttctccacatattactattaaggtacaagtaattatcgattagtgacaaaaaaaatactgacaaatattatcttacagatacacattcacatttaacatttttagttgcaattaagtcgcaccttagttaaataatagttttgctactacaatatcatagtattataaaaataggggttagattgtcaaatatgcgaccaaaataaataaaaacgaattgttgtaatattggtttgtattaaatatgaggaattattagctgttttttaagttttatgttagttggctcgcaacagatataaatgttgtattacagctgtcttgaagttaacttcttcttccctttttggccgttcgaagttgattttttttttaaggtcaagacaccttcaacttcttcttcact

SEQ ID NO: 238802 - DNA, 1640 bp, Cannabis indica
aaacatagaaatcatgctctgaattcaatttaaacctacagccccaaaatcacaaaaaccttaacctaaaatcatcttaaaacttagaacaaagcatttaatttaccttagttgcttctaggttgggcttaggttcaattatctgctccaacaaaagaaagaatggtgaaagatttatccttatgctcactggttcaagcttctacgaagggaagaagaaaataggttttttggtgccttatttcataagtttttggtatatatccttaaaagaaaataaactaatatttaatcaatttatttagttaaccttcagcctaatagtcactacaagacaaataaactaaacccttaaaagaccataatacccttttcctaaagctttaaactattcaaaaattataggggcattttagtaattctagctaatccgtcaaaccgacattctaaaattctaaactagtctagaatattttccaaaataatccatccattaattttgtgacatttctgaccacatcattaaatttccacagttttcgggcctgaaaatatttttatttcaaaaatggtatcttcgatacccacttatcccaatataatctccgtaattaataaattacgcttgatataatcatttaataaatccttactaattatcctaagtaagatcataatcttactccattaccaaaataattacatatttaataaaacatgtccttaaatactatattaatttctggaatattacacaaatgttgccaactaaaccaacttatcccacaattttgagtaaaaatttaaccccaccaaaatttactcatcataccttccaatttcttacaagtatcaactggcaacaaaaataccgacatatcatacgtaggaagagcctgagcagcagttttcaataaaacctccttacatgccttaaacaaaaatttgccttcctagctttgtattcttgtctgcatcttatccttaagaaagcaaagaataacattttaattgtagcccattgtgcaaggaaggccaaggtaaagactattagcacgagcttccaccatgcgtaaaatcccacacattaaatctttagtggactgagaagtattcattctaaagaaaatggtagatttagaaacattaatacactgtctcgaagcagactcatatgtctgcaacaaccgaatcacattccttgcttcacgttctgtagcattacaataaatatagctataatctgcaaaaagtatattagcaataacagaagtaccattataaactcggcaaccatgcagatcaccccttaaaataaatttcttaatcagagagaaaaaccttcaccacatatatgagataaatagggtgagagggaatgaccttgacgaataccacgcccagggacaaaagggcccaattcacgacccccgtgaatgatcatgaaactaaccgtaaaaataaaatgcaacatcaattcaactatctgaatatggaaccccatgttaattaaaaaagctcgtaaatacttccaatcaactcagtcacaagctttactcataccaagtttcagagaaatatagccttccttaccaacatgcttcctttttaactaatgtaacctttaagaaaatcataat

SEQ ID NO: 238803 - DNA, 1550 bp, Cannabis indica
ttgacattatagaaaaagagtgagctgaagctatattgtgggttcaacattgagagcttgagtgggatcttgaaaagagagatgattaagaatgtttttttttttttgagaatttctcaattattgtcagagtcggctctaaggttagtcatcaagcaatttgtgcgtcttaagcccctaacactcagagtttgaaattgagaaaaaaattaattttggtatcaccaaaataattatttagtgtagtgataaaacaattctcaatcacataccttaagaccagcagttgttttcacattttatcgtagaaattgtgtttttaatcaaaaccattgtagaattaatcaacattttgttaatttggtgctcaattttgttagttttttttttacagctttcattattttcacttgatattttgatctttattgaatcttgatgatgtgataatgcaatattttatgtacacaaatcattactcttaaataataatgtcactagctcttattttacacactacattttgtgtgcagataatagtaaacgctggaaatggttcaggagggttcttcacatgggatgtactagacaaactcggcgcagacaccttcggctcgctccacctaaacccggacggaatgtttcctaaccacattcccaacccggaggacaaaatcgccatggccatgacaagagccgcagtgttgaacaacaccgcggacttaggaatagtgtttgacacggatgtggaccgcagcggtgtggtggacaacaagggtaatccaataaatggtgacaagctcattgctctcatgtcggccattgtgctgagagagcaccctggcacgactattgtgaccgatgctcgtacgagcatggcacttactagattcatcaccgctagaggtggtcaccattgcttgtaccgagttggttataggaatgttattgataagggtgtgcatctcaatgaagatggcattgaaactcatctaatgatggaaacatctggccatggtgctcttaaagagaattattttcttgatgatggtaagtatagctttttctctttttacttatttttagtatatgttagggttaggctgtttagattttgtgcatttgagatgttattttgaacctaattaaaatttggattatgtaatggaatctctaactacaaaactagtgagttataaagaggttgataaatttattttcgaatatttggacctttattaccttgacctcatgacattgtggttatttttatgtgttaattatatattaggagcttacatggtggtaaagattatcattgaaatggtacggatgaagcttgaggatcagaagaaggtattggtagcctcataaaagatcttgaagaaccattggaatccattgagcttagaatgaacataatctcacaacctaaagatgcaaaggcaaaaggcattgaagccattgaaacattcagacaattcattgaggtaaatattaataagtagttataagagctttttaatagatgagcaatttacacttgttct

SEQ ID NO: 238804 - DNA, 746 bp, Cannabis indica
atgtatgtgccatagaaacaataggaatacaaaatgaggtcgaggtagttttcagcagtgcatgaagatgatccagttgttccttagtgaatgaactggtttcaacctcattagccgttggaaggttagtttccatgaattttccaataagtctcacaggtatgacaaggtttattgtagaagtcacaccacacccaaggcttctcattagatttgggtgaataattggtgtttctgccataaccttctcccatagtagccaaagatgagccttccacaatagttccaagaaccttttttcctaacatcacactccttcgagactcctctaatctgacctccaagaaaacctcaccaataggaggtaaaggatttcgaccaattattctccccttcacctcatcaaactctatattgagtccagccaagaacttataaatttgagtcttctcaatagttcttttgtggtgttttccatcttcaattaattgccattcatatgtgtcaaagagatcaaggtcctgccaaatcctttttacagaattaaaatattttgtaatagagtcttccccttgtcgtatctcacgaagtgtgagattcaactcaaacaattaagattggctctccaaatcagaatacatcgaaacaacaatctccaaagaaccttctgtaaggtagcacatatagttagactgatctcctcctccatggaattcacaaaccacgtcatcactaattaattctca

SEQ ID NO: 238805 - DNA, 1004 bp, Cannabis indica
tttgaataaataaaaaaataacataataccgatcttatttcagctaacataaaccaaaataaatcaattaatcacttaatactaagtccactaaaggacaaaagcttatgaggcaaaatgactattttgcccctcccacactaaaaggattaaaaaggcacttaagggtacttttgggaaatcctaaattcccgaccaatcatgacattctccatgtctaacaataccatcctgctatactaaaatactaagatgtgattctactgagccctacaccgcgttccaatattgctgggcactgaacatgcaaaaatatgaaatttctttatatgacatataaaatgcattctgaattcaaataaattatcatcaataattaataaataattttcataattaaaccctaattatctgctaatttccaaatttaaattaagcggtctttacaccttgtcactccatttcaaattggtgcatctttagtcgaaaataaccattttctcaatgtttgtaggattttggcctagaaacaaggggttttttttgtagatatttaattatttataattttttattcattactaagaatgatatgtgggatttgttagtgagacaccccgacatgtggggatcactaacaaaccctacaacctatataataagagtaaaaggctgaagtgaggggaccttcttttggatttacttgacggctaccaagtacaccatatcccttgctttatctttttacttgagtccaccatactttgtcgacaccaagacctcaaacatcattaatatacatccctttttctacttttatttgtttattattctcgagaaccttacaaccactatatttttgagatttgtgaatattgagtctgttgggttttgtgccctaaataaaacccatttcaatataatcaagatttattaattaataaagatcagaaatcgcattttatgctgcatggttcacatgatttatttcatgattatgttaa

SEQ ID NO: 238806 - DNA, 1084 bp, Cannabis indica
gatctatctaccattgttgttatcgttgcttagttactgaactacttaaataaaaactaactagaacttaataaaaaactaaatattacgtggctcgccacgtaactctcatctagtatatatatatatatatatatatatatatttagataaagtgacttctaattaaaaataataaaatagaacagaaataatttttataaccattcattatttggttgtattttaaaatattaaaatattatggtggcttttagttaaatagaatagaaagaaaataatttttatttaattatattttaaagtattggaatataattccaataaaatagtctttgtactattttagcagaatgactattttattttgaattggaaggaaaaatactattttaatgcaagatacaaaaaaaataataattttttatcaaatttttatatgcattttaaattttattttattcaattattattcatattctcattcttattcttatgctttcatacaatcaccctcgttcttagctctgaaagctattgtttaataaaactaagagcatctctaaggattcatcgaatttagtgttacactattattaaatttagtttcaaaaaatatgtccactctaactacaacatcaaaaataacctaaaagaaaatttcttattattatattaattttttaataaaataaaagaataatatcatattaattaacaaaaatcactacaattgttaaatttagctaataatatattttcggcgtgttaaatttttttacttttttctaaattttataggatatcttacataaccataatgtacacgatcataaaagaaaattgactaaaaaagtctctcgaatgtcgaaataggtaggagtatatcaatgtgtcacttttaaataggtgtattattttcgatgtgttaattttgtctgagtttctcaaaatttcacaggatgtcttaaataactataatatacacacctatataaaaaaaataaattaaaaaagtactgtcgggtgccgaaacaaatagaagtacattcgtacataacttttagaaaggcgacaattgtaa

SEQ ID NO: 238807 - DNA, 862 bp, Cannabis indica
taaatacgtctgtaaattatatttttatatttattttgttgggattttcttttttttttttttgagagaaaagctattagtattaatgaacaagttcatttacaataatagcttcaatggggcttggacaaacaaccctccaaacaatatcactatccacccgtaaggcatatctagctagaccatgagcagtagagttgacactccgatgaacataactaatagagataccgaggaaagaagacatctgatagataatatcattaactaagtcattgaatcgccataatgatgttgaggattattaatattttgagagtcagtgagagcatcactttcaatgagatgaattgggcagctaatgtgcttcaactaattaaggcagtaggagatggcttttgcttctatctatttgacagtaagattctccttaattggcaaagaaattgcagcaataacttgaccatacgagttgcgaacaacaccaccaattcccatcatttgattattaacatccaaagtagcatcaatattgagtttatacataccgtgagggggggggggaggctaccatggttgatctttgatttgtgagttatgatgggtctttgtaggagtgttagcttgacgatattcataaagataagccatggccttgtctaattagatcgaatgtggaagagcatgggagtgatgtatagtcttattccaatcataccaaataaaccacattagatttagaatggtgtccaattgatcatcatcagtgcaggagaaaagcaagtggagaaaatcactgctactagagttggataaactagaaaatccatggcaaagggtagtttataccagagatttttca

SEQ ID NO: 238808 - DNA, 882 bp, Cannabis indica
tttatgtacgtggagcataattataacccataatttcgggaaaatatcattgtgggatacgaatttgaatgtaattaactgccaacctatgttattataaataggggcagaatgtacaaaaaaagggatgaaaattccttgagagaaaaagaatacactgagaaaaatgaaccctagttctgtatcataaaagtctaaataagattgactcgtggactatgcagagttaactgtaaaaccacgtaaaaaacctagtgttatattttcttcttttattttctataatttttgtgcttaacctatcacaaaattaggctcattatcattaacgaaaatctgcgttaacaatactcctttcaaaaggtaagagaccttcataaaagtattgaattaagtgttgttcactggtgatgagggcaactagcacacaacctcttaaatcgttcctaatattcatagagtgactctcctgtaacttgtcgaattccacaaatttcttttctgatgcttccaactttaaaggctaaaaagtatcactccaagaaaacagtcttcatgtcatttcatgtctccatagttacaggtggtagatagtacaaccactccttagcagcatctttcaaggagaaaggaaaagccaacaacttgatttgttcttcggttactgatgtaggtttcatacaagagcaaacaatgtgaaactcctttagatgcttgttgggatcttcaccagacaatccatgaaaagttggtagcaagtggatgaggccggattgttgagatctaaaggtggataattgatgcacagtggttgttggtcaagatttggcgtggtcaactccttcaacgtcctattttgagccatcgtcttgtgagaagtaa

SEQ ID NO: 238809 - DNA, 1907 bp, Cannabis indica
gtaaagagtatttgaagagtttttagatttaatgattttaaaacatagaaaacataaaattgttgttttcttttttaaacttaaaactcaaaatcacattcaaatttagtgtttgaaaacaccaaaccaatcaaatatttttatgtggacctccacttttgaagttttcaaaaacataaattagtttatcataaataattaggctaatttctcaccaattttcattttccatcacttagcttcaaatactttgccatcactaacaatgataggtaccatttctgcaataaaagatattttttttttgtttactagaattgaaattttattttttattggtggtgagaacgatcagaaactaattttgtgaccgaaaatcctagtaaaccttagaaacaagaaaatgatgaagataaaaggaaatatatatttttatggataagagatttctttctattgtattcaatatctgagttacactgttgtagtgtgaatttttcgcttagaaactcaagactaggctcccataagaatgacacgtggactcatatcccttgaggattgctgagctgtcaagaaaggaatcctcaagaataaaccttgcctgaaccaaactcagcaagatgatgtgaccgtgatagagtctagtcgtattattacgcctcgcgtaatatagaataaggtaggaccaagaaggaattacaagtcgcacatgtgatgactacatagactctgcgacttagtaaagatcataacgagttggtccaaaagacctagcgtacttgatgaatcgataaggactcgcatgtcttatgttatcaacgctgataaagtatccacatacgtgactcggttaggacgcagatacccaagtagacctgttagcctcctttgtgataaaacgcaccctaagcctacaagcttgtgcgaatagataaacaggcaactcgcactatagaagtcacatacattgctacatttagtaaaatagatttaaactattcttcatatattttatttacgtttattctaatttaatgttaatattaaatgtaaaacggttctataattaattaagtttcgtgtaaccaaatggatgcttgctttgtatataaaagagtgatccaacatgaataagacacgacagaattccttgcaacaatagactaagcagaccgtgatctgactgaaccactgtacttccttgtgttcattgtttttattactttttctatttgtctaggaaattttgtttgagtatttgtcgttctaggttgaatatactcgttgttttttagttaaatatctaattcttattttacttggtgttgtctaaattccttcgacaacatttggtgcgatctgtgggaattaactattgattttagaggaaaatcaatatggctgcaaaccagacaaacggaaacattggatcttttaagttggaacagtgcatattccactcccaggtgatggagctaatctgactcatacaattaatgggggtgtgggacgaaccaatgtcagtcctctcaatttgttcttagaaactgctagccatgtaggagaaacatcgacaccaacagccactgtaggtcacttcccgcctatcacaccggtcgtagcatctgaaggaagtatccagctgacaacggcccagtatacggccatgcaggaataaatgcgagcattgcagactaaagatgatgggagagttaggactcgacgtccacccccgagtcccgacaacgcgtttacggaaacccgtccaggtaacgtaccacgaatagacgacgaacgaaacgtcgtaaaaataacccgtaaactcgtacagtcgaagtgagggaagtgaaacgagaaagtcgttagagttgtaaaccagcgtcaacgattccaatcgtgaagta

SEQ ID NO: 238810 - DNA, 559 bp, Cannabis indica
taaagatttctacaataatttaatttgttggatcaacatatatatataataacataaaaattgctaaatatataaaaataaaacaaatatatataaaattaaaaatataaataaattaattgttacctcgatcaatgaaaactatgagagctttaaaggaaggagcattatcagtgaggaagccaatagctgggatatcttgatcaataggctcttcagctccaagataagcaaatattggacctaatttattattgttattccaatatttggaattcaccaaatacctttgttcaaaagttgagtaactttctggcctataattgaaatgatccaatgtttggttgtagaaaaacgtttcaaaatcatcgaaaattgaagcccccgaaattagggtttcggggttgtggaggaacaacctatctccggtgggacttagtctcggaatttttgtgaagaaattattgttttttggagaagaatttgaagaagaagaagcaataatattattaatggtaagtatattataagagagtaatagtaatagtattttagacct

SEQ ID NO: 238811 - DNA, 1642 bp, Cannabis indica
ttggaagggtggaaaatgcgctctctatcctttgcggggagaatggttgctgtaaaagccattgcttcagccattccctcgtattcgatgtccacctatcaactccctatcacttcttgtcgagagcttgatgctattatcagaaaattttggtggagtgggaggttggataagcagagatttctggcgactgtttcttgggactcactgtgtcggcctaaggtctcgggaggcctgggttttagacaaatggaagataccaatcaagcctttttggccaagttggcctggtgtattgcttcgggtatttcacgaccgtggactgatgctttcaaagcaaaatatttccctcgggattcgttttggtctgtcaaaaggaaaaattcagattcttttgtgtggaaagggattctcaatgctaggcaagtgattatgaaaggatcttgtacggtgatagcttccggggcctcgattgatatttggcatcaaccttggatcccttggctaaactatgaagagttcagagatcttatggagtcaattcgagacaaagcactaggtttgaggacagtggcagatttactaattcacagaacggggcaatggaattctaactatctctgctttctctttggagccgaggtaggaaagaaaatcagcaccattcaattagccactgagattagtgatgatcttctcatatggaaagaggccaataatggtatgttttctgttaaacaagcttatatggtgcagcaaggtgatcgctttgggtccacggaccttctttggaaatggatttggaataatgacttacatccgagaatgaagatggtgctttggagggctttggcgggggctttgcctattggggataggatcggaaggtcccctccaacctgctgcttttgttcacaatcagaggaatctctaatacatatgtttgtccaatgccctcttgcttcagcgctttggttgggatccccggtttccattcgaacacatgtgataacagctgtctctctgaagtccttcttgctcgaaatgggatccagcctcaaccgtgatcagagatctagattccttctctgcttggcgattattatagattccctttggtgcaaacggaatgctatttggcacaatgatacggatcaggagattaactcaaaagccttgatggatcttgttcttaaaaggttttgggagtttagttaggccaaggaggaagctgatactgccgaggctgtaatgacagagttatctcctctcccgaagcctatcccgatggaaaactgtgtcatatttgttgatggttctttcaaagataatagaatcggtgctggttttttggcttggaaccgtgagacctcggactggttttatggagccaaggcctcggatgggactaacgaagtggttgctgaagtttatgcttggttttgtgcgcttcagtgggcaaagcagaatggctgggataattttgctctggtttccgattccactgtggtgatcaaggccttctcttctgggatttccccaaactggaaatgtgtttcttggtttgctgccgcccttaagcttttaaactgtttttctaatgtttttacttttcattttaaccgcacttacttagcttttg

SEQ ID NO: 238812 - DNA, 1577 bp, Cannabis indica
aagatcgtaaaaataaaaaggaccacggtgaattaatttgactaacaaaatcgcaataaattaaattgacagtaaggatttatattaattcacccccatgttgcgatgaaaatggggttatgtctacttttatttttattgatttgattcgacacagtagagttatgttcttaagagtgtgtagataaaagtataacaaatgatttctaagtgaaattttaattgagacttatgaatataagactcatgggagatttcatatttattattctaatcaaagtgggtggttgtatagttcttggaaacaataaaataatagagttcgcaaaaagggatgtgtatcaatgatgtttagatcttggtgtcgacttagtatggtggacttaataaaaaagatgaaagaataagtgtggtgttcttagctgctgtcaagtgtcaagtgagtctcaaagagtaggttcagaagagagatagagagtctaaaagaaggtctaagagaaggttcttattttagcctcgtacttctccttatataagctttaggatttgttagtgagtccccacatgttggggtgtctcattaacaaatcttgtatattctcttatggtggacttaataaaaaagatgaaggaataagtgtggtgttcttggctgctcaagtgtcaagtgagtctcaaagagtaggttcagaagagagatagagagtctaaaagaaggtctaagagaaggttcttattttagccttgtacttctccttatataggctttaggatttgttagtgatttcccacatgttggggtgtctcactaacaaatcttgtatattctcttttttaatcaataaataataaaaaattataagaaaataaatatttataaaaatttctttgtttttaggccaaaattccacaaacattgggaaagttgttattttcggttgaggatgcaccaatttaaaatggaatgacatgagatgtcacatgtaggcttgaaaacatgctttttagaatgtcaatgctcgcatacaatgccaaatgggttgtggcagtgtcttccaacaccctttacttaaccacgttactcaattctcgagtaaaatgtaccttttgagccaattgtggatccgataacttcagaatttggctatgattacgaggtacatttagatttgtcttgaaattatctttccaatgcaagttatataagtcatttggataaaaattgagagagttatgctcaatttattgaagacagtttatgctatcttgtaccaattgcgagcactggcatgccaaatggcagtgttcggctatgcttgttctcggaccgcttagggtatattttgacttggtttttgatggtgagtcatattttgggggtcttgggactgccactcgttggagttggaaagtggtattggtcgcataaggggcttgtgaagccttgagtgatttttctcacttttatttggtacagagatgttagaaatacaacttggccaataaaattcctttccttgtgtagtggccgaccactgccattcctttattgtaatgctcttcaaagttgaagagca

SEQ ID NO: 238813 - DNA, 515 bp, Cannabis indica
ttggagaataatctaggctagggggaattgttttttctggattttagtattttgtgcgattttgtgcgatgtgacaatgtagttaagtttttggggattttagagcgatatttatgcgattttgtgcgatgtgagaatgtcgttaagattttgttagtttttgggaattttgagcgatattatgtgattttgtgcgacatagatatagttaaattgtgtttggaaaattatgcgattttttggcgaaacttgggcaatttttgtgcgatgagatatgaaccattttgtaccttcgtaatttttgcgatttataattaataagaacttttgttcgtaattgcagatggctccaaaacttattctccccgtggctgagcatttttcaggttgtatcacgtataaaggaaacgaatactttgcttcaataaaagctaagtttgaagccttcaacttgactgagagggtgaagggaactccctttggagttttttggaatgccaatgatctgaaattct

SEQ ID NO: 238814 - DNA, 1832 bp, Cannabis indica
tatgaagataaggctgtctctttgttatttggccatttaatgccctatcttgagaattggacctcgagacacacaatgacggttgagcggtactgcatgcttgatggttgtactcttaaatgagtattaattgtctattttttttttggggggggggaatccgaattcaaatttattattactgaattacccatcaaagcatttatgaaaagggattcaatcctcctagacactcttttaacaattttaattctcaaaaaaccagagcaaattttccttttcactcaaatccttcgaagaatttattctgaaaacctaatttgctgaagttttccaagtgcatttaacaatatacaagtagtgagtaattctcattcaagcagtgagtaattcttgttcactttcccatttcttttaaattcattcactttatttttgaatttcttttgtgaaaatctaggtttgcaaaattgttccttgacgatagaggttaaggaaattagtgtttgtaatttttttgtttcaatatatctgtatggattacgattcccaattctccattgttttccaatcattgttctacttaaaactgcttgaaaatacttgttcaaaatttatgggtattttccaggtttattgtctttcattaagcctttggtgttgggaattttgttcttggaatgaaatttcatccttttttgcttttaaatccatctggtcaaaatatcagacatgttttactcttgcaaaaaatcatacctctttgtctggttcttacctctctttccttgttttgtagatgaacccaagcactttctggagaggtaagcaccagatagataacgacttgcttcatcctctccgagtgagagttcatcgaccttgaggtttgacaagtttgaagttacaattgactcattgaagtcttcgaagcccgtggggcaacagcaccactaccccagccaaatcagcggagaagggtacggtgggttcatttgggaatcaaatagagcctggaggcattacttgcctgcttcgtggacgtataaggtccgagttgacattccagatacacttctcgagggcctcccaaagccctccaagataaattttgtactagcggtgatagtagttagcatcgcaaagcataccatcaaacgagatcctccgtctaggcgtaaggtgatggagaaaactagaaaaacttacaaaagggcctcagttgaggacccacatttttctcgactctttgcgatggctagtgaagagtaggttgaacattctagagaggatgttgaggagttgatgatttcttacctactcctaggtagcttgccactaaccctagggaggggctctgtgcatggtcttgtctccatgctgagaaagatacaatattgcctcttcatcaatactttaagaagatttctaactactctacaacatttctcgatccagtttactctgaagggcattaagtacttgtccgcactattcatgctagatgccaaacaacgttggggccaattatctggtcctattttctaactaattttcaattaatattctaataggtcgagaggtcctcttaatgtgcatgctgataggctctcttcatgtgcactcggagaggctctctccaagtgcatgccgagaggctctctctaagagcatgccgagaggctctctcaagtgcatgccgagaggctctctctaagagcatgcgagaggctggctctctccatgagcatgcttagagcctctctccaagtgcatgtcgacaggcttctccaagcacatggtgggaggctctcttcgagtgcatgtcgaca

SEQ ID NO: 238815 - DNA, 2204 bp, Cannabis indica
acactataagagaattaatattccatcctcctagaaagcttgggttctaatattgtttaacatgctcatagtcactcatgttattaagctccccaaacagaagttgtaagaattatcttctctgagaactttaacgagtgaatcaaagctttgttatcccaattttttcactttgacgtggcatcacacgatggtgacacgtggaattaactctatgtacctactcacaagaaatgtgccaaacaggaaaccacatacattcgctcgaacgaagtcctcttagtcgggcagtgagcaatcaacgcagcaggccaacacttagcaaattcaactttcgcatcgtgagtcaccgaagaaatccctataactttgggattagatcacaacgatatggcaagttttccgaatcccacgattagtgtatcttatatttactatgcaatctttccacttatatcaattgtaaccagaagggaaatacttccctcccaagcttaaagccctataaatagtgattcataatcactggactaaaggtcaaaaacttgtctaagaatttatattcagagatattattgtaagagctctaagaaaaggaaccaatttccttgttcttaagtcaatacaaactacgaggattaggctattaccgaattgctcggggctgaacctctataaaattcttgtgtctttatttgctttattatattatactcgtattatactacttgtcacttacaaattagactcattgtcgttggctaaaagcgaggtcaatattttggtgctttcattgatagcataatcaaggatcgctctgtatctcaaatctaatcacaaatacaatggtggtacaaactcgcagaggcgtggctgatccagcgaatccacagacagtggatcctgcactgtagaacccagggaacacaagggttccaccaaccacaaatcctaaacatccatcaactgtaggtcgtggtgtgatgactcctatggttgaaatcgcgcctggtgtgcaagagttcaacagccaaccagggcattcataacatagtcgttccgcccgctaccaatgtttaaacaactattggagatggcactgaaatccagaacctccgtgctgctcttggagtcatgtagggtcataccaacaccgtgcatcatgatcaggaagaactccgtgatgcggtgaatctcgcgtttgaagagcagaggcacatgtttgttgaatggagatataaggagatggaaacgttaagggctcagcaagcagtcattgacgaccgtactcggctggtcactgtgttgatacgaaaaagcctatcaggctactggacaacagcttgtaaccgtgatccccttaggcgagacagatgaagatccagcgatgaacacctctcagactataaatggtcagccgcccaatccccagtcacaggttctacctatgggccaagtggtaggcgggtagaccttgtctagtaattcatcaggagagatcatacccaataagtccaaccaagttaatggtgtcggccaacaaattggccaaaccaaccagttgctaaggcagccaagtgtttctatatttgatagattagggacaactcatgatctcagaaacgatttgaacagaaggagaggattggacgaccagcttgatgcgccaataaggcagcccagaacccgcgcttaaaatcctactcaaagctatgctgatgtgactcaggtgggccaagaggccgaacaggttagtccagccgtgcaggcacagttggacgaactaaaaaatatgctccaaggcctggctagtcagaggaacaacgatctcgagttggaccgagcacgtggaacccttttctcccccgagattgatatcctggaatttccccacaagtttaagatgccaacctggaagatgtatactgggaaggaagatcccttatcccacctcaagtatttcgagatgcaaatggacctccaaggagaacgaggagatgtatgttacagagtttttcctgccaccctctcaaaagccacccaataatggtatttcaaaatggcgcccaaaaagttcaactcatggaaggctttctcctcggagctccatgctcaattctcctcctctcaccaacttctgtggcacctaggagatctggtcgaagtaaagcaaagaccaggggagcctctccgagcctacatca

SEQ ID NO: 238816 - DNA, 945 bp, Cannabis indica
tccttccatggccgacccagataagtcttcgcattgccgccgccactagacgaagccgctaagtcatcagcggctctgaccgtacagttgtggatcgaaatcccagtgttctggttcgggtcggttcggccttgagcggttatggcgttgaattggccactcattggaagtcgagggaataggttgcagttctggaaaactacggcagcgttgccgaagatgaaatctacggtgccatatatatcgcattggcggtagaattggcggagggagtgggtgtagagtgtgtcttggtagccttggaagctgcagctgtagaaagcagataaatcggcactgtttcgaactgctaccgcttggtgcttgcttgctccggcagtgtttcggaatgttatgttcaccgccacgaaaccttgtccggtgacggctgccacaaagtcgagataaaatcatatatatatatataaaatatttggccttataaaaagattgagcattgttattattttttgataattttttgctatatttaattaccaaacatgtataacatttatattagattggtttaacagagacaccagggatcttgattcttatctaattattctactaattatttcactatacattatctatacttatttaccataatattaacaaactaaacaattagcagggacactaatttgaggacatcaatttttttttttcattaaaccatgaagtattgttattataagaaagtgttatacccgactaattctttttagtatttctcgatattacttatttagcatcacaattataagtgacctcttataattcattaacgactctttacgatctttgttaaaataaaataaataaaatctgatatttaattgccaacactaatattacatgtcctaggcagttacttttactatttctctatttttttta

SEQ ID NO: 238817 - DNA, 1042 bp, Cannabis indica
tcattagttcaagctataagcatccatgcatgcatgataataatgcatgataataagagcatagcgatatttcttaaaagatattatattaaattatgtgggacccgatacttagttgaaccactagcgatattgatacatagaaaggtgctaggcaccactagtactctttaacatttctctgataataataaagcttttcagtttcactgctagctattagatttcctactcattttgggaagaagactgagagaatgaggaagaagtgtgaacaattatttcttattgatgcaccaatatggtgacttatatataagttgaactacaagaatctaaaaaagtaacaaatagatttcttgacaactgacaaaactacctccactatatcaatggaactaaagttagttgacggtaagaacttatcaactacacgttaattaaatagtcaaatgtaaattgctaaagataaaaagcttaattaagagaaactaaaaacatcaatagagtaaaatagtgttgtattgaaaatttaagctcctttacaaatagtaatttttcaactcttttataagaattcaaatggagtatttatacttcagctcccgtcactacaacaaatgtgagttttaggggccacaaaaggtcactcttaatagtataggtattaggagcgcatcgcccctaaagagtcttgtaatttttttaatccttatgtgtcttagaagcgacaacagtaagggtgacaaaaaatcacctctatataactcgttatttttagctatgccggctagtagtaattatgcttctaagtatttttagggacaacatttctatttttattaatagtgcgtcgcccctaataataacttaatatttatttgattaaaaaaatgaaaaattaaatttctcgaagcgaacttaaattggttttagtaattctctggctccaaattctatttccctccttcatttcgtgcggaacaaatgtaacataaaaccctaaaattatttcagcactcactataatctctctctctct

SEQ ID NO: 238818 - DNA, 765 bp, Cannabis indica
tttatacaattcttaatttactcacaacagatttttcataatgatattcaaatatttaagaaaaatatatgcatataaaaataagctgtgcaaggccaaaatagattaatttgtcatatcaattcttctattggtatgatagaaaatctccacagttttctaaatgaagtggcactttctttagtgatcttcaccatagacttaattcaatgctatagcatataattgttccaagtttctttcaataatatttccatcgttgggaaagttttataagaaaatcaaaatgtatatattaaatgtttttaaaataattaaatttaaaagtgagaactaacacaataggggatgtagctcaaatggtagagcgctcgctttgcatgcgagaggcacggggttcgatcccccgcatctccatttgcttataatttttcagttgacttgatttcaccgttaataaattatgtgattattgattttatgcatgtttacaaacaagtattcggaatctccatttacttataatgagttgattttaccataatttatgagtactgattttaccgcatatttactagaaattaatagtaagatagttatttatttatatttacttatttactttattagaaagggagaatttgattaaataaaaaaaattctttctctactaatttttttaacaaatatgattaagggtaataaatttttgggaaattctataatacacccttttaaaagggatacaccgatacatctctttct

SEQ ID NO: 238819 - DNA, 668 bp, Cannabis indica
catgtctctccatccattccatctcactcatggaattggtcctacctaaactacattattaggatggtcattaacagaattgtaaaatgcttcaagacgatgttgaacaaagaacaacataactccaacacatggtcaaatgtacatggaggatgagggaaacgacgagaaaaatacgaaagaaaggcacgaccaaggacaagcaagcaaaattttcccaaggatgaaggtgagtagtggttatacaagagagtacaatgagtataagtaatggagctaccacctatcagctgttagtacaggctgacatacgactactactacctccactacccacatgtcacactaacttgctctatactaccaggatagtgtctcctaacttttgggaccatttgtattttagagctattagagctctagtataactagtctcttgaggcacttgtaaagggcttgaaaaatctttataagagagataccattaagcaatataatacttattttctctctattattgctctaaacaattattcttcaaactttctaactcttattgatcttcttgattttacatcttcactttgacttttacaatcttaattttgttgatgagaatcagttgtcaaacttagggggcgtttggtaacacttttacttttaatttt

SEQ ID NO: 238820 - DNA, 944 bp, Cannabis indica
aaaatttaatacgccgaaaacatagttcaaacagtgtgttacaggtatgactattctattttatacacgtatgaaataaactgtttgaacactacttctatattgtaaattatttcgaatttctaaaaattttatcggatatcttaaataattataacatacacgaatataaaaaattagactaaattttttttttctaaatgccgaaacagatagagagtgcaccaatatatctcttttaaaaaatgcattatagaaacactctataattgcattaaaataaaaaaaaaatactaattttaatatttattttagtttatttttctaatttttactcgagctatcaaattatacaaaggagatcaactctatatattttactcttcttctctatctattctactctcccaaccaaaacttagtacttagtttcctcacaattgcattattttttttaatgaaactcgatacttttattaaataactaaatcaactatttgcagagtagaaagaatattggtcttagtaataatacaatcataccaaaaataagagttacgaataagacaatgtgcaatcctattttgcagagtgtgaaacaaaataaataacaagtctttgccagcactaacaattaaaccaaatgtaaaaaggcatcatcatgagaggattctaaaaatgcttgaacgaccactaaactatcaatttcaaccaccatattagaccaactattcctctttatccaactcaaaatttctttcaaatctatgacctcaataatagtaggttgaacacaccctacattatgcataacaaaagcttcaagtaagagaccattcggaccccgagcaacaaggccagctctatcaacttcgagaatagctctgtcaatctttgatcttattagtatctggttttgtccatcactcaccactattgttagt

SEQ ID NO: 238821 - DNA, 1485 bp, Cannabis indica
aatataaaactaaaagtatattttaattagtctcaacaccttgaaatctaaatcaagtgtagtatgtagtattatctatgtaatagaatctgacaggttgtattcaatatcaaccttctccaccgttacatctccttagtcataaaatccttcatattataaaattcatttctatatgtctactcctcttagggtattagattctttattgtttggtagctatatctatgttatcaagatgtaacactagtagttaattcatgactgaataatgccaaaaactgtatagaattttggacagactgaataattatctagcagccttctgggccattttaacattctttcactagtagagttagagacttcagataggtttttacacttctctaaaaattactgctccacccctagagtaatcaccatctcataagtagactttctagcattagcacaagtctagaaactaatttggtgcagtttaagagtactaaaataccactcttattgactaacatatattttctcttttgattttaagatttatttgattgtctttcaatgtctttcctggattaaactgatactcataactcccactcaacactaggtgtctggtctaatacataccagagcatacatgagacctctcactattgatgcttaagattttttttttcatgacttaccttttttgaaatggttgaaactattccttagatacactctatgtctaggagccaaaaggcttcctttagagttagccattagaaaaatgctctttcatcttactaaagtaagttgcttgcactacaggaagtaaattaccaggtataccacaagtcataggtttagataattttaaacctatgatactaggatcaggaagttttgttaagtccaatgaatagacttattattgaaatttcctgtcttctccttgtaatagaaaactttggttgctccatagaaatagttttaaccatagttctcttgtccttgtgtggaaggccgtaacaacatacgatgtgtttgacgatgaaatctaaggccttttttgaggtaatcatgttcataggctctacttcaacccacttagtgaagtagtcaacgacaacaatgacatgtttcactcgtccttttccagttggaagagcctaccaaatcgattccccaaatagcaaatgaccaaggaatgttcattagagcgatatttagttggtggagttcgcggaactttggtgtagtgctgggattgcttacactttaggatttaatcaatgcaatctttttcataattggccaaaaatatcctttttagataattttctttgagaagttgggtctgaaagtgtggtcttcgcggaaaccttcatggatctcatggataatagtgctaatctctattctggcaatacacttcaagtatggaactgacaatcctttacgataccatcgtccatccagaataacataccttggagc

SEQ ID NO: 238822 - DNA, 2373 bp, Cannabis indica
ttcgcagttgatatgtgttgcttttatcttcctagatatagcgtacttgatgcgtccatattcgcacttagcgacatatggtttctcgctagtatactaattaacactttgtatattaatttcttgcataagaccttacagtcagcaggttacaaatatactctgatacttaagtaattaatgagttttttcatataaagtgatttcatcgatccatattccctttatatggacacgtgtacactgaaatggcagccgaattttgagtatgacagtacatatatatatatcaaacacttgttattgaaagaaaaataaaaaggaactataccttaaatttttaatagccatgattatgtgcctcaataaaggtaatggattgatgtgaaaacacattcaataaaaaagttgacgtgagaaaatcaattaaaggtctttaactacagtgaaattataaaacggtattctacatgtgtaatattaacaaatgaaggaacaacgttatttatgtaattcatttgtaaaaaaacatgttcccaagtaaatttcccttttttatattattaagattgttttcttgtagttgtgcatggtggctagattttggaaggccttagtagccggattgcagtaataaggtacaaatttaatatgtatatatgtatgtattttgtgttgtattgaatatgtattatgtgtatatggattttgtaattgtattgtattgtatttataaaaatattatagttgtattgtatatattttagagaaatttacatgggaacacattttttgcaattgaattacataaatgatgttggtccttcatttgttaatattatcacatgtagaataccgttttataattttattgtagttaaagacgtttaattgatttgctcacatcaatttttttatggaaaatttacatgggaacacgttttttgcaattgaattacataaatgacgttggtccttcatttgttaatattatctcatgtagaatcccgttttataattttattgtagttaaagacgtttaattgatttgctcacgtcaattatttatcagcatgtgttttcacatcaatccattacctttattgaggcacataaccatggctataagaaatttaaattatagttcctttttatttttcctccaataacaagtatttgatatatatgtactatctctatatattatatagaatattaaataaataaagttatttagcaaagatggtagactattctatgataatttattagcttattaaatatatataaatgttaataaaatattatttaaataataagacattattagagaatactaatggtttggatttattatacactttggagtatatttttgtacctgtatttgtttttgaattttatgaatttgtttgttgaatgcgattttagttttgtacgttaatggtttttttttattttttttagaattttattgaaatttgttcaaatgtgtgtttgatattttatacctaagggttattttttttatgttataaggctgtatagtgtatactatattttttgtatttaatttagtttattgatcatatatttggtgactaaaataaattgaaagttacccaaatgtatattgaacataaactatatgagtgacttctaataaaataaacaacataaataactaaaaaaaatctattaatatgtgatatatgtatagtaacctttctacatattaatattttaattgttcattgggtcttgtgatggtttgtgccaatcagatcctaaaggtgatttggtagctaaggagctctttgtaccttggcagctgatggaacaggaagcttagctcgcacaatatgctccatcggtaagaggtggtgcaatatgctccctcggtaggaggtggcgcaaattgcttccatggtaggaggtggtacaatgtgttcgcttagtaggaggtggtgcaatgtacttccttggtaggaggtggcacaatgtgctcccttagtaggaggtggtgcaatgtgctcccatggtaaggaggcggtgcaatgtgttcccatgataggagaaatattttataatttcttctccataaacatgtttgaaacttatttgcaaaattagggtataacacaatgttgggctttatgccctaaataaaactctaattcaatgtaatctctatcatttaaatatcaataaagagacagaagtattttcatcacttaattaatgtgtcatttggttcatgttatcatttatatgtttatttgatttataaattcatccaaacccttatcacattaatattcttgtttattgtatcgtcatcacaatggaaagtaatcaagattatgtgattaa

SEQ ID NO: 238823 - DNA, 1990 bp, Cannabis indica
tgtcattgttgtttcgatacttgtcatttgtatgtagtttccttgctcattttaagttttctcaattgggtatttatgcacaagacttcttataaatgataaggcctttggaaaaaatctatcttgctgtgattgtagacattagaaatttgtccaaaatttgctatcatttttcttgtttgttcatcttttttgatttttgagctttttaagatgtatattttggttgaagtttgatattcaatcctttttttttctctcttatttgttttagttactagaatcgttgcacaaagtgagaagcatggcatgttgttgcaccttgatgtaaatacagagatatatcctatgaaaaaaggagataggttcttgatggttctgtctcccacccttaattggaatggagcacctgttagtagcttggagaatcaggtactgttgaatttccatctgtgtaagacattgatgaactaataagtctagattcaaattgctgatgttgcttgtctatttattcttgcacatttgaagtcatctgttggtgtgggctctgaaattttgtggacttgcttgctgccgttctatatatatagctgttgtgtattttttgtatatatatgcgccttctttcctatgctaaagttacttacaatgagaatgagattgagattatagtaataatttatcctaatgttaaggtgatgtacctaactgcttagctcctttctaattggtttcaatactctttatcttgataagtatgtagcattgggtaactatcattctgctagttaattttagcttcttgggtacaagtgatacataatatcaggtgatgagaatgcggtgctcgctttggtttcggtaaatttttatattttagtgggaacagcagtccacagagcaggattgaggaaatagagtagggaaggaacagaagcaaggaaattatagatagataaaggggaataacttgtaaaaacaaagtaatcccacccactagtataagaatttaagaatctgttctcatattaaaggagcggtatttgttggaatagcctgagtaggcaaggtaggagcttagactcttataatgatccgagtcagctatttttcactgtgcaaagtcctttctattgaccactcatatgaaaatcactttttaattttcttttgttctgttaatgctctttggaaaaattgaaactcttgtcctccaagcgataaagatacttaatatgttccctgcttcctttccagactgagcggaaatctctcgctgacaaatttgaatacattatgcatggattgctctataaactggcagaagaaggctcaggttcagagttaaaagtgtaagtaatgtaattaataattgaacatacaagattttggtacatacatgaagattgtatcatctcatacaatcatagaaattggatcatttcttaaggatttgttgtattttgtttcagggggatatatgtttcttatggtgggcttcagatggtgctgaaaggggatcctgcctgttgtactaagtttaggcatgatcagaatttatttttgcttgttagaaaggttccaaatgaacttgttgcaaagtaagagttgatgatgatagaaacaagttctctaatcatattatgtaatgtacatctacacagaattcctaaagtttcaaggggaattatattttaacatcccaaaatgttagaaaggcaccctatttgttattgggttattgggctatattctttctcttctttaacataataaccttctatttgtttctctctttacggcaaaacttgtttcattagcaagtctctctatattcactattatgtgccaatatgaattatccaagtcacgaattttatacgaattttttttttgtacatttttgtatattaattaagtaaggtgattctacaatgaactcccttaaaagggatgtattgatgcaccctctacttgtttcgatatt

SEQ ID NO: 238824 - DNA, 676 bp, Cannabis indica
atcagaaactaaatgctacttatcttaatcttaagactatctccaattcacatgatcttaagactatctccaattcacatgatcttaagactatcatgtggcatcatctacaacaaagaatgcattcaattcttgtctcaccaatgggcacctcctttttcagcgctcatttatttaataagagaatgacttatctgcttcatttaataaacatctgccattttacttgaaaagatcccttttcaccatccaaattttgacatacaaacaagtaatttcattgatcctaattccaaaaaattatttaattctaacaaaataattgtgtgcaataagactaccataagctctttgaaaaaagttttggaacccaaatttaattttcgtgtttataaaatatcaaaatccaatccatacaatttaattcacaaaatgtaaatattcacatttgtatagattaaattaaaaaatttaaaattcgtacatgtacaaattagatgttaattgatatacaaaagtaactgattaattcaattcacacatatatatataatatattttcaaaaaaattattatacaattaatattttaatataagaaattatactttacaaatttaatatatataatataaatatattttgaaatttaatggatgaaatttatattttatttt

SEQ ID NO: 238825 - DNA, 1383 bp, Cannabis indica
atatcagaatatttttctatagtagtattcgttattgttacaatatcatccttgtaaatttttttaaaaattcaaaatagtttacaatactgaaaataaagttcatgatattcaagtctaccacgcgtgttaaaaaaattcaaacatattttcagtattgaaaactatacaaaattttttacgggaatgatatgtaactatataacgaacaccaccatgaattgttttttttaaaaaaaaaaattggcatttacttttgggtacgaaagttaactaaaaaattgtgacaagagattgacagtaacacttttattattattatgaataataatgtgtgcatatgttctaaaatatagcatatgcatggttatattttttgggattatgacttaactaatccgagatgaacccctctaaaagcattattatgttgttgttaattaacatatatttatgatatgtatatttgtttgttgtaggcattgtcaatccaattccaaagttatgttaataaaatgacaatggctttaggagtggacccaaatgtgattcctgatcctcaccaactacttgatgatatggaagaatctctcaaactcattaaggaagctcttcttaatcaaggcctactaccaccactccaacatccttagctacctatttcttttatacaaattataaataatttatcattctaaaaatagtcatttgtaattctatgcagacaaaaagtacaactcatattcaaaaaaaatgtttgaacttgaagtttcaaccctatttttagtaattttttatttaaaaaaaaatccctattaagaaaattgtacatcatcattaattcttcgaatgttagaagaaaaacatcatcctcaagttagctaaacttgatttgtcatgttattatcttattaccatattaccacattgctactaaattttaaccttgtggtgaaattttagtaatttaataaatactatatgtgtgtgattgaaatttatatatataaaataaaaaacaaaacttattattatcttttaaaagtaattagcggtgaaattttctttattttatttttttggtagcaaaacttttttatatttacttttctttacaaatttgagacattaattaaatattatcattaaatatcaatttgagacatcaatgcgtaaaaataaaattttaaaaccaatataataatctaattagtatttaatgataatatctcaagttgaattagttgtagtgaaaaatatagtttcagaagctgttggagtaaatggtgtcccctcttttggttctcattttaagcctgtatatttgttttagttcctttcattgttcaaactgaaaaatgaacagtcaactttctgggctta

SEQ ID NO: 238826 - DNA, 1840 bp, Cannabis indica
gattaccgattaggaatgttggagtgtgtttgctgtagttgggggtacatggtaggaagagatgtattagtggctgacaaaacttataatgaaatagaaagtcggtgttgaagaagacaaggaaagattgcattgaggattaagctcataaacaataattctgatattgcttattaataattttgtttaattgaatattttattttattttatcaatattatattttcattattatattgtgcagttggacttggatgtgtcctttgttggacaattattttcctgttcttttagctcgttgtggtcacttatttctcagtgattgcaatttgcatgtgcctgtgctaaagcattttggttctatcgtagattttttgagaaatgatgaatgatcagcttttgactaaaaattatatgatcatgaatccaatcacactataatgctatcatcctatcataattaggaatctcatttaactgtataatttcagaaccactaaccaagaaacatgtaaatgttcgggtcccatgacattcctattctcttaaaagaaaagtaaaaagttatagaccaagtgcatcgtattttttgggacctaacacaacaaatatatttctgtactataatagtttcatgcaggatgtcaaaggaaagaaatatggaaaaagtaaacatagatatgatggacatatactagcatacacatgtactatattgatagatgggccagttctggcaggttagtgtgagagtttgtattaaagtttgtaatcccttctctgggtttgtggttttcatcacatataaactagtggccatctacgtttcttaagattattggtagaattatgttttttagaaccttttaaggagtttaaaatcattacttaactacataatatcagtaataaagttatgccccacataattatagtctcttttgttgaattctagaatgatcaatatactgtttgcattcttcttctcttttttttttcaatctctactttgatattgtcataatctggtagaataattatctccttaagatccaataaatacgtaacttagatttttttccttccacttatcgaaattttctttcattttcaggtgtggtattttagttactaagttccatacatggtaagatacctttttgtctgtattagttatttgaagaatgcggtggcagtgttccaagaatacatattcgaagagaggagctaaccttgaactggtgtgactgttatgaaaggcaaaattcaatatagatcattatcagtgattttaacaagcttggattaatgtcactgttatggtcattgtggtaaacaaatggcttcctctggaggtaggccacgtgttcaagtttgaacgcctttgtcgtcttgtatacacccagtctttctttgacttcttgttcttctgttagctgatagaattttatggaattttggaataatttaactttgttctaaggaagacgacacaagagtagccgtcattaaaaagatgattcttttgaattatattccaagtagcctacaatattttaagatatatgcacaatcattatcatgggttatattggtgctaaattagttatatttgacccaacttattggaaaaccatatttgttaaaaaggaagttgggttactttaactttgattgtttaacgacaaaacacacctctcttactgacgttatatgtcttcttatcttatcatcactcgaaatttactttggtttgaatttcttatagtgagaactgagtacacctttttctttatccaatatggataagttctgtttgtgaatcattaaatgttcatc

SEQ ID NO: 238827 - DNA, 731 bp, Cannabis indica
tgagcactaatattgattactaatcatggcagcaaacaacatttccaccatcttcagaattcatgctaccccctcagtaatggaatagaaggaccatcattttgttgctgttagatatttttggcagtattttgactttcaacagctacattttggatagttgttgatatctaacagctgctattgacaaaccagattgttttagtgttaagttaatcccaaatatttactgatagctgctggtggtggtagttgcgagtgctttttcttttttggatatagctatgaagagttgtaatgtattttgttggtaatagcttttggtattttgaagttagaaactaattttggagaatatgtactgatacctggtggtagttgggagtgttttttattttttgggtatagctattaagggttgtactgtgtttggaagtgatagcttctggtgttttcaagtgatagcttctagttttttgaagttagaaactaaatttgtaatgaattcagcatgatatttgtcatgtatttggaaactattttcagtattagctttatatattgtcttgattttggtgtgttgattaatgtcaaacacaatttaccatctcaaaataatacggtttattccttcaaaacaaaataatttttcactgagtttgaaaatcaatattttatttccactaagacctgaaaattagataccttaaattatattgattaataaaatt

SEQ ID NO: 238828 - DNA, 1127 bp, Cannabis indica
actggtttcctcaaaggaactctacctccaccacctattgatgaccctctgcacaaccactggcttcgatgcaaccagatggtcatgtcctgaattttacattcagtttcaccagatatcaagagcagcatcatgttcttggacacagctgcagatatgtggaaggagcttaattctcgatatgaccaaggtaatggaccccgtatattcgaactgagagaagccttgattactctccaccagggtgatgacactgtaagttcatactttacaaaattaaaatgtatgtgggatgaaattcaagaaattcgcccaagaattccttgtacttatgctgcttctgtcaataatcttgcgtccttgaatcaagaacaagtccttcaatttctaacaggtttgaacgaatcattttcccctgttagagcacaaattcttctcattgagccttttccctccctctctaaagttttttccatggtcatccatgaagaaagacaaaggaaactcaaaaatctccaaattcctacactcattgctactgcccaagatacttctgcttcagctgttgcacaaaatccttcagcatcaactgctgctgcaaaccaagggtgcaacaaacgcatgagaccctattgtaccaattgtcacaaaccaggacatctcaaagaaaatgctttttcttgattggattcccaactggttatggtgacaagaaaaagaatgacaatacccaaccctcggctaatcaagcatcaacctcaatagaccccctttctctcttggctaacatcaccgaacaagaagatattcaaacccttatttctctgctaagtcagaaactgtagcctacatcttcaattgcggatgcatctcagccatttgcttccaacataactggtaaactcaaacctttttctcaaagtttatggattgtaaacagtggtgctactcaccacatttgttgtaatattgatctcttttaccatttacacacaaacctattgctacttccatcaaacttcctactggtttatgcattaccatacaaaaatctggtagcatcaaatttaactgacaacttaattcttcataatgttctttatgtccctgaatttcacttcaactta

SEQ ID NO: 238829 - DNA, 825 bp, Cannabis indica
aaaaaaaaattaaaaaatgaaatcaacaacattaatcatttttggataagagaaatatttctcacataagagttcaaaaaatttctaaattatttttggtccaaaaaaatataattaaaataattaattatacacccaaaaaagaaaaaaaaataggcaaacatgcaattaattgtctaaattttatttttaccatcttttttttttaatgcaaattgaaattttattaatttgctaaatcaaccaaaagacaagactgtaattcagtaggaacatccctcccactgaaattcgatctgaaaaagaatatgatgctctagcaaagttgtgcgcagtcatattaccagatcgtttaataaaaaataaagaaacattgtttaaaatagatagaagctttcgccagttcatcaccactcccctaagaagcgaaaccgtggtgatgttacttcgaatagcttggacaattgagagacaatcagactcaagttcaacattatgccattaatgatccttgatccaacttaacgcctctttaatagctaaagcttcagccatgtctggtgccattgtacccctgcgatagactgttttggcctccaccaaatacccgttgtgatcccttgccaccaacccgaaaccatatgatgaactgtggtcaaaagttgttgcatcaacagagattttgagtacattctcaataggcttaacccaagaaactgccccatcacctacaatatttgagggataatgagcaatgtttgacttatcttgagcattcttccgttgcacaaaatactgagaagctgcaaacacaacacttgccac

SEQ ID NO: 238830 - DNA, 960 bp, Cannabis indica
tgccaacactccataaaccaatcaaaaaaattggtagcttcttaattattttaaatattaattgtctttctttattatcatttattttttaaaatattatatttatagtaggttttcttctcttgtgtcagctttgaaattttataataatgatttataaaatctcgattttaaactttggtattaattttcatgtaatttaattattattactaatcaaattacagttttaacttatggtaaaataattttattaaatgtctattaatgttaattttttttttataaattttattacttgtttgatctacaaataccttatgtatgtaatatctttttttgaataaatatatgtatcttttaattctcaattatcctatattatttgtcttattatttttaactaatttattattttatatgtggctttttggcaatcatattttatttattatattgattaatttaaaattctcttcatattttgattagcttttattagtattgtggtaacatctaatttttttctaactattgtaattaatattttgtaaggcaatatgtctagttttgtaagtgtcttgtttttctgattttataaggtcaatgtggctagtttttttgtatgaccaatatggctagttttcttttgtaaggtcagtatgactaattttagttttataaggctaacatggctagtttttagttttgtaaaattattatatggctagttttaattttataaggtcagttttatttaataataacacatcaaatgtagtgtagttaccgttagcaatggagaagagaatagataagttctaatattttacattaaagaattctatgtaactatttatataaaattttatattttattttattttatttgtaagggaaattttattttttactaaatatttattatgtattaatttttttctctttattttgtaggtg

SEQ ID NO: 238831 - DNA, 4047 bp, Cannabis indica
aaaaaatatttgtagtacaccttataaaaaagttatttcataaattctttatctggacattttaaaaaagtattatatgttgtgacaatgtgaaaacatttgtaaattcaaacacacgtgaaatacattgagaacttggtcacgttttgtgtcatttgttttgatgagttgtgcaattgtgccaaaagtttgctaatcaatgtaatcatgcttagcaatttctaaagcaacattataaaaactaatcatgtagaatgatttatttttgacttcaaaaggaaataacttaaaactatcaatttagttaccttttaacctaattcccctaccaattcggtttcaaaaacactaaaaaaattgtgacactaaagagttccaatagagaagaaaaccaaaccaacttcactatattttattaccattgaaatttgaaaatccttttagagtacaaaatcacttcatacttaaattttacttttaagtatattaacaactaaattatatttttaaaatttgagtacgtatatttaaatgaatttttaaataaaaaatttaataacttaaccaattagagagtgtcgtattggtcattaactaaaaacttaatggtgaagtccctacaattctaaaaatataacttaagtatttatctgcaaccgataattaaacttagtgtttacaccacaaattactctctttattttaagataatgaataccgtccaaaatagttgcgaggatgatcgaaatgacccaatagaatatgatcttccgaacacactcgacacactcaactttacctgtttcaaaactgtataagaaaataaaatgataggcatgtttggttgtgtgctcactatagttgctgtatgtacaaagtacaactttatatatatatataatataatctatattagagaaagaaaaagagaaatggaccaagagaatatgcagtgaacaaaagataaaaactgccacagcttcatatattataaaaacatctatggcttttgtcacactgcagcagacaatacaaatttgcaccttaccaatgcgactctcatatgcacaaatgtaacgaatacaatgcagaatggacttacaaagagacattaatcagattatggtcattaataataagaagaaaaaaaagctattataattaattaaaaaaaattaagttgtaagtaaattccctttttcttccactttctattgtgccagggttacctcggaccagataactcgaccgcatgcaagttttcggttgagtctactatccagtctgagtttggatgaggggctagttcgacttcttgtcgtagtacttccactttttgccattcatcccatctctcggccaagccatcaccttcgagcattctcaccacctctgacatctttggtcggtccatgggagaaccttgtgtgcagagcagtgcaacctgaataagctgctctacttcggattctatgtagttcttttgaagatcggggtccaccagcatttccaacttcttctctttcagtagtcctttcacctgaaaaaagcgctcattcgtgtcaacttaaggcaaacacgacaccctttaagctgttctcgctattgattatttataaaaatgtactcacccagtcgagcaacatgacatcatcatcatttgcaagccgagcaagatcaaaagctctctgtccagtaattaattccaaaagcatgattccatagccaaacacatcggttttctcagaagacttcccggtagagaggtactctggagcaatatgcccgattgtgcctcgtacagctgtagtaacatgagtgtccttgtagtccataagtttagccaaaccgaaatctccaacaactgcttcaaactcctcatccaacaaaatattagcagctttcacatcacgatgaataatttttggatcgcaatgatcatgcaaatacgaaagaccccttgcagaacccaatgctattcgtttcctagtaggccaatcaagaggcagttggtgtggcggccgttctgcaagaatcaataaataatttcagtacactgtgaaactagtttcatggggatagtaaatagcaaaggccaaaagaaatagcaagcatttccctataaaatgcgaacttctacctcttaaacatgaggcaacactcccattagccatataaggataaacaagtaatcgttcagttggtgtcatacagaacccacgtaatcgaagaagattccgatgcacagccatactgatcatctctacttctgtttgaaactgcaactcgccaccaggtgtacgctcttctttcagtctctttacagcaaccaaagaaccatctgcaaggcgacctttgtagaccttaccaaatccaccccgtcccagaatatttttgttgctaaaactatcagttgccacttgtaattctcgcaacgaaaaccttttaagctgcccaagatgaacttcaggatcctcctcagctgcaacgaagaataaataagtgaactgagctaataaaccaccaaaagtaccaaatttatggcgacttaccgggtacatcaaagaaaaattcttgtggcttccttcgacgccaccaagcaaatgcaatagcaggagcagcaaataataaagcagcaccagcagcaactccaccagcaatagccccagtcgcactatttccacctaaagtggtattatgaagagtaaacatgcttattagaatttttttagctaataaaaattcctattacacatttcttttatggacttcagtgaaagcagcaacaaaataatcacctgggactgaaattgggggtggtgggacaaaaggaggaggaggcgaaaatggcggggatcctggacagggccgtccagtaaccgggccacatagatttaagttattagcaaaactgcaaaaaagaagaacaccacgttcagccgagctctaaacatcaagaatagtgtgaatgggagataaatcaaaccagatataaacctgatgggagtgaataaagaaaatgagccattgtctggaacctctccggttaatttgttatttgacagatccctacattttacattgtaacatcaaggtattaatcttgcagttacaaatatacaacggtacgaaatataagaagaatatggggaaagaaagagtataagtatgtatcaagagaaactagtcacttacagcacttgcagtgaggtgatgttggtcaaggacataggaattggacccgtcagactattgttgttaagccgactatccttacacgaatattacaaaagaaatcactttaaggcctaatatcaataaagcagaaaattaacataaaactaataaagggaatcaacttaattgatgatggaatatggtttccacaatataagattcttatgacatgaacttccaattataaactctgatcatatttaccattccttcttttctatctctctttaatgaaaagttttccctttcgcataaaaacgcacaacataaattaaaaacattcgttaaatcatcatatgttcaacccttgaaacccactttcatacattattcttcgaatttggtattgtagaaagttaatggttcaaaaaacctgcaaagtgaaaggtatatacacaaaattctcaaaagaaaaagcctacgatgacataatagaacacctcataaataaatattaaggtaaggaataagaagtactcacagaaatctcaattttgacaacttgcccaaggtatccgggataggaccagtaaaactattcaaatacagatccaagctaaccaagctggtcaaattccccaaatcactaggaattgttccactaatgttattactgtaaagttccctgttacaaattaaaaaacaaaaatgcaaaaatagcatgttatgtcaagacaataaagacgatattgcatcaagctaaataaaaactacaagattgcttgatggggcaggagggattctgaagaaaagcaggagagagagagagagagagagagagagagagagagagagatacaagcatatgta

SEQ ID NO: 238832 - DNA, 2418 bp, Cannabis indica
tattctattaagtattattattagttatcattggtgtttagtaccacctaaaaattgtgagctagttagtatttacgtcgttgcaatggtattttttttttttgactaataaatgacaactaaggccgtttgaaatcacataaggcacgtatctacttattgttggccatgctaatcattcatcccaactaagatttttctctttcacaactaacaatatcaacatcaccatttaaagaaacatgcagcccattaccatgttgagcttgcctaagcctaattccttggaagtgagggaaccccatcgtggctgtggggagcttctatttttaaggtcaagatgcttcattcaatcattgagttgaggacaaggacacatgttgccaaaaccaagtgcacacgtgacacttcctaccattgactagagcatgatccatcaacttcgaagattttaatagatatggttttgatgagaaacaaaaatataacaaattaaattaaagcatggttataacatgtaagtattctcacattgggatcataagttagtctagagagaaataacattatgttattagaacaccaaaacttgcacatcaagtaaattttattgtcctaaatttctatttcaagtcctatggcgatgattgaggcttagtgggatacaacaaaccttttgagtttttgaagaaaatttgaatcttggacagcttgagattaaaacatttggtctaaaatttagtgacaaaacaaaaaatcatatttggaagtttttttggacattatacacacactctgtcaatctagatatcatatatagacatcttcaattgctttaagacttcccatttcaaaaaaaaaaaacaacaacaacaaaaattgctttaagactttttggttatccttatatatatactccaaaaagtaactttggacccaaaaatgtaattttcaattacctacaagttagaaaagtcaatttcacatatttattatgtgaaatggttaagtattttgtagcactttctgcaacaattaacgaactataacggttgcttgaaaatccagaaacgttaaaagacattttaaacacatggttccatttttgacacataaaatatgttggttgcttgaaaatggaaccatatttagccaacaataacacatgaaatatggttgcttgaaaatgatccatatttaacttcctttatttttactattttaaaagacatttaacttatagcattgctgctggtacaagtggtgctcattattttttataagtgacgctttataattagttagcgatattttttaaaaattattttctaaagttatatgagactagatacttaattataccaataacagtatgatactatggaggatgttaagcactagtgcctattaacaattctcttaacttatacatcgaagctttctacaacatgagcatcaaaattcagagcagaacttccaatttggtcatattatgctatgcgtgatattctatcgtgaacaattttaagaggatcagaataattttaataatatgatattaaataaaaataattgctaaaagttgaactttctataaaattaattcgcaaattaaacaatttttttaataaagtggtcagtcaaaaatttgaagaaaaaaaatgttgagagtttcacaaataattacttaaataaaggagtaatttacagtagtttaactaccgattgtaaataaatatttaaatttaatttttggcggtaataatacttaagttataattttaaaacttcttaagtatctagccattaaatgtcggtcattatccacgtatcattttacttaacacttaacaatcaggtacttacagaaattttaaattataaattaagtatttatatcgcaaattactataaataaaattattgtgcaaaattgtaacaaaaaaagtattgtgcaaaataaaagaaaatatgtcttttttttgttgctctaatattaaagaaaatgttaacacccctaattctcttcaaatttgcagttatgtcatggaataagctgtcctgtaaattctgtaattaataattttctgaccaccaaaaaatgaagaaaaacaaaacattctctccaccttgaagcactacatctatatttcacattacataatttatttggtcaacggtcataacatgttacataacatgttacatagcttgaatcagctgtttccaaccttaaattgatacattgaatcccctttttctcttttgtcctttttgtactgccaccacatttgaaattcttgtcataatgtataacaaatatctataatgtttttcttcacttatccccaaatggaacattaatccacaaaatcaaaacattataccttacaagttacaacaaactaaacagatatg

SEQ ID NO: 238833 - DNA, 896 bp, Cannabis indica
aacgaattattattattattattattattatatgagttacagtgctagttgcaataagagtttctatacaattttttattgcagcgttagttgcaataggagtttctatataaaatttcgtaaaatacaaaataaaaatatttaaaagtgtaaaaacagaaaaaatccttattattatacaattaaatgacaaatgtgtcatgctaatagtaacagactttgtttgagtgaacttttaaaaattatattgatgggaaaatattgtgatcgtatttttgtgttgaaactgatttagtttttctcattagtcttgtcttttgacatggttctttagtcttttctttttagttttcgcattaatcttgtcttttgacatgattttttagtcttttccttttaattttttctggttcgagtcttgtcttttggcatgggttgtgtagctcagaatcatcatgcatggtgctatggtagaagcattcatgaagtgaaatattggatgtgttcaacccgaaaattgctgagataatagacattaaaaaaacattaagttggattgtaactcattcgtgggatagagtcatgttggaaacagatagcttgactttatcttttgttgatttgtattttgtaaaacgatctgcaaataagttggctcattgcttggcaagaggctcttattgtttctctgaagtgcgttcgattgttttaaacgaagttattaattaatagatgtaataatttttattaaaaaaaattatattgataggtctgaatttcattaatcttgcttgtttgtataactatagtgaagtttaaatttttagcacatttttttatagaagtctaaccatacaaaatttattatagtactttatcttttttgaataaataag

SEQ ID NO: 238834 - DNA, 1159 bp, Cannabis indica
ttagggttataagggtatgggatatatatatatatatatatatgtgtgtgtgtgtgtcttatgtgaagaagtggttttgtgagtgtggttaatggtaatgagtgaaagaggggatagctccacatagtgttctctctaatatcactttaagtttgtcctcacattgaagattcttggatgctcaacatagctcacatggatggcttaatgggaggtatgtgtgtatttgtttggatgttctaaataaaatattgatcttagttttatgattatgagcaatgatgattaatgttgaatgtctgtttggatagctcataatctatgtgataatttaacaattggtatcaagagctagtatatttgattttagaactccattttttgaactaacccattttattttcaaatctgaaattttattatatttttgcttttttcggatttatatgtttgatgaaatgtaaatatgagatttacaattttaaatgggtttatatacttttttggatggatattttgtttattttccattgttgtggaggtaaaatccatttttagatcaatgttttatgggcaatatttattttgtaaaaaatggatgaaatggatattgaaaaatgatagaggatcaaaaatgggacaaaacgcctcaaacgacgtcgaatttggtggccggatgtgggagatatggccgggtcacgaatcgggtcgcgccgatccgagtttcagacccacggacccgtgtgtgcgttttcgggtgacagggacgactgaaaaatgacatgtcattttgcctctgtcaggcaaaatgacatgtcgttcgccctattggttcagcccagccgagcgacatgtcgtacgcacaacgacctagcccccttttcagcgcgaatgactggtcgttttttggaccctctggcttgtcgttcttccaccaaacgacatgtcgtacgatcatttaaaaaaaaagatgaagaaaatgggcgcgtgggggcgcgtgcagcggtggttttgggccatttttccaccattttcatgttttttagttctttattattttttggtatacacaatactgattgcatgaatttaattcatatttggttgatgattttagtatcgtggcgtaaatttgatgatttatttcaacaattagtgc

SEQ ID NO: 238835 - DNA, 1696 bp, Cannabis indica
aggtttcctaaactttatatatgtttatttcattattttagaattcatattaggatgttaataaaacatacatggtagtaaatctagatcctggtaaaatatttccaatacttgtcactgttaaattacttcccattatttgacacaatcttctggggaagtttgaatcgacatatgatgttcttgacaacaaagtcaagaactttttttggaggtgattattgccaggggttcaacttttacctacttggtgaagtagtctattaagactacaacaaactatacccctattcttaccctttgggagttgaccaattaggtctatcccccatactgcgaaaggccaaggagattgcatcatcgtgagctcattgggtggagctcttagaatttttgagaatctctgacacttgtcacatcttttaacgtagtccatcgagtcttcgacattgttgatcagaagtacccctatcaatatatcttcttggataggctttgtcccccgacatggttgccgcagaagccttcatccacttctatcattagccgctcgacttcattcttggtgacacatcttaagagtggcatggagaaactccgtctgtacattactccgtctaggattaggtacctagcaacttttcttcttatcttttttgctttaatcttgccttctagcaaggctccagtttggaggcaagctggaataggtgtcatccaacatgtcgacttcttctaagatggtaatgttgggttcctctaggaactgtattggcatcaaattttccttgtcagcaatggtgttacttgccaggcaggcaagtgcatctactgtaccattatgcccttagggatctaccagattatgtaacctttgaggtgacttagttagtctttgattttgctcaagtaggccactatttttttacctcgagttgtgtatttgcctaggacttgattcacaactagttggaatcgctgaatatgtccaggtggtcagtccgtacttcatgtgccagcttgaggctggctattaaggcttcgtagttggcctcattgtttgaggctttgaacctgaatttaattgttccgtgcaggtgctgcccccaggtgttataagggcaatgcctgcaccaaacaattggtcattgctgcttccgtcaacatggagtttccatgttagtcattcaggatttttctactgctcttgttctcacttcttctctggctcttacttttctcctgaatcttgagagatttcaggagatgagtttatgcatttagccttaaagtcaatcagggcttgacactttatggctgttattgattgatacgtgatctcgaactagccaagctcaatggcccacttgagtagtcgacatgatgcttcaggctttcgtaaaaacctgctacaatagttgattgatgtacacctttatggggtgtgcctagaagtagggccttagctttctggaagccaagagcaaactgtaagtcagcttctccatgagtgggtaccgactttcaacatcgattagtcttttcctgatgtagtatacagggtgttgtacaccgtcttcttctcttatgaggacaacactcacaacatgctctgggactgctaggtccacgcctagctcttcattgtctagtggtttggacaacacaggtggttaagccaattatttcttcagct

SEQ ID NO: 238836 - DNA, 682 bp, Cannabis indica
aatattgaagatatttatgaaaatgccacagtcgtacaaactgagcatgaacatacaaccagcatgcacacaaacatgcgccacaacttgaccaccacttggccaacttgtgggaatcaccttgcttgtaacgtgccatcttggcacgtacgttacattctcccccacttcaacatgtcgatgccctcatcgaccgaccacaagcaaatcttcctaatctcgactcctaagattatacaagcttcatctgaatcctaggtctacacttgtccctctatcttcgttgaaccactctcttggtgacgatctctctcgcccactcttgaacttgatcaaagaacctatgtaactatcgctattcagaaccacccatggagtagttcctacgcactagaatacatcccccaacatgaactccttcgagtccatcacaatggccttttagtcaaccctagtctccttagaatttccaacaaacatgcaaacatcagttcacgcttctagtttgccttctttctttcttaagacaagagcaaggcaccttcagattctataatagtgtaaactaggtatatgaccattccatagttgtacaggtgtcttagggattgatttagatggaacgacatttgaatgtcattggctgcaatttcttctttctacaactccattttgttgtgga

SEQ ID NO: 238837 - DNA, 1896 bp, Cannabis indica
aaccatctcacaggtccaattccaaaatctctatcggaacctcaaaaaacctcatctctatccaacttttcgacaacaatctgaatggaaccatccccatcagagataggaaatctagcattccttgcttacctctcattgtaccggaacaagttaactggcacaattccaccagaaataggaatgttgaggaaccttacaacacttgatctctctgaaaatgaacttgttgggccaattcctccaacattgtggagtctcactaaacttgttaccttggaacttttccacaacaaacttaacggcagcatcccacctgagattggaaacatgataaacttgatagtatttgatgttaactcgaataatttggatggagaattgccaaatactatttctaagctcaaaaacttaacgggtttcttagttttcacaacaatttctcgggaagcattccaaaagattttgcaaggagcaacactaaactaaaccgtgttgacttttccaacaacaacttctcaggagaattaccaaaagaaatgtgtaacgccctggctgtggcaaacaacgacagtgtaggaaaatgccaatcccagagcttgagaaattgttcagagttcaagagagtgcagcagcttgacgataatcatttcacaaatgaaaactttacaaaatgcagtatgtgtttttccatatcttgaattcatttcattcagtaacaacaattttgtgggacaaatgccagctgagtggggtgactgtagaaatctcactaacttgcaagtgaaaagaaacagaatttcgggaaaaataccagtcgagttaggaaacttgaccaagttgcatcttttgagtttggattccaatgagctaagtggaaatatcccaactgaaattggtcgtctaacaaatttattcaagctcactctcagcaataatcatttaactggagaaattcctgagagtctatcaaatttgactggcctagaagattttgacttatcagtaaacaatttggaaggtaagataccaaagtggcttggtacttgtgaaaggttacttagcttgaatctcagtcacaatattctctcaagtgaaataccatatgagcttggaaatttggtccatttgcattatatgttggatcttagcagcaattcactctttggagagataccctcaagcctctccaagcttaccatgctggaaattctcaacatttctcacaaccacttgtcaggtagtattccacaatcattttccagcttaataagtataagttacatcgatttttcttacaacaaattgacgggttcaatccctactggaggtattttccaaaatgcaagaacaagtgcttattattatggaaatctcgggttatgtggaaactctacaggacttaagccctgcaaacgccataccaacagagtaataatgctctaattttaataagcagtcttgtttttggccttgttgtgtttgttactgccattgtaatcactctcatattgtgtcataaattcaaagtgttggataagcacaaaaaaaattcaacaaaaatgacacgcatcaatcattgatatgggagaaggaagcaaaattcacatttggagaaattgtagaggcaactgaagactttgacgacaagtattgcattggaaaaggaggctttggtactgtttacaaggctatattgagatcacaagagctagttcttgcggttaagcggttgcacatgtcagattcgagtgatattccagaagttagtcgcataagttttcaaaatgagattcgaactcttactgaagtccgacatcgaaacattgtaaagctttatgggttttgttcaagaaataatggtttgtacttggtgtataagtatgcaagcagggg

SEQ ID NO: 238838 - DNA, 946 bp, Cannabis indica
tttgagagagctgactcgacggagctatggattttcattgaaagatgtctggagctaattagtgaaggtaccatgagtgtgccttcctatagcgagatggatgcctcgctttagttgtttggattcgtttgagtgttatacttagtttgtataatgtgtattatacgctaagtgccttaacagtcaccatgtctcgttgatgtctcttcatgcgtagcgtggttgatgcctcgtcttgcactactgatgtcgtatagtttctcactaatacacgaggcaacaatttgtatatctttatcttgcttaagaccttacagtcagccagttgtgagtatactctgtcaattccgcatttaatgagttatttcattttcaaatataattttcattatatttgttaattcgtattctccaagtttggcacgtgtcctcctctgaagtgctagccaaatttcaggtataacaattgccccttgaaaagttctttttaaagaaaaagtgcttttttaatgattatagagggtatatttgtcataatccttttttgaaaaagcgcatgtcctctgattttggcggttttgtgggtttgaggtacattagcattgaattaccatcttttccacttctttttaaaattctacccgtaggatcaaatcatttcctagtctaacggagattaatccgagagtataaaataaaaataaaaaccatctttgcattaccctttccatttttgaaactctaaaaattctctaagcttctccgtcgaaaaaccatcaccagatttgctcgaaaatttgcatgccctctctgtcattaacattttttctacgagtttcatctaatttaaatttcgacttcaagcatttggagggatcttcacgtcattcgttgattcacagagtgtagagccgttcatcattccaaaaccaacttcaaacagtaa

SEQ ID NO: 238839 - DNA, 2639 bp, Cannabis indica
gggtccccttgccgaattccccgagaagggatgataggaccgacttcatggttcccgtgaacaatcgtatattgagctgaagatacacaattcaaaatcaaccgaacccaaagctctgcaaaacccattctcctaagcattgcttcaagaaaagaccactctattctgtcataagccttgctcatgtcgaacttgagagccatatacccttcctttccttttctcttcctttttagatagtgcaacacctcgaaagagaccaacacattatctgaaattaatcgcccggggatgaaagcactttgattttctgagacaatggaatcaatgaacggcttcatcctattaaccatcactttagtaataatcttatacatgacattacacaaagcgataggtctgagatcagtcatagcttccggattcctcttctttgggattaacacaacattagcttcaccaaagccatcttcaatcaccccatttgtaaagaaagaccgaaccacattcaccacatcgtgtcgcgcaatagaccagcaatgctgataaaaagtcggggtcattccatctggaccgggacttttatctgggtgcatctggaaaagagccttctttacttcctcttcttggatgggctgacacaactcagtattcatcatggccgaaacacaaacaggaacacattccaccacttctctacaatccgtattagaagaagtaaataaaccttggaaataatctttcataacctctcctagattcgaatcccaggtggcccagttaccttgagcatcttttagttgctcaatttggttgttcttctttcgactactagccgctttgtgaaaataactactattttggtcaccatcacgtaaccaaaattgtttggctctctgcttccaataactctccctttgatcaagagctttaaaaaagctttttttttaacttcattataagcttgcaccgaactgacatccctctttccctgtagtagtttcaactgttttttgtaatctttaattcgatgattaagagaacccgtaatctccttgccccattccttaagtttctcggcacaaagatttagtttaccccccaaactataatcatgaccaatttcccaacaatcttttacaatttcagcacatagcggctctttcagccaagtgttttcaaatcgaaaacgatgatgaggcgcaaaaacagtggaaaggaccggttcaagataaatagccgcatgatcagagctagagtaatctaaattagagagagtagcacttggaaatacctggaaccaagtcgaatttgcaatggctctgtccaagcgaatctcaatccaattagtagagcctctacccttttcccaagtgaaagggtgaccttgaagttcaacatcaaccaaattacactgctgcaacgtcgaattgaaacccaaaattaatctttggggataaggccgacccccccttttctcctcttgccgaactatattgttcatgtccccaataagacaccatgggagtgccgaacgactagccagagtccgaatcaagttccatgtatcctctcgcctattccgatttggttcaccatataatccagtgagcctccaattaccaaactgagtgctgtgaacaataaggtcaatatggttattagaataacccattagactaccatcatcattatttttccacaacagagcaagcccaccagctaggccaatagaatccacaacaaaaacaccctcaaagcccaatagtcttgcaagcccatcaacttttgatttttgacattttatttcacacagaaatataaaattgggtctcttatgagaaaccatctctttaaggaattgaatactccgttggttccggcaattccaacttaacacattcataattcttggcgggcctggataccagaacccgatccattcaagttttttgtaacaccctcttcaaccattatgtcctcacaaataaccacctcttcctcagtaatcacatgcatttttgagccaacattagcaaggcccacgtccccttctgtacgtccatttggcccactgacttggcattctattattctccttcttttggaataaaaaattaacagcccatcatttgagttgtccacctcatcctccacaattttctcccttaaaaacgcctcccctgatgtatgggatttgttttgactaccaatatcttgattattcttctgctggccaaatcccaccaaattctccacttgatttctctccaccattaattgatcattaagaacaccggctgtcaatggcgcaaccacctgattccttctcgggttaaccgaactttccccttgccatctagagtttttcgtggccaacccagacctcaaccatcgtgaaccatctgcataattacgtcttcgcggagctgccttcaactttagatcatagttctttttaatcatctctttcggagtatcaaaaagtcgttcacaaaatttttctgtgtggccgagtaccccgcaaatgaaacagaaagtgggaagatcctcatacttgaaagtgacatgacaaaccagtcccccttgcatttctaattttttcttttcttcaacggcttctccaatggaatcttcac

SEQ ID NO: 238840 - DNA, 1179 bp, Cannabis indica
tacattaatggtaataaataaaagatttagacatcagataattaatactatttataacaaaaaaaagttattactctttttttcccgtatcctccttcttcgtctccataatacacgtgattattatactgtagtattttgagtaaaatatcactaataacctcttcatctacaaatttttatatttagaccaaggataatatagtaatttacctaatcataataccttataaattaggaaacaaacacaaagaaattagatttacattctcaactttcattctctcttcgtcatcgtctccacaagtaagtctgtaatctttttttcctaattagggtttttcaaggtttacattttctgattattactctttttttttgccgtatctcaatttgtataatggccgatctcggcggtggtggtgcggaggctcacgctcgattcaagcagtatgagtatcggaccaactccagtctggtgctcaccactgattctcgcgttcgcgataccaacgatgaatccaccggagaacctgaaactctctggggcaagattgatcctaaaagcttcggtgatagggtttacagagggaggccaccggagttggatgagaaattgaagaagaagaagaaagatcgtgatgatgaccttcttgctgatcttggtccggctaagagacgccggaggcttcaggaggagagtgttcttactataactgaagaaggtgtttatcagcctaagacgaaggagactcgggctgcttacgaggctatgcttggtgtgattcagcaacagttgggtgggcagccgttgagtattgttagtggcgcagcggatgagattttggctcttctgaagaatgatgttttgaaaaacagtgagaagaagaaagagatcgagaagttattgagtcctattcataatcaggtgtttgatcagttggtttctattgggaggattattactgattttcaagatgggagtgatggtcttgatgatgatatgggtgttgctgttgagtgtgagaagaatgaggatgatgatgaagagagtgatcttgatatggtccaagaagaggaagatgacgatgatgaatcagggccagggggtatgcaaatgggggctggggttgatgaggatgatatgcgggaaacaaatgagggtatgactcttaatgt

SEQ ID NO: 238841 - DNA, 531 bp, Cannabis indica
caagaagtaagagaggataaaaatcaaatataaagaaaaaatgaaaaactaaaaaacttcatcttctacaaagtatatcataaaatgaactaaaataaagatacaaaatagaacaattagatcaagattaatcatttttagatgagaattttttttttgtatagtcagaagaagaatgaagagtttattttataaaatttttagtgagtatttataaaaaaaaaatgtagccgttgacgaatagtaaaatagaggttggagaaaaaatagtcgttggtgaatagtgcaatggcagtttagagagaagatatagccgttaataaatagtaaaaataagaagaacaaaaaatggtgttcatgctcttgattttatgaaataacaattggaaatgaaatagtagttataatgacaaatataagtaagaataggagatatagtttttatatttatttatataaatgtataaaccattaggaaatattactttctattcatagtaatatgttaaattagattaacaataataaaga

SEQ ID NO: 238842 - DNA, 2138 bp, Cannabis indica
gtctgcagctggtgtagattggacacattaggtcctgtaataatgatatcgtctacgtacaccagaagagctatgaaagtgtcttcagatcctctagtaaataatgtataatcggcttgagattgcttgaatccttcttggagaagagcattggatagcttcttgtaccactgcctggaagattgcttcagaccatagatggatttgtgcaatttgcatactagatttgttcttgcattaagaaaagaaggcagggtcagaccttgtggtatttccatgtaaacttcctcgttaagatctccattaagaaaggcgttattaacatcgagttgtaaaatgtgccagttcttaatggtagatatagcaagaagtaatttaagggtgaccatctttgcaacgggagaaaaagtatcaaagaaatctagcccttcttgttgcgtgtaaccttgggcaacaagacaagcctttagtctttctattctcccatcactatggtatttaattttgtaaatccaacgacatcctatagctcttttgttggctcgaagagggactatagaccaggttttgttatctgaaagtgccttcaattcgcattgcatggcttctaaccaagctaaggtttgtatggattcaaagtaagttcttggctccttggtggacgaaactggaaggataaaagctttgtgagattcagataagttagaatatgaaatgaatttatcaatcttatgtggagttgaagaatggtcttggatgagtgagtagcactcaaaatctcttaggtagcccggtggtttggattgtctactcgatcttcttgggaggtcctgggttatttgttgtggtgaaactgctggtgtaagtgaaacttctggtgtaaccgtgggggcagatgcttgttgtgttggagcttctggtgtaccagtgggagcagattcttcctgattttgatatgagttactactgagctcatctatgtgaattgtaggatttgaagcactgctaggacctgtaggatactcacagtcaggtaagtcatttatcatagaatgaggaagtatagtgagagacaaaggatatatgttagcattctcattattttgtttctcaaatagataaatgttttcatgaaacacaatatttcaagatacaaacatttgtttattattgatatcatagagtttgtaacattttacaccttgagggtatcccataaggatacaagtacgggctcttggggagaatttgtaactctggtttgataaagttgaagcaaaaaccaaacatccgaatgatctaagatgttggtagttaggcaacttatcaaaaagtaattcatatggagttttgttattcaataaaagactagggattcgatttattagataagctgctgtcaacacacactcattcctgaattttatgggaacacgtgactgaaaataaagagatcatgcgacattgagaaggtgctaatgttttctttcagcaacggcattttgctcaggcgtttcaacataagagaactcatgtaaaatgccgtgtttagaaaaaatatccttaaacaccagttctggtgcattatcagaacgaaaaaccttaaaaacctgcttgaattgagtctgaacataggtcagaaattgaggtataatgaagctaacatccgatttgtgttgcatcaaaaatatccaagtgaatctagaaaaatcatcaactaaagtcaaaaaatatctgtgatttgtgtgtgacacaagatgatatggttcccaaacatcacaatgaacaatatcaaagattttattagaaaccgtattgctatttggaaaaggaagtcttctttgtttagcaatagggcaaacatagcaaggagaagttttatgtaaatcagaaatgttacactttaaagtattcttaagcagattcaaacgtttgttggataagtgtccaagccgtgagtgccaaatttcagctgagacagagaagacttgagttggatttggtgtagtatcaagaatttagagatctttgacattactacctcttctaatcgtcttcttgctggctttgtcctgcattgtaaattcatcagcagtgaaataaaaagaaataggggaatttttagtgaggtaacttac

SEQ ID NO: 238843 - DNA, 759 bp, Cannabis indica
ggtacacatccttcatttcttctttctctttcgttggttaggacattttaccgttgataaaataaaatatccccctaacataatggatgtcctctttgcatcttccatgttgaactttggaataattttcttaatgtacccggactgctttaggctaacagttccttccattcagtttcgtgagactttgataccaagtgtcctaacaaagtaatattctgtctagaaaactcgtacactagctgtgcgcaaaggactaagtccataagaagaagtcccattttttcatatgtcatgttgaaaagaatgttgaaggaagtcgcattattaatcatggattgagccactgtcatattggtgatttgcacttcaatgactagaggatcattctgaggatagataacatgatcgacacctttctcattaaataagacgacagtttcctctctgtgtggttgttttagctttctttcttccacaaccaatacatgttcattttttgtttatactagattgtctatacatacctttctctggcattgctcaaatatcaagtaatgtatgggcccctaataataacttgcaagtgcctgtctactggtgggggcataaggtaattctgattattgtcttgttgggtggcttattggtttggccagtcttaatataccaatgtatttttcctaatgaggaatttgatttcctccttcacgttgttacactcattggtatcatggttgaaattgttgggttttatgc

SEQ ID NO: 238844 - DNA, 1059 bp, Cannabis indica
aacaaagaaattcaagtcaatttcagagtattcgattcagaaaatctcttcgcaaatttctgtacatttttacaaatataataattttcaattgtctgtacaaaatttaattaccatgccctggcaaaatgtcctctcaatctaaacaaaaccccaccaaagatcactctgtttcggcgagattacggtacacaccgacaaaacgacgtcgtttcagtaccgccttgccatctcttccccatggaaggaacagaagtttcaaaaaaatacaccaaaaaatattgaattgtatatgttatagtttttacgaaaattacagaattagtgaaaaaaaaacgaaaagataaaatcactcaaacaagccttaattcagtcgggttagaaaccaaaaaaaaatggtgatcactgatcagggattaaaaaggcgattgtggcagcggcatttccaaacctaaaggcttgtaatcaaagtacttgttacctgaatctaagaccacaaccgggtcggttcgggtgacgcccggtcgaaccggttcgtgactgggtaggcttgggacttgaactgccatgcaggggtggcacgtgttgcacttgttgtggcagcttggaggggtcgaacccagtcgggatttttcctcaacctcaaccaacaacacctggaattcctaattctgtatcaatcaaccagacccaaaaaaagaaaaaatctataaaattcgtaaaaggggtgtttttttatatatatatataaattaccttgcgtgaagaagaaattggtggaatgtgtgagtgtgaccgagacagagaagagcaaggagagagaagaagatggagaagcataataacccaaagattaaacaaagaattcatggtgtttgatgacatgaaattcatatcatatcatgtcacaccatgaagtcatcaactggtcaaagctttagaaaaaaaaagttagccaatttagtttaaaactcggaactggggaagaaagaaattaaagagagagagagagagagggtatagtagtgagtaatgaaatatataataataataaacgaa

SEQ ID NO: 238845 - DNA, 806 bp, Cannabis indica
agtcttatggtggttgatgatgaaatggcacagtctgcggagcagaatcgccaggcccaatgagtatcttatgctagaatccacgggaactggagaaccctggtgtagtaagtgcattgcgaatttatgcgcaagcattccccaagcctggtcttcctatccgagactaagttttgtggacactgggcagaaagtattcgaagacatattaattttgctaataacttcaagtggattgtgtggggagcagtggtggacttttattgatgtggaatgatgattaggatgttactattaaaagttactctattggacatattgatgctcttgtacaatgtccagagagtgagttgtggcgattcacgggattttatggcaacccaaaagctcaccttcgcaaagagtcttggttacttcttcaacgtttaaaataactctttaatctaccatggatttgtggggggattatgatgagattttatctatgtatgaaaaaaagggcgggatggaacacaatgttatggcgatgagtgagttcaaaaagttcttgatgactgtatgttagacgacttggggtatatatgaagggtcgattttcatcttggtcaatgaaagacaaggcatttcacatgtccaagaacggctagatcgatttgtttgcaatcaagcttggtctgagttgtatccttcagttcgagtgtgccatggtgagtttcttcgttcaaatcatcatcctataattacgaaacttgagaatgttgttgtaaagaatcttgagtgatttaagcggcaattctggttcgaac

SEQ ID NO: 238846 - DNA, 3480 bp, Cannabis indica
ttttttttagaattgctaaaaggtattaatagtactaagcgcattctttcgtgttaaactgctattggtgtaattaagttgcgggtcctatataatttaagaaaattacttttaggaaatatcgttaaccaatcgtaagatgacacttatgaaaactgctgcacactactgttgtctaatagtaatgttctatttttttttttataatcatttattatgtatattatattaaaaaatatttattatattatatataaggatgatagaaaaatgtcttgttgtgtaatggtgcaaactatttaatttttaaagagcttgaataccactcatattcaataataatgctttttattaaaaaaaaacatttcattaatgagcctccaagattgacttcaattagtttttgttgattctcttcagccaatgaaagctcgacatcttgggaacttagttaattttgcatctacgcacgtggtacaacatttcatcgttattagaaaattcaaaggctaaaataataaattacaaaatgtcaaatgataagataaggacattagtgtcaccaatcagaggctttggaaggcattgtacaacttgtcacgattaaatcggacaaacagagaattattaaaaaaaaaatggaaaaacttgtcatgattatgacattacttaacagcaaaaatattttatttattcttaaaagaagatagagagagattttattcaagtcgttaaccttaaaaaacaatcaaaaagaaatagaacacgagcaccgtattgctatgtgcggtgtggcacctgagtggagataatacaaacaaaacaatgaaaaaataacctttttgactttaggtgacttaacccaactaacttaatcaattcactcttgaacaaaattaaatacaatacaataattttacttttaatttattccttaaaaaaaatgaagatgatgatgaacaaaatttctcccaagagtctgtgtctaatcttggctcataccttgtattggagttgtttaatccacatcggagaatcaacatcaacatacagcgaacacgcatgtacaaattccacggcttctgcttctactttatcccaggacgccacctacctcgccaatctcaatctcctcctctcctatctcaactccaacgccaccaacgatgccggtttctaccaaaccacagtcgccaccggcactcaagacgcatctaccggcctcttccaatgccgcggagatataactgcttccctgtgcagagaatgcgtcttaaacgcttccagagaggtacttaaacggtgcccacaagaaaagcaagccgtaatctggtacgacgtgtgttggatacgttaccaggacagctctatcttcttgcctaatccgggaatagtgccatcaacatcgttgcagagttcggagactgtgagggaagccgagcggttcaacaaattgttggcgggtgttatggatgcactagcgaacaaagccgcgaattctgggtcggttaagaagttcgcaacggctgaaaataatttcacgagttcggagaccttgtacagcttggcgcagtgcacaccagacttgtcggcggccgattgcaacacgtgcttgcgtagcgccatcggttttttccctcagtgctgcagtggcaaaagaggtggggccgttttcttgcccagctgcatcgtcagattcgagttctaccccttcttcaactccactactagaccttcaatttcaactgatcaggttccactttcaggtactcacttaaatttttgtagaaagggaaaactatgctgagcaacaatctattgaactttcatatatattgtgcagcaggaaaaggaaaaaaatcaataattacaattattgctattgttgggccaattagtgtagttcttgtagttttcttgattggcttttgcttcctccgtaataaagcaaagaagataaagaaatatctctcacttcagcggcaagacagtggtaattgtttttctgtactttattatattatataattgattttttattttatttttcgagagcgttttatgaatttaggaggaaaacaaaaattgctctggttataacttaatatatgcatttgtcttgtggtatagtccggaatgaaatttcaaagggagagacatttcaatttgcaatggtggagattaagactgccactaacaacttttcggatgagaacaaaataggaagaggtggatttggggaagtttacatggtatatgatagttttatgataaaattctttgatatgtatattgcaataatttatgagccgaattaaaagttcttatcacattagtttttacttttagggtacgctgaatgatggagaaaaaatagctgtgaaaagactaattggaaatttgggacaaggagcagaagaacaatttaagaatgaggccaaattaatggccaaacttcaacacagaaatcttgtaaggctattaggattttgcttggaagcagaagagaaaattctcatctatgaatatgtgactaataaaagccttgatttctttttattcggtacggcccatccctgaattctgtgtgaaattctttttccatacattctaagttaagaaacgtattacatgagaatgatactaacctatgaaaagtaaaacataataattcttgatttttaatgactttttaggtgttgaattgattaaagtgtgttaatttactcttaattgttctgtctaattggattcaaatgcctgttacagatgaagataagaaaaacttattagattggtcaacacgatataagattatatcagggattgcgagagggattctttatcttcatgaagactctagactaaaaattatacaccgtgatctaaaagctagcaacattttattagatgaccatatgattcctaagatttcagattttggcatggcaaaggtttttgttgtggaccaaactcatggaaataccaatcgtattgttggaacttagtaagttttaacttaaaagtcctatttattaccactgcttacaaattgaatactcattaaccttcaagtttaattcttagaagtattaataatcatgttattttgtagtggctacatgtctccagagtatgccatgcatggtcaattttcttttaagtcagatgtgttcagctttggagtgttggtgctagagattctcagtggcaagagaaacaattttttctatcaatcacacgagggtgcagacctgttgagctatgtgagtgacatgttcatataagttactctgataaggtcatgtgtattgtaatacttgaaattattgtgtgtaaaaactgtctgcaggcttgggagctttggaaggaagggactttcttggaattgttggatccaactctaagaaattccttctcaagaaatgaagtggttagatgcattcatatgggattgttatgtgttcaagaaaatcctgt

SEQ ID NO: 238847 - DNA, 811 bp, Cannabis indica
ctgcttaccaaacacttttttgtcacgacttttttgagaagcaacttttaacttttctaaaagtcgtgccaaagtggccctaagtaatgtggctagttccgtcattgctggtcatgattgttataaagttactctccaacatttttagaattgtcatggggtcatttataactcccctaactttttacaaattaattttgtgtataaatttttgccctaaaaaatttatatatatatttttcatttttacctttacatatttttattttatttctgtaaaatttatatatttttttatttcatcccacataaatttattttatccctactaaatttataaattttgtttttatactcattaaataatgtagctagttttatcactgctggtcggaattgttataagtaaaaacagtttcatgatatcatgtgattcgagatacttagtacaattatatttttatttattattgaaaaagattgtttatttttataggaaacaagtacatggtttcttgaagtatttttcatggagttttgtttagggactattaaataaaattgttgaaaattgagttcagggtcctatttttataattttgaaaaatataaggctaattttatcatttaacaaaacagagggtctaattggtaacttttaccaaatttttttaatggaaattttatttacaccacaaatttttttaaaggcaacccattttaataattttattttatataaaatttatatctttaattgtactaattttttttaaacttttttcctttcaattcatatttttaaaaaata

SEQ ID NO: 238848 - DNA, 629 bp, Cannabis indica
tgttcatcaattgatattgttttcttgaaaataacaaaaacaaaattatataatatctacagaagaataattaagttgttttcatgttattgtgaagcttcttttgtattgtttttgtaacattttatttcaaattaaaaataaaatcaagttatttttgtgttgttgtaaagtttgttatgaattatttatacattacaccgattgttcaataattaaaagaatagggttttacatgttaaaataaaaacttatcttattatctcttatatattgacatgaaaaataataagagaacacgtattatgttaactttgaatcaagtgggacaatgatagaaagagattgtaaatataaaaaaaattacttatatttaataataacattgtttgttatttaatttatagttgttttaaagctgtaaacatgttgtttaactttattacttttaaacatgtttaattgttactttttaaccatgttattttcacgttgtttgtacgttgatcaatttcagtagttatttatagatttcttaaattatatatacaattatttttatgtttatattgttgttaaatagttattaacagttaaaaaatatattaacaattattatcttttttcta

SEQ ID NO: 238849 - DNA, 1904 bp, Cannabis indica
agaaaatgggatggaaaaatgaaaaaatggcaaaattgcaaagtggggcccaatctacaatccatggccggccacacttagtgtaatttaccatttatttttctattattttatgccaaataattctaacctaaacctaggtggttacctataaatagatagtgatgggttaagagaaagagattgatgatacatcacattccttcagtaaaattttaagcattctttctctataggccgaaaccaccattccttctcttttcttcttcaaactattcaaccttttgtggaagattgtgaagaatccaatcaacaagaaggagaatcggcctctagaaggcgagaaagagatctaggttcagatcttgataatgctctactactgaaaggaatcaatggctagagatctgaactgaaggagtcattatattccgctgcacccaatgtatggtttccttaaaccgttatgtgtttatttcattgttttaaaattcatattaggatgttaatgaaagatacttgttagtaaatctagatcctggtaaaatatttccatcatgatcagccataaggaatcttgctagtggctgcccaaacacatgatgatagcgcgggctattggtgaccctgagatccctggtcggccccccatgtcgttggttgtcgggatctggctattctctctattagaccattgaggcaaggttcgtcctccctctggcaagggaagatctgacctagtccctgaggggccaaattagttagcttatttatagaccctccttgatatatcaatttgtgtttcttaagtggatctctgacgagatcttggcctcttacattggttctctagttgaatcgtcttattagatcgctagcctctctgctgcgacaatctaactctacctagcaagagcgaaggatgtactcctagtcatccatccaatctcaggaattcacgtgtctactgagcgaataatatatctcaatcaacaatgcatgattcatcaaggaatttacgtctctactgagcaatacatcgcaatcagtagtgtgtggttcatcaattaggctagcttggcggatggactctctaagtctggctaaatttcttttcccaagtccacatggggcttgctatagtaggcttgccaattcctagtcttgtctcttctgcataattctggggacgagatctagttgttgttcttggggcttgttcgccaaaggtccttccttcagttggaggcgcctgtggatggtcctcccttgtagacaggggccgattgttctgattcacagggatgtatataacatcgtgcgcagctatagtctccaggtttgtggtgcttgccaaaatggcagattgacgacatctacagtgttcatgggaattctagttgtggctgaaacatggacaccaggatctataatctgtgggtctataggaaggtctgaaaatgcagatgttgcaactagagttcttcttgtgttaaccatggaatttgatcagatattatattaactcactctcaatgaaagcaccaaactgttaatctcaaaaagtggccaaccaaaagctgagtcgtatgaatctgatgcttgccacgtgttacacaacaagaacaaaaatgtaaataagtcaaggaattttatagaggtttggccccctttagttagcgggtaatgacctgttgggaatattttaccaggatctagatttactaacaagtatgttgaaataacaactacaagaatgtatacatttgtcggtgaaattataactgtgtcggcaaaagtatacaattgtcggcaaaagtcataaattcgccagcaaaagtgggcaaaatttttgtccaggtcccacttttaccggcaaattcatttttgcaggtaataggagc

SEQ ID NO: 238850 - DNA, 1218 bp, Cannabis indica
taagtggacggaagccgaaccactcgcaaccatgacatcaaagaaagttcaagagtttattgtgaagaacataatctgccgattcatactgccatacaaaatagtttccgataatggcaaacagtttgatagccaatccttcactgatttttgtgcgaaccatggcatcatcaaaagtttctacacagtggcacatccttaagcaaatggtcaagttgaagcagtcaacaaggccttgaaggacacactaaagtaaagactcgaagatgccaaaggaaattggtcagaggaacttcctgaagttttatggtcatatcgaacaactgagaaaacgacaaccagatagactccattttctatggcatacggatacaaggctatgctgcctgtagaactcgagccaacatcccacaagagattgacgtacaaccaaaatatcaatcacgtactcctggccaaatcacttgatgaaatcgaagagaagcgaaccacgactaacttaaagttgatagcccatcaataaaaagtagctcggtatttcaataaacaagtgaaggcttggaaattatttgttggagatatggtcttaagaagggtatttttgaacgccaaagacaacacgacaagtgtacttagacctaactgggaaggaccatatcaggtggtcgaagtcctcgaatccagagcatacaaattaagtaagtatgatgaaaaaatacaacttgttctagtaccacggtattggaatgggggacacttaagaaaatactaccaataaagtaccaggtcggacgaccatactaagtactgaaagaacattcacttttaagtgaatggcctgctgagcggacaacgctcaaaggttttggcaaaatgaaaagtactcaggtcgaatgaccatcatttaaagtagaatttcttatttttgcaatttggttgatttcatgttaagctaaaagatcagattagatcaaatagccctaatgtaagttactacggtaacaaacacattttcgatcaataaatgaataaagatgtttatttcaaaattcaaattgagtcaaaattactaacatgttgctaatttaccatccagcgcatacaaaaggtctagtcgaacccaagactacaaatagataaaaaagcatacttgtaaaaaaaaaagtgaccaagagtcataagtctgctcggtcacttgcggggcacctatacctgtac

SEQ ID NO: 238851 - DNA, 1604 bp, Cannabis indica
taaatttttataaaaaaataaataaattaatgttgtagaaaattttatcatatgatttcttatttaaaagagaaagcaaattaacgaagagctatctttaaatattacagtaaaaaataattgagattgaacaattctcccataaaatagagatttaaaaaatatattaaatctatagaaaattcattatatgatttcaaaattgttgtcatttaaaatcgatgttatcatcacatcttaattctaatcgtcactacatcaaagttgttattatcgtatcacatttgtggtcatcactatacttgagctaactgaacatatcttgattctgaaagcaaccttcgagcataatcatatacaattaaaagattcgcttattttgtaaaagattcacttctttctttgcttcttgcttattttatttttcggctagatcttgtaactttatggcccaggccaactgggcttttatccataatttatatggttgtattgacactactattattcctaagaacatttgctgtaatgaccacgaggtctaatatattatgaatgaatgaacgttgctttttaaaaatatacaattaaaataaataaataatcgtttgaaagaaaaataaataaattatttttcatttaaattaaatacaaaattattgtgaatatatcaattttttaatatattaaattgtatgaattaaattttgagcagaaacaaaaaaatcaagcattttttgaaatgaaaatcatgtaactttgttttgttttttttcttcttttgtttgaaatgagatattaaatttataatggtactactgtattatatttgaaatcataacttcatttttttaaatgagatattaaatgcataacagaatcaagtttagctgaaaaacatttttttgtctttttgtctttttttgaaaatttaatataaaaatatataaataatttttgagaaattttagattacccatgtcattatttatagggatttttttattattattttaggataaaataatctaaaataaacatttatcttattccaatcaaaactaaacatttatcttattccaatcaaaactaaacatttatactttctactaatttaaaaaacattatttataaatttttaattacaaaaatacggtagagatgtgaatcccatgtgcaaaacgagagagtaagatacacatgtggaaaatataggcgagtgagactcacacgcaagtgggggcaaagtcattggctggcgcacgcataactgtaacgttagaaatgcgacagtgactctgtcgctgccacgtggaagttttgacgaagtgagcttgagcgtgttggactgcttttttctcaatacaatagatatgcaaaaacaactaaatagcaacacaaaaacgacttgacaacaaccaaacttacaaaaaaaaaaaaataattaaacattaacatattgctttaacataattaaaatttataaataacacaacaacaccgttaaaaaagcaactaaatgaacatataaaaaaaaattagaaattctttgcaataaatagaaaaaattatgaaacacataaactaaaaaaaaagtatacaaa

SEQ ID NO: 238852 - DNA, 464 bp, Cannabis indica
acaatgaagtaccaacaagcttttactcaacaatattattcattaattattaaattcaattatatcactatgagctaagttgaaagaaaaaagaagtaatagttgttaattttgatttttcatcaaaacttaattgaagtgatccccattacacttataaattagttggcagaaggccatgcgaacccttaaaattgttagaccgatttcttataatttcatttaagggcatccctagctaggttcaacaaaaaatagttgctcaatttaccttatttaacacacttttaattcttagccaatcacaatttatttattttttaattaaacatataagaagttacggtagcttaatatgaaattcttttcttcaccactcccttctctctcctaccatttaatataatatgaccaatcatccaatccaatgacaaccgaccgcccaacattagatattcaattgt

SEQ ID NO: 238853 - DNA, 1026 bp, Cannabis indica
agctgtggtacatcttctcttggatattaaagttcaaggcagcctctttttctatctgttggacagtggtatcatgcggttgatcttgagcttgagttctagcttgaatgtacaggtccctcgcttcttgataattttttccaatatccccaactctctctctattaaacctcttgatggagtgtttcaatctcataagtttcaaatacaagcctatcacaccctctcttctcatcggtttctgccagctatcaagaactacatctttaaattctgagtgatcagcccaaaaattatagtatctaaaatgtttgtatccaatctccacattagtcgtagttgacacaaaacataaacaatgatcagagatagtctcccagctacagtgagcttttgtcttaggaaagttgtctgtccactcctcattcacaaaggtgtgatcaattttagaatagatccttttgtccccatcttaattattagtccacgtataaccagaacctgtcttagggagtctgtccatgtgactttgagctagccactcagtggaatcttttagatcattcaaagtgacctccttgcctcccttcctatcctccaagtcaaacagagaattaaagtcccctgttattaaccaaggcatagtagtgaccttgagattgattatcccctcccaaagattctttctctcctctcctgtattaaagccatacacaaaagtgatgttcattgcttcagaatagccagccattttcacataacaatgaagaaactaagggtcttctctaacaacaataactcaagtaaaacttctcctccatatcaccaaaatcctattttcaacagtcgtgctagtatactaatcccacttagtgaacttcgtagccatcatctcactaactttattattcttgagtttagtctccaacaaaccacaaactccaattttattcatgcaacacaattcaaagacagtattctgcttctccattttattcaacccctcacattccaacaccctatatt

SEQ ID NO: 238854 - DNA, 1381 bp, Cannabis indica
attttataataattaagttcttataaaattaaataaatttaataaaggttattataattcttgtttaatataggtataattaaatatgtaatttctcaaattaaaaattttataattttacgacttacaaagtcgctaaatggatatttgctcacaagctaaatggtatggtaaagacctttactataccgattaacattatttgtaataaccgttaagtctaagtttatttatctattgactagccttttttaaaaaaaaaaaaaaaaatactcccataaagtaaaaattttgggtcattactggtcccctcatctgaaaatctagctcatcccttttaatacatcaatatatatgatattatttaatcacatatttttatctcataattttatagttaaatgtgttttttatcgactatttctcaataactttgtaatttcaagttacggaaaatttataaaagtaacaaattttgtaacatatttgaaacttggttgaacattcacatttttaaaatgtcatgttaaaaagtcttacattgctaatgtgtggaaagataatagaatatataagagaaatgagctacctctcattgccaattagttttgagataaaacctcattcattttattccaaaactttaacatggtattagagcaaaacaaaccaaacaaacaaaaaatctctaacgactatccaacaacaaaaaaaaataaaccaatcaagtagagccgaaaaaaagagctatcgaaaatccattaccaattaattttaaaataaaactccattcattttattctcaaattctaacatttcaaaaagtgataatataaaaagcatatctgtttctcccatctaaattctttattaattttccctctccatatctagctatctgtttaaattgcttttctagatcaggttggattgtacagagagatttgatcgtctatagtacaaattcttttctgctctttttttttttttggtgagtagaatatatagtctatagtacaaagtcaataacaataaggtcaaatataacagtaaaaagaaaatgcatagaaagttaatactcatcattgtacccaaaatgattacactaccagtaccactagtccactatacgtccgaacacactagcttggagtatttttctatatataaatacttattattattagatttagaatagcgatcattaattttacgtaactatgctcactcctaattatgaagctactcataaaatttatacatatataaagtatacttctttaatcttaatttattttttggtaaagacttaaaattaagtatgacctaaaaaactattaagagaatacacaaaatacttaaaaatttaattttttttttt

SEQ ID NO: 238855 - DNA, 1417 bp, Cannabis indica
aaaaaaaaaaaaaccttaaaaccacttactgaaaattggttcaccatttttaatagttattggtaacattatttagtttaaagaaaatctccaagtattagtgctacagaaaaatttacatattgttaaatatacatatgtgtgagtcttatctaattatgatgcttacaccacttatatattgtaatagtgttattaactcatatgttgaagagtaaaacaaattaaaatttattcaaaatttggaaggatgagagaagtattagaaaaataatattacaattactttgatgaattgatacaagtagtgtagttaactataagatttgggtcacgttttaattatataaaattatagtctttggaaaaatatttttaattaataatatgaggaattgggcacgaaaggaacaacaacaccatattatatttaataaatttaattagtgcgcctaatagggctaaaacgtaacgttgaacactttcttatccgtccaacaatttcttttgaaaaaatatttatacaaacactagtgtttttaatgttttattatctattgtttcaaaaaataataattttattatacattcttatttttgatcaaacaatcaagccgagccaccacccaccagcccttcgtttcctcctacatttatcggacatgaagcaatcgctaagttaccgatatcattttcgatgtgaaaatgataatttatacgaaattctcacacattattaatataagattctctaacaagttcaaccatattttctaaccaaatttggctaaccaaagtgaggcacgaaagtaatactatcagaacaagctctttgtatatcaatggctttagaatcgctagttgtttggagtcaagctataataccattttgatttaaagcatcttcaataagggttgtttattagaatggtcttgttacatatataatatggtctaatttttaaggccaattttatgtgaagtgttgcttaatataaacaatgactatactataatttttttgttttaatttttttttattataaatggacactcctataataatgtatggttttcagaagcttcaaatcgaaagaccaatgaaaatatgttgttgttggtatatccatgatgaaattagtaaataaggtattgcaatcggttaaatacaaggaagaaattacatttttttgagttaattggctgggactcgatcccatgatcctttttatccaattaagcttgactcaagtggttaaaaattgttctatagaagtaggagtaaaataatataaagtttcacaaataagtgtgaaatttgaaatttaaatgggaaatttgattttctatacttagaaaatcttaaaaaaattccctaaatacatacttaataatattggtaatgtatgaccacatt

SEQ ID NO: 238856 - DNA, 1125 bp, Cannabis indica
tgtcgagagaagttaagagtcaagaaactacaacttgagaccctcaggggtaatcacgaagaattggttgaagaggtgtgtaggaccagttcgacgtggcatacctttaacaccagagcccacaaaatgaagggtttgtcgcttgtgtcagatgggaaaggtgtacaatgcaaaaagaaaattactttttgtccaacgcccactatcctcgttggttttattgtactaaatcagatacgcagcagaagagtttcgtattatctgattatcattgtaccatagcccctaagatctccagatgtgtgtatatcaaatcaaaacaaccaaaaattataagtttagaatatacctcttgaaggctattagggtattctcgacatttctcgtacgttgtattcttaatccagttgatgaggaattaacaatctggactcacaccagtgtcttccaaatccaccacacataaggaataattagagctattaggataaggtgtaaaatcttactcttgttaaattctcaacacatgagcaagaataattgagaaaaaaaaacagtttcctttttctctctacagatttcgaatttagcagtgtaaagtatcatcctaatttcttaaaccaggctagtagttaaatctctttaattaaattattatttaattgtttaaataataaataaatatctataactgaattcatttactaatatttatgagagaatctctcaactacttgaaagaatatctcaacaatcttgaaatatctttaaccacttttcaaattagatatttacctaattaaattaattaacctaaaaaagtaattccaatagagacaggaacaagctgggcacctacaactgtctttaggacatggttgatgtcttttgtcctgataacttttatcttgacaaatattgtctcgacaaatttgtctaaactatttttatcttttttccaatctaattaatttgaaaaattatttattgattacaaaaataaataattactattttccgattcaaaaaagattttcttcgatcatctttatacaactctttatccctatccttgatagtgtttcaaggtggcaattcagggaccatgtgttggaaattatttta

SEQ ID NO: 238857 - DNA, 2204 bp, Cannabis indica
tggttagccaaatgtacgatgattgtacaataatttggtgcaggattgaggaagagatggaaagattgttgatgctaaaaagcatggtgatttcaggcacatggatattgtagtttccttcattcggtggtcttcaaaagaacaaagcaaggatttgaaaattgattgtagaggttcctagattggtattgaagggttgcctttacacttatggaacatgaagaccatcaggaagattggtgccatgtgtggtggcctgttagacgttgagaagagatgaaaagtagaaaagatagagagagaagatgtatttttgttattgatattttagtatttgtttacaaaggacagagtccactatatatatatatacaaaggagaccaagtggggtctatgtacacacaaaaatatataatagaataataaactaattatatacaaaagaacactagttaattatttgtcttaacatccccccgcaagttcatcggtcttggaagaacggtgagcttggaccttagagaaagaaaacgttgggcagcaagaggtttagtgagagaatctgcaagttgctcagctgaaggagtgtgacgaataagcagagactgatcagcaactttctcacgcacaaagtgaaaatctaactcaacatgtttgatccgagagtgaagtacagggttggagccgagataagtagccccaaggttatcacatagcagaactggagcagaaggtaaaggaaagtgcaggtcctgaaatagagagcgaagccataacagttcagcagtgccattggcgagactacgatattcggattcagtgctagagcgagaaactactcgttgtttactcgaagaccaggaaataagattaacaccatgaaagatacaaaaggcactgcggcgatcatcggggcatgaagcccaatctgcgtcggtgtaacataacaaagtagtatcaggagagggttggtagaacaaaccgtaatcaatcgaaccagccaagtagcgaagaatgcgtttaacggcttgccaatgagagtctgtgggagaatgcataaattgacaagctttgttcacactaaaggcaatgtcaggacgtgtcaacgtacaatactgcaaagcacccactatagaacggtattgagtgccatcagccaaaggaacaccagaatgcatcgaaagaacactagtagaagacatgggagtaggcattggggaagaatcagacattgaagcacgagatagcaagtccaagatatacttggactgactaagatgcaaacctgtagagttgcgatgaacctcaataccaagaaaataatgcagcggaccaaggtctttgatggcaaactcagctgccaaaccagcgataaaccgattgatgtgagcatcattaggaccagccacaataatatcatcgacgtagacaagaaccacaataaaacaaccagggatggacaagacaaacatgctggaatcagatttggaggcaagaaaacctttgtgcagcagagatgcactcaacttagtgaaccaggcacggggagactgtttcagcccatacaacgatttgtctagtttacacacaaaatcaggttgcgaagaatcaatgaaacccggtggttgagacatgtacacatcttcggacaaatcaccatgtaaaaaggcattttgcacatccaattgtcgaagacaccaatcatattggacagccaaggaaaggactacacgaattgtagtaggcttcacaacgggactaaaagtctcaaaataatcaagaccctcagtttggctatagcctttagccaccaaacgagccttgtaacgatcaatatcaccattaggtagtaattttaacttgtacacccacttgcaaccaataacacgagaagcacaagagcggggaactaggtgccaggttttattacgacgtaaagcaaccatcttagtttgcatagcttgcaaccaatgagaactcttggctgcctccttgaaggaggagggctcgataggggttcctgcataaatactcaacaacaaacgtggtttgcgaatcccagctttggatcgcgtaaccatggggtgatcattagtagttaatggagcaatagactcaaaattatcatttaaatcagccactaatggaacctcaggaaaattagaagcaggaggagtagggatactaagagaagggggggtag

SEQ ID NO: 238858 - DNA, 1098 bp, Cannabis indica
tggaagaggaaggaaaatgaagtatcaatatgcatgttttttcacatttaaataagtagtattaatatgtttgatatgttacgcccaaaatacttcatttccttcctcacaagagacatagggcagtgtgtaattgtagaataatggattaaatgcctctgacatgtcctttccaaaccactcgcagatattttttccatatcgcatttaatgcatccatagtgactcaagttcgggatctagcgaccgaacctgtgtattttatccagctcctcgaggtgggcttaattccctaggcttggcgagatgtgacttgagctcttagaaggacttcaaggacatgaccaatgagtccccgacggttatctcaaaaaggtttatcataattattcccggtatttagaatttcatgccacatggattattgccacgtgtgttgggagaaattagggacaaaatgtattaatggatagtgtttgacactttattcaagtttaatgtgattcaattctttcccaattttctttgtgtatttatttcattcgtacttaatttcttttatttatttgaccatcaattaactatttaagatatcaataggaaatttgaaaagtaagttttgattatgctatagtgacatagattttaatataggacgagagtacctatatgatttatgtagcatttaggatttgtatttctcctatatgtttaaatttatcacgagagtgaaaaatttgtatatagattgagatttatatgtcctagcctcaatataagtttttttttagtaaatttactatcacatgaaaattgaaatttgagtattaaattatgttaaactatataaagtagattcaattgaaattaatcactctaagctttaatcattgttaatttcgctttaatctatttgttttctatttcaatatattttaactttcttttctcaatcattattatcgccaaatagaatttaagaatttaattgcttggtatttaactatagtccttttaggatcaatctcactcttgtgagtctattacttgattcgactatgtatacttgtgtactagaaaatccataacacgaaccac

SEQ ID NO: 238859 - DNA, 1035 bp, Cannabis indica
aatagaggagcaaaatttgacctcctctgtgtagcttcggttttagagaaaagaagagagagggaaagagagaagaagtgataggggggtgaaggaaaaaagagagggtattttgggcataatagaaaaattgtcatatattttaaatatagggtattatgagttttgaggataaattttattatttattaagcatacaaattcaaatttcccatatttaaacaaaaagtaatcttgatgatgtaaacataaatgtttgacacatgaaaacattcatgaaaataagttccggaagatttgtagcttttggggtttgatgagagagagagatggaagagaacttaattagggcttttcgaggatttttctttaaatctaaagagatatagagacatgttttttttaattgaaataggtagaatgaatatgttaaaataaattaaagataaattggtatgaaattattttagataatatttttagatatggggtaaagttttaactatttaataaaatatttcccaatataaattagtattggggtttgtgtgagtgctccttggcattacccaataatatatgggtgatatatttataatgaagagaagagaatagtgtctagactagtgtaagtgtcagtatggatggtatatatatgagctggtttctaattaattgactctcttagtgcttatgcttcagacaatattataaacaaatatatgcataaaataaaacaataaatataataaaactgttttcttaacgttataaaaatatgattaagaacaagaatagaataaattttaaaatatataaaataaaattaataaaaaattattaaattttttcttattatatattagaatggtctttctttctattttaatatgaaatagtcattccactaaaatagtgaaaaacattctattaaaatgaaaattattttattttgggtaaatactattttggaccctctgttttacaaaaattaccaattgaaccctgtgttttgttaaatgacaaaaatggacc

SEQ ID NO: 238860 - DNA, 1190 bp, Cannabis indica
ccttatcatgtttagctttgtgtaagttttataaatatgttctttttcgtacttgagggaactggttttgcttctttctcattgaaggttgattctgttggattcataaatttatttatgcaagtgtcctctgacagaatgttgaacttctgctatcggttttgttcagcattcgtgataaaaacaaagaaatacttactttggactttggagttgatcttattttgttttatttatttattaagaagtgatcgatgatatagcctgtatgtcattgcaggtttttggagaggtagcagaagggttggaaacactggctcgtatcaatgaagcttatgtagatgaaaaaggaagaccttacaaaaatgtcaggtttgttcaactgggctatattttaggtttgttcaactttatattcttttgaatcacacaatttatttcttcacttatgtgaacagaatcaaacacacctacattcttgatgatccttttgatgatcctccacaactacctgagttcattcctgatgcgtcaccagaaggaaagcccaaagatgaggtaatggcgagttaatcacatactcactattggtacaatatgtatgatgtagttgggtaatgagctagtcatggttattggggtcatatatgtggatgctggttttacatgtctatcttttattcttgtaacactattatatcagttgccgaaagaaagttaaataatatgtattttgttgggaacatattgtttctctagcttgttactttgctgaactccaaagctttaggttcgccaaagagaaatatcatactagcaattcttttgttgggttattcaacacagtggcattcatgtcggtcattttcccatgaaagtgacaactaacctctctccttgtaagcaggttgatgttgatgtgcgacttgaagatgattgggtccctatggatgagacattaggtccgcaagagcttgaggaaattatacgtgcaaaggatgcacattctagtgccgttgtgcttgagagtgtaagcctcacacacatacatcggtccttcgtttttagtttgtaatacggtttttgttaattgttttatttctactaaatttgctgcattcacaccagattggagacatacccgatgctgacatgaaacctccggaaaatgttctttttgtttgtaaact

SEQ ID NO: 238861 - DNA, 1158 bp, Cannabis indica
tgaagtaagagtaggtcatgagatgagttttggtgacgttggattttccataataggttttactagaaagaacataagtatagctatatagttacatatagtcatcagactcagtcttacaatttagttttaactttgtaggatgttagatcattatgagcaatgctttcacttatttatttattattattattattttgaataattttgtggtgtcttgcaaataatatttagtaatatttatttaatcaaaatatgtataatggaatacttaattatacaagtagtattatagcattttatgttaggtactagacatttgcttttccttcaactatttctaaattttgttaagagaaaatatatagggtaaatattagtataattatttaaaattttatgtttgtaagtagcataaactcaacgtttattttttagcggcataagtattcaatgtttgtaaaactgtaatttttttctaattttgtcagtacagagtctgttattgtcttaaacatggcacatataaggctagattctagatcattggttctagccagaaacatgtagtatcagttactttaaaatattctttaataaattaaaattgaagtttgtggtgacgaaattgaaaaaaattatagttttataaacactactaaaaaattagtttttcccgacaattttaaacaatcgagtaaagtattcctgtcggtttctataaccgtcgcctatttgaccgttgcaaaaaccgtcgcccaaaaaatattctcaacggttaaaaatcgtcgagtatagtgtgcactatagggcacggtttgaaactgtcacctatagtattatacgcgacaaatttaaacagtgccctatagtataataacccatcttttttatattttaaaattttaataatcttaactttttattatatattcgtttgtatcataatcataattgttaaacaactcgagcataaataaaaatttattaataacacaaatataattacaacatataagcttataaaattttatactcaattctaattctatatcatcatcaactacgaaacaaaaaagtatttacaaaatgaaatacactctttaaatcctaagatctcaactttaaatattattagtattgctctaaagaatgact

SEQ ID NO: 238862 - DNA, 1049 bp, Cannabis indica
tagacattcaacaaaaacttgaataccaagaagagacaatccaaatgccaagcaattcttagcttaccctttcggattccaatctcctcctaatgtagagtctcagcatcaaacgcaaagaaggtgtaacagattttcttctttctttatcaagctttgaaagagcattacattcaagacgatgcaatttccactcttccttctaaaaatcatctcaaaccagtgaataatcataacaacaaaaaccatacacagataaatgaaatttatatatatatatatatacctgacatgaagtactacagtaccaaacaatctgacaaactgaacatttcttaagagaactggtcccaaaacaaccatcacatctggacttattattaggcaccgaaacataaggcttttctctcagaataacttcccctgaaaatatcataaggcattacaaattatatactctaaagacttcatttttttcttgcccactaattagtattcattaatttcttggtgggttagctaagtttgtaatataatgtcagaaacaaagtaattggagcaatctacactagaaaactgtgctcaaagtcagaacagagagagacctggatagaagtgtttggtggcgaagaggcaacgacccttgtctggaaaagcagagatggttaagaaaccctcgttgagatcagtctccaattcttccattgccgtcgctggttttataaacagagatattaagcagaaaaatggtgttttacggggaaaggctcctcctttttcattttaattatatttacaagtacaatgatcgcaaatagcctagttatatgaaaatagtgtaaggcctattagcaatttattaataattgtaagtaggggtgtacgtcggtcggtttagtcgggttatacacatttttattaacccaatataaatatcgggttgcaaaatttaatcgtaacccgcccaataaaaatttagaaaaagttcaacccgcccaatgattttgtcggtttggtcgggttaacccgtccaaaccgttcttcatttt

SEQ ID NO: 238863 - DNA, 1537 bp, Cannabis indica
ttttcagttttttcttctttcccttttagttattcacctccatttagctatagggatccaaaattcttaagataaacataagttattagttacatatgattttgatatatataatttagtccagattctttctctatctaaatacatacataataaaagaaaataaaaggaataaactacgtacgtacttctccacgtaacatacttaaaagttaagcatatgtgcatgttagaaaaagaggagctaggtgatatatatatctatatatatatatatatgatgattaagcaattgtaaataagagagtgaagtgatgattactaatagtggctaatctactttcctagctgtgaactcctttactttaattaaaattatgattcagttaaggagagttttgtgttcttgttttcttaatgatcatatcatatatacttatctatttatttatattattctcgcttaataattttgcagaaagaaagagccagctaatttttgttaataaattattttataacaactaattgttattatttgttttctttctcaagctatatatccctcgacaacaaaacctttttcatagacatatatgactcgcaattcaacactaacaagtcaagaacattattaggtgcatgcatatatacaacaaccctagatatatacacaatatataaatatatgtgtcacatatttctatcatatattaaattatactattttatagaagataatgcccccaaaagaaaaagaaaaagcaatgtttatctttctgtccaattaatatttgcatatgcattgtatttgtccaagtatacgtataaatatatatattatatattcattctaataaaccgatcatataatacattaattgttagagtctcctttacacacttctaatttatttatgtctttttcaaggctgggaacttccaaaccccactatattggttagcccttttattttgtcttatatatatacatataaatttatatacctattattatatataatcctgaaaagttaattaagcgcttgatgattaaatgtccaagttgtccaacgacaaaaaaaccattattgttgttaatattattaaatgcctcgatcggtagaatgtatatttttttttgcccaactttgagataatgatttccctaaaaaaaaatagattactcaacttggattatatagttttttcagttacaaatgttaaagtatctcttacattagtatcattatattaaattaaattaatgacaccgaatataaaataaacaaagttattaaaaatacaattaagtaatatgaattaatttagttctggcaactagctagttgatcataaaaaacagaagtaatattaaaacaaatatgtatatgcataatgtaggttataatgagaataatcatagctaatattcgttaattgtcaaattgatcgctagtattaagaatgtgatttttttttaagaaatagactatcactacaacgttttaaagttttaattacattcagcgataac

SEQ ID NO: 238864 - DNA, 1113 bp, Cannabis indica
attcatatatattatatatgtatatatgtattactgaaatgcaaaggttcaagtatatgcttgttttcttctacttgatcagagttaatagaatttagggtaagaaatgaagagaagagctgagttttcgccaggtaatgtacttcgttagagtttatctctagctccagctgagtttgtaatattgttgttgtgaatgtatatatatatatatatatagacatatatacatgtgattgttttaagtaacttttggttttactgaagttgtgaattctttcttttcgattggtgattagacttggattcagggaagctcaaaatgcataacagatctggcaaatatggaagtgtaactgaggagattgaaggactcctcgctaggtcaaggcaattgattccactctttaattttaaaaacaagtctaatgttaatgaagtctcaaagttcagaattggaatggattcaaacttggcaaggagaattgatttttttgatttggaggatgagagtaatgaggcaaatgaggttaagaaaacacctgttgatatcatatgtattgattcagatgaggaagccatggaagctcagaaaccattttatcatccttgggaagctgagtccataaaagaaccttgtggagttactgttgttgaggatattggggtaagttaagttagtacttttttatagttgggttgcattgttatggaaatttactaatatggcttggcatacatgccttttgattctataccagtatgtttgtttgtgattttattcttcttttttttttgctcaattcgatgttttgatgtcgttttatggcattcatcatacttaaagcaaagtttacttttattcagattggaaatcttaacgtagaagattcaagctgtcatgatcctgagaccaagctagagaggggtgtttgtgttggcgtagaagttgaagatgaaggcagccgaagtagtgttaaggataatgatgatattgaaaatgaagacaaccatcaaactggtgttaaggagaatgatgatcttgaagatgagggcagccttcaaactggttttaaggataatgatcttgaaaatgaaggcgacgatcaaact

SEQ ID NO: 238865 - DNA, 1416 bp, Cannabis indica
aaatatggagttataggtgtattaagggtataatgagtaagattatgattttactaatctaattcagcgggaattaattttttttcttataagtggataaataagcttaatttattaattacaaagattttattggaatatatgagtgatgtatgttattcgtggaataaaaatatttttaggttaggcgatcttagagacttgatcgaatgccaaaaaatgtcacaatggttagtaattttagtaggacagttaagataagttagtttttgaattaccagggtattttggggtatttggtgttgaccaaaatgccttagggttagagtttttttaagggctaagaaagagcaaaatagtcattttgcttatttaaattaattctttttaaattttctttttttttttttttttttttttaagtgtttagtaagcctgatagaattagtattataagttagaagttagataataagcataataaagtcaaaaccaaagtctcacttttctccttcttctcttcttctttcggccaagaaagagatccaaggaacctaagcttccctctgaaactttttcaccatctttagccatcaatcttcttagagttgaaccaagttagggaagggaaaagcataaggtaatgtttctagccttccttcttttgtttttcatgaaaactataggttttggtgggtgaacttttatgttgtagctgctgtgggattagtaaggttttggtcttgtttctgggttgaaatgggagtgttcttgatgttcttttgatagattgcttttgtagtgaagatgagagtcatgcttgagattttgaactcaaagcttgagctctcatgacatctttcatgttggggcataattttgaattctatcacgtggagaatgctataatgatgctatataacttttttgtgaagtttagaaacaattgcttaagtttggaggattttaagttgagtaaaaatcatgtttcaaactgtacagaatcggaattccagatggtaccaaccggaattccgttggtcagtttttgggaaacaccgaatttcacttttcactcgtgtgtctattttagacattttttttatattgttttaaagcttgtgaagaactctacagcatgatacataattagattcgaattatgtattttgttttagggtgttcttaccacaagatttggtaaagaaaccttagattatttatgcgggtcttaggcagtgttttaaaatagacacttatcggtttaccgttgttgtgacatagggccgggatcttcgggcattgctccacttgggttggctggtatgcttgaatctggattaaaggttagaaaagtatttttgtactacatagcatgttatgttaaaatacagttactaccatttgtgtgaattg

SEQ ID NO: 238866 - DNA, 3381 bp, Cannabis indica
cgtatttcaattcgagtatgatcatcgtttctaaggagtttgaagtgtttgtagaaaagttttgggagattaggggttcatgggtattggactcaacagatcctatatgttaatgactttagattagtgttgattagctagagttatttatgtaaaactttagtatgatttttgagtttatgtgaggtacttaattttgattattttgtttaattctaagaatatttattatatttttgatgccctaaaattagtgtggtaatatttcattagagtcaatggagatttttcaatttctttgtcttaatagtaacaagagtttgcactttttcaatcacaaagatacaaaacttttgatgacagttcaagaaataagtattcatcaatattattcacctcattaccccattggtactctcaaatgaaactcaaacacaagcaaatcttattgacaatgatggagatgatgtcattagtaatagtatgatgactaaaagcctatgatcgagttgagaagtgatgtctgtatgcctttctaataactgtgtagtagctttataaattaacaaattaacacttagttaggctgtcttgttacttccaaatgcatgttgaggaactgctttcgcaggcgttttagttgcgatttttacagagcaattatcctttacttgtaaggctgggaatgcgatgtgctatcaggtgagatcattttcgaaaaaaactaactagagatttatcattagctaacaaattaagacttacaccgtcatgttgttatacattggtgatgaaactttagcataaaagaaagaacatttggcttacaaagagccatttcttattgtcatgaacttcatccctgagcaatattgatcatcaaatttcatatcagattctttccaatttgatcagtgtctcttttaccaataaggacattaattattagtatgaaagtcatgaaatagagagttttatgtaagaattcaagttggtgaaaagacattattagtgagctgcccatatagcttttgaaatggcttacactgtgtgcaaatttggtttataattctcaaaccaataatcatcattaaacaacactaatctattctaatagagagcagaaaaatgagcattgagcagtgaaggcagtcaagtaaagtttattccataaaaaacttgtagctagcttcttttatgcccatatgacattaatttgtgctttaaatttttcgtatattacttttgttttttttttttgcttctgttaaaagggattacttttgatagacttaacagcagccatgtaacttggcctttggtgcagatcatttcaaccccaaaacagaatctgggaacaagggcattaacaaaacaaactcaatatttaaaagaaatgaaagacaaactcaatattagaaatgaagagtctcataatttcaagtactaaaacaaaacaaatcctttgaatacccttcgaatacttgaaactcgaacacaaaacaaattattaggatgatgatgctgctgctgctgatgttgagttaagatcaagtttcttccatatgttttggtacccttcatctattgtttgtataagaactttcaatttctttttggtttcttcatttataggaggcagcaaatatgtttgcgccctcagctcattcatcttcaaatccaaagccatcaatctgtccgtaaagtatttatgaagagaagatccatgtaatatgtatggattatctgtcaaaacctcagtcatcttaggacaacaaaaaacaacttcaagactcaaaacttctttaagtatcattcgaagcaactcgaactctatgtcgccatcatcacttaataacttccccggttttggcaaaaccaaacgcttattctttttcaccattgtttttgtcaattggatcacagataccaaactcttgatcacaatggaatttgaatttttctcatcattatccaaacttagtagttttatcatagctttgaaatcttcaagattcttcattatttcattcctatcacccaaaatcacaatcaccagaataaattcactgatgagatcagacaaatatgagccaacaaaaatcaacgacatcttatgtactcaaatgcattctttttttcagattcatcaagcctttcaatcaagctttttcctccatcctctcttctcttttcggcctctctcttccaatacttcataaacttgtgtaaatatctcaagtaattcttgaaagattgatcatcttcatgctcaccatcaccaagaaataatggaaggttgtagtttaagcatttgtcatcgaattcatccacgcgcttcttaagagaaagagcttgtttgatcaattctacgaatttcaattgtttctcgaacgcattaagatctttactcttaaaaattgttagtacagcctcacctagagagctgaattctttttgtaaatccggggcgctgctttcaatttcttgtgagtaatatgttagtgccttggaaatgtttgatgagacaacaagccatgcttcaactacatccattgcaacaagatgaataatctttactggttcgttctttctagagagagagagagggaaggatgagtttaagaggcaaggaaagtataaggagaaagaaaaggaagttatttcggttatttttgagaatttgaatcatttagtaaacgacatatcgttttttatctcttaccgtgattaaggtaaaacgacctgtcgtttatttaatatataattgctttttcactcaataaatcctcacttttcatatccacttgtatttttgttgtatgatatttcttagtattgctattaaatactagtggtgtctgacaccttcttgcattgtgattgtttagcaatatttcttaaaaattattatattaaattatatggaacccaatatttagtaggaccaataacgatattaaatcataaaaatgtgttaggtgccactagtgtcctttagcattactctttctcttatttgtgtgaattgaatcaattaggacacatacattcatttattgatcctcatattaaataccaagtctattgcaaaattttatatatccccatatgtttcttggtccaagtagaatatgtttctttttttttttttaggtaaaagaagtagaatatatttcttttgaagactgagtctcaggattaaacgatagactgagtcagcagacaaagtgtgtccaataatcattattgaatcatagcaagagaatagagaggggcattttcgtaatttcacttgccctgttttaaacttcccctgttttataaacactacctgttttccaaccaaacaaaaattctcaaaactaaacaaaaataatt

SEQ ID NO: 238867 - DNA, 1114 bp, Cannabis indica
cacaagtgcggattttagatttttcaatccaatctaatccgcacaagtacggatatccgtattttgcggattggattagattggatcgtgcggattggattagattggatactttgtgaacacccctacaattatcctataaatatttttgcaatctatactaacactgttcggcccaacccagtgctcaagcccaaccataatcactctatttcaaagttaactacacgacacctaaacatgttcattggtattgatttctgattttttgtttcaaaatatgtactttagaatttagatatttattcaacattccaccaaaattttagtgaaattatctttttgtcccttgttaatagatgtgaaataccattattgtccttcatagcataataaaacaaattcattttgtactgacaaacctacactaacgagtatcaccaaaacaattattatttattgccttttcattttatttttcttcattaaatactagtgttcaacttggacttggcattcgtatctattctaagtcatgtcctctgacatgtgatttgtctctattcttatagagtttttttgttattttgtgtcaagtgtttttgtttgaatcttatcatggcgtctagtagccgatccaccactggtttggaacaacaatggaaagacatttgtttggaagaagaagaagaaaatgaggtggcttacgaggaagaggaagaggaagagattgaatttgatgatcgttggtgtcttgtcgggcgattattgactgggaaaatatctgattttcagatatttcatatgatagcggatttatggaaacccgggaaaggcatgtatatcaagattcttgagcaaaaccgatttctatttcagttctaccatgaaatagatatcaaacgtgttttggcgggcagtccgtggacatacgaccgtaaacaactcatcatcgagcgactcaaacaaggtgaaaatccgagaactattcctctaaacaaccttgatatttgggtgcaagtccatgatctacaacccgggttcaaaaccgagagggccatttgtcaagccgggaactacattggtatgtatcttgaatcggatcctaacaact

SEQ ID NO: 238868 - DNA, 842 bp, Cannabis indica
taagtactcctaattaattaaactaattatagcttgtgttcgacattacccaattgcaaaaggtcggtctattaagttaattaagaatactaccaaaaataatgctaatttcagatttgtcggctttttgcaatatgtttttaaattgttacataatacatatgtattaatgtatattaataaagtttggggaagttttaaatttataaatgcacttaattttaataatttttattttatataatatatatttaattatattttttctaatttatattcttaaaaaatatacttattaaaaataaataaattatattttaaactattattaaaaattatgaaattttatttaaaaaataaacaaaattatatatgatttaaaaaaattatgaaaatattattcgatcaattatatatatacgtacataatatatggttatagttattaattgcttgacttaattaattagatggtccaaataatattccaagtgttgatgatatataattaagtatttaatttaagtggcttttaaaaatgattatttgagagagagagagaggcatggggattattgtataatgtataagtactaggagtcaggtcaagtagtgtttgttgcagcgtacctggaaccatgccagttgccacgtatttgacagttcaagaccaaccatgcatgaagaaggaaaggaagggtcaagtaatcctatgctcctaattacactctactttccttatatatgtacataaaacggtgttattatgggctatatacagtagaaacctctatccaagaatatacttaggattaagtaaattatattctaattgagaggtt

SEQ ID NO: 238869 - DNA, 885 bp, Cannabis indica
aatttttgttatatttttttcttatttaacactttatctatgtattaattttttctttttttacaatttcggggccctgagcgttcgggggctcgaggcgcacgcctagcccacctaccctcagggccggccctgcatattggcagcgatctgacatcacaaataatagattatattaaacaaaaaactctgattcaagaacaagaaattgaaaagaagggattctcgcttacattctcaatctttgacaatgctataccacaagcccaaagataaattcatttttctttttgattcatcattttcttctcctacattttttccttttgtttaatatatttagctttagaattgtagacttctccaatgtgatctccgtatgggtggtggtgatgggattcattgagtttcagttcttcgaccaccttctagatagaatttcgaggatggagaagcaaacgagagaatgttaatggagactctaagattagcgatgcacacttctgtaggatattgtattgttcgatctcgccatattgagattatagaggttagccatattgacaaatatatacttaattatgtcaatcttctgtcattttttttttttttgaagattacttgatttagtcgtagtgtttttgatcagaaataatggtagatgaagcgggttccctcaaatcgatgaagccaaggattcatatccaatcagacagcatcagaatgtgatgtatacaaatgtattgtttattctattgggtttattgtgatttcaagcttccggttccgatctgtgaaatgctcctttgatgtccgccccttttatgctccttgatgctccctttattcaatacaacacaatatataattaataatacagaaaaa

SEQ ID NO: 238870 - DNA, 838 bp, Cannabis indica
aaaaagaaggtaaaaataaaagagaacaatataaaaaggatatagagtgtaatttcctcacccccaaattcttataaagaagagaattaattccccattgctttggttttgctctatccattgtaattttataaattcatttggatttgaatctcaggactggactggctctgagttaatcacttagcccaagagcttaaaaaaattctttcaaaaagtatacaatttttttgataactttcaaaaataccatatattttaaacacaaaaaaccatattcatagtgcatatgatgaatccctatttttaatttcttgtgtttccattattgaagcctacaaaaacgcattcattagttcaaaaaatagcatattatttatgcatattctaataatctaagtgctcccccatccacaagaaaatatgtaacacaaaaaagttttgagtgaaacttcctctaaagcttaaaaagcaaaatacccaacttgcctaactctctatttgtttacaagtaaaaaaaaggcctaagctaaacaatacccaatgagataaacacttttaacaaattataaataatatttaggatttaaagttgagatcctaaaacctttttgtttactttaaacaaaggtgagatctaaatgagtggagaaataaatttaaaaatggaataataaaaaatataaaatgaataaacaagaaagtagaaaggttgttgtgtttataattaatagagtgaaaaatgaaaaactctttagcacgtgagtgtcattcttgggtttccaatttgcaggtttctttttttgatttaagcgtttatatattacaacatatttta

SEQ ID NO: 238871 - DNA, 857 bp, Cannabis indica
ttgcgaattagattggattagatcgcacggattagattgaattaagtattttatgaacacccctattctcttttggtgtatgtagcatagactaaccacgtagaaatgtatagatattaattacaacatatatttattattaaatgtgacatttaccaaaataatgttagttttggtattattatgctacttacttaatagatgttaaggatctactatatttgtatttagtacgttagtcattaaatatagggtctttttcatttttacatttttaaatattttttttcctttgcatttttacggaattttatatagaaacccctattgcaactagcgttgcaacctaaatcgcaacaaaaaatcgtatagaaacccctattacaactactttagaaacccaaactgtaaatttgaaaaaataaaaagaaaataaaaaaacagtatatggggtaattccccttaaatataatctttttattattttttttaattttaaagtttatttaatactataataatataaatttatattaattttttaaaatcatgttatattatataaaaattaaagtacactcccttccttataaaaaagataattaaaaatgagtctctcaattttaatcttgataggtaacgtaattaaaattgggtgcactcttaatggatattactcataaatgaataatattagaaaaatttgagtttttatgcataatttttctatttaattaaaaaatctctcatttttacattatatgggatgaaatttgctccttcagatgaaaataaaataataaaaaaaaatcagcaaaaaaaatgataaaaaaatattgagtttgacataatatttt

SEQ ID NO: 238872 - DNA, 1028 bp, Cannabis indica
aaagatcaaaaaacaataacaacaacaaataatatttcatgcatatcttttgccagggtctgtgcatgcgtgcaaggtcccaacttgccaatcgcatgtgcggacactcttgaaggctaggccttaagtgtatatggaaacccagcagtagcatttttcagtattttaaacatatttcactactcaaaaatttcaattggcacaatcttgatggaactggaaagcttattaaaatttatacaaaattgtttttcacgaagaaatctaaattcgaagtccttatagcctaaatttgagttgcaaggataactacttcaatttacccttttaatgattatgaacagctacgaactaaaataaaacaacatttggaggggtggaagatgaaacttctgtcctatgtagaaagaacaactctggtgaaaaaggtggcatcgaccttacccgttaatgctatgtctacaaataaaatttccctcacaacttgccgatcacttaatgctttggttagaatatattggacagggaaataatgaaaaggacaaatttatggctctggtattgtgggataacatatttcaacctaaactttcgaaaggtcttggatttagaagattctaagacatgaaacgtgtgcttcttacaaaactcgcttggagtttggcaaaacgtgaagacaaaccttgggtggactgccttctgcagaaatattgcaaaaacttttgggaagtgttaacttcgaaattttcttggtgacattgacaaaccttgggtggacatcaataaaagcttttgagtagacccgagtcatagtagtcgacctgggaggggaccctagccctacacccaacttgactttgggatcttcgagacagaagtttggacttcagtaacttgaatccaacctactctctttcaaaatatttaccaagaagacttttagtatcctaatcaaagcctgggagctaaaattacacgaacctataatgagaagcctgttgggttttatgccctaaataaaactcttt

SEQ ID NO: 238873 - DNA, 1367 bp, Cannabis indica
tttcttttttttttcttagtgatgctgcaaaacactatactttcttcaatcgcttctcaataacccacttttccaaaaaatttactcacaaatctttcactcctgcaaacttattcctaagcttaggacataatttaaggtgcaaatggaaggaaagtatttaaaagatatatgttaggctttattaagtgactataaattttaaaacaagcttaagttcaactaggtaaactaggaataataaggtaaggtaggcttgaaaggcacaaatggtccaaagataattatgtaaatcatgttcgaaacaagcattgctgagactttcagcttaagagaataaatcatgcacgttctatcctatacgagcaatcatttcgcacaacacattagaacaattatgatactatctaaatattgaaaatttatatcgatataaagttttaaacaagcatccaaattaattcaaagagtcaaagaatcaagtacttagttcacatttttaatccatctcgtaaataacaacaatagcctaatcgatattggcaaaattaacaacacactaaatactgaaaattaaaaataactaggctcaacaagaaaaaaaaacaaataattaaaattaagcccctacccccaaactaaaagttcacattgtaccgaatgtggcatataacccaaggagaggacttacctgagaccctcatcacaaggagttcaacgatggtggctagtcataaggagtgaaactaggtggctacgccaggtagtatggatctttgatcctaatattctactaaattgtgagggaatttaattgttgtacttggccctcatcaaattcacttcattgcgccatgtaattttacatttattttcattccactttccatccttccttatttactttaaatttaatttgaattaggtgttcattaggttttttataaagttggaagtatttgtaggaaatttagctctaatacataggaattaacttctataattcctgcttcaagatcacacttaaacaaacaaatattaaatcaaaacaaacaaataaagaacaaaaaactagcaaacacattaaagaagaaaaataacacaaatgaatcaagatagcatccagacaaaacaatacacgagaattatactgtctgaccctaagttcaatgtgaactggtcatactccagtttgaaatcattcccactaatctttattgataatattaatcttaggagctacaaggaaataatcacagtaagtcatccatggtgtaatccctcaacactcattaactcactaatccgagccaacataattgataatgttgctcaatacaatttcccaatcccatctctctctctct

SEQ ID NO: 238874 - DNA, 683 bp, Cannabis indica
aagaaaatgtagacaatcaatgaaaatttacatgaaagtttcttttaaagtttcttggcaatatcttggatggaaccaatatagctttaattaagctatgaatggcagaagagcaatatgttgtattgatttatatttaaactaaaatctcgtgtttgtgagtggagaatgagagaaataagaggagtcaatgttaacaatttcaattcttgcattggaaagacacgactctacaattaaatttaaaatgcatttttttgttccacttctctccctcatgctaactaagcaagatacaattttagtctcttctcattcgttctcatctccaatcattcttactgaacataacatagcacaactttataaatatttgaaatgatgaagttaatgctaatattatatatatgcttgtgtaaaagtagttgaaatttccggagcattttacaagataattattagtaagttgtaatacaatgcagaaatcaatgctgtaatactaaccaaaaagaaaagaaaccggaacaaattcctacttggatgattcaaaaattagtaatgaaactttatggcattatagatttggccatggtaaagaaccattaattgaataaagctttgcaattttagtattctgattgttttgattttcactgctcgatatgtcatttttccaaacaaag

SEQ ID NO: 238875 - DNA, 1713 bp, Cannabis indica
ctcttttttttaagaattttaattttatctgggtttgggtcgaggtcccgggtcataggttgggtttgggttcgagtcataggtacgagttcgggtctcgagttcgatgctaggtctacttcggtctcgtatcccgagcccagtcccgtgtctggatcctagttcaagtttgggtccaggtccatgtcccgggtttgggaccaggtctcgaatcttgagtcataagtctgggtatgggtcagggtccaggtttgggtctaagtttgggtctcgggtctaggtccaggtctaggtctaggtcccagatcccatctgattttgggtcccgatccgggttcagctctgggtcttagtccaggtccgggtctggggtataggtctagggtacgggtccgaggtctgagtcctaggtctggatccagatctcggtcctgccttgggtctgagtctgggtcttgaattaagtttttatatatatatattaaaatcaaatccgatccaaaaaaaaaataaggcgaggtagagcggatctaatccaagatccaataagtatccgaatgtttcagatcagaaatgatttgtcgaattagagctccgatccgctccaactaaatggatctttttaacatgcctatcaaccaatacaattgagtggtatcgttagttcaaaactaatgcaactaactaatatatgattgtgttaacctgtttgcatcgtttttcattaatacacctgatttttttttaaaaaaaatccaaatctggccacgaaccccaatctggtctgtttgcttcctgaaatgacgactttccttggaaattaacacgagtctttacagtgtgctttgtcctgactcgcacgctttctgggaaactttctcaataggtcacccatacttcaggtcaagcacgcttaagtttggagttctcaaatgatgggtcacaaaaaataagatgtaccttattgatataggtacctatcaatccatttaagctatcttcaactatgtagtctcatacctacataatttttgaatcatcacatttgacattccccaaacgatgtaggattacacagcttactcagtgtttccctttaatgatcacgtgattactgactgtcacaatcacccccattttgcggtccaaaatcctcatcgaccaaacttttggctgggttaaggctttgataccaaattgcaatgtccaaaaatctaaggcacgttacatgcattactacaaaattgacctttcctgtcagtttgaaattatcttacatactatttttgtcagttcataaaactgtcggctatatgggcatcataaaaatatgaaactttaaatgacaatttataactatcgggaaaagtcactttaaatgatggtttataactgtcaggaaaaatactttaaatgacaatataaaatagatgagaaaggcttccgtcagaatgtaatcgataagaaatgcttctttaaatgacggtttataacttttaggataactttaaatgatggttgtgaattgatgtgataaattgacccttcagttttcgtgcttcggttaaaaaacgatgagataaataccagcttgtctttaccgatggtctatgtagttgatcgtcttggttaccgacagaagtggcctattttctagtagtggcttttttttttttaaaaaaaaaggaagttttattaatcaacttgaaaaac

SEQ ID NO: 238876 - DNA, 1278 bp, Cannabis indica
gctttcagactacccatagagaacagagtctgtctgatttccttagcattaggcacgacaaccaggtccttttgctcctcgagagaaagggggtctaggaccaggccattaaggctctctaaaggtccatacaccgagcttttaaaaatgcttcccaaaatatctcagaattcttttccaatgtccaacctgctactcaaccacaccccatcattatttaagattttctcaatcgcatttctcctatttcttatggtggccgtagtgaagaagaatttcgagcacttatcaccatccttgatccaagacacccgggatctttgcttccagtacacgactctttgtctcaaagcctcgttaagagactttcgtgcctccacctcctcagcccaagccctagtcccagccggacgaccctgaatcaggttcagacgacattcaagctgagtaatgcgagaatctaatttcccaaaatgattcctataccaattactaagcgccaggcaagtagccccaccttcttgaaaattcttgccgaggggcaactatgggatagagagccccaagcactctccacaacaagcgcactacggggatccctggtccaccaggcttcaaaccggaaaagctttctaggtttggattcctggtccacagtactgataaccaggggacggtgatcctaattgcatgtgtggtaggaatgaacaaccgccttcagaaaaaggcccagccactgagcgttggataaagcttgtcaagggccgatttgacatgagcctcaccatcacgatggttatcctaggtgagaaaatcgcctttaacaggcaaatcaattaatcccgaactattgaccaaattagaaatgacaggcaaaaactgatctctcccccttgatcccatcctttcagagctcttcaatacaaagttaacgtccccaaggatcaaccaaggtccccaaaacttgagaccaagatccatcagattcctccagaacaatatcttctcattgaagtaaggcgggccgtaaacacacgacagaagccagggatgatgcccagggtccgagtacacaaaactagagatgtgattcttagaaatgcagacagtttcaaattcaaaacccgccttccaagctaacaggaggccacctgcactaccaatcgcaggaacaataaattaaggtaaaagagcaagttttttagagaacgtaccaagtgagcggggtcgctttaagttcggaaatgaaaagaagtcaggcgagcacgaccgaactag

SEQ ID NO: 238877 - DNA, 690 bp, Cannabis indica
catgttgaatctctgcaaaacacggttgatgtactccgactgagatagctggaaaatccctttatgcttatctcttacgatttgcattccaagtagaacaaagactaatatgcctaaattatttaagataggaaacatattttaggaagggatgaaaacaataagtgttttattaatgttagaaatgtatcaaagtccttatttaaaatagaaattatgatttaaaatagctaaaaaatattgaaaatgtcatattcaaataactcagcacaagtgtttgttttgatatttatcgaatatttgaatgtaatttcaatagtcgttctgtctacgaaaaatgattatgattacgatggacgtttgtgcctcaatttattgatctattggctttgttgtcgtttgctcgcctttgttggtattgatttacttttgtttatcgttgggctttgtaatgaattttgttctttattctttgttgaatgaacaacttaaatcttttcctaaaaaaataataatttcaatatcctaaattattttgaatatgctaaagatttttggggaaatctcttctaaattataattatattatatatcatcatataaaaaaaaaattaaagttacataagggtaaatattaaaaccaaaagattaaaaacaatcactaccatagttgtgctaaataacttgata

SEQ ID NO: 238878 - DNA, 3568 bp, Cannabis indica
gtgtgtgcaagtggtctggaattgaagctcccataactacttaaggaaatttttataaatatggtctttctaaaagcaatttataaaaatttatttaccatattaaggaaatttttatgcatatatttttctcaacttctataacttaatatgacattttaaacaattaactgtttgattttacaacttaattttgtaaaaaaactagggcttatttgttagctttatacatttatatgggaatctaaaggccatatatttgaaaacttaaaaaacgcatcatagaaatattaacaaattgaaattcccatagaaataatgaaatggcaaaaaaaaagccataagagtgtaatttccactaaaaagcaagcttaataataatgaatatcctttagtccttacaatgataatgttaggttaattttttaatttttctttttgacagcgataatgttaggttaataatattataccgatgttccttcttttttgggcattatgtccttgtctttccctaaaagtgtctgatcaaaaggaaaatttaaagaacttttcaaatacttgtctttgactggacttgtcctagtaactttgttacccaaacattcgtagagtaattcttgacaattacaagttacatctaccttgtcctttctgcaactaaagtttcaagccaatatcctcctacatgcaggtacgtgataagggtgtcttgatggcttcttacaaagatgtttccaaataccgtacagatgcgattcttcctagcatgtttccttctggtagtagtgacagggatgcaaatgaaaatgacattactggtaaggagccagacaaagaggatgagaatggtggaagtgataattgtgaagattccttatgttcaacagagaattcaagtacagctgaggaagtttctaattttccactagaacgttgcattagaatattgcctcatgatcaaaatactggagccttctttattgctgtctttcacaagcattcctcactgccaggtgcattccatattgtccaaatcatgcagtttattatgaattcttgaatattgatcttttttattcttgaatctctatatatgttctggttaataaactaaggataatgttcatgctaaaatctgaatacaggtatctcttccttggtatgattttaaatttgtttttccatttccacccagttgctgttcaggagaagtcaaaatgtcagaaagaaaagtgctttgggaacaatgggccacaaggagatcttcaaaagcaggtcactgaagattcaaatgggttggaggctgactataacgatgttaccaatggccaatttgcagaagcagctcgagaggtcgatttgattgataaagaggatgatgctgttgtggcaccagatctatctgttgcatctgaagaacaaaatttagtagtccaagaacctggggatttgatagataatgaaccagatctctctgttacatctgaagtgcaaaatatagaagtaacccaagaacctagtgacagtaaatctgatctcaataaagttggagggaaaagaaagttacagagacaaggaaagtggaaaggggttgacccagttattttctttaaagatgaggttactattagtaacataaaggcattctatggcattgatgaatcttttccattgactggccatcttgtggtgagaaaccttgataataatcacgtgaagagaatatactatatctcaaagtcagttaaggatgttcttcaactgaacttatctgttggacagcaacttaagattgcgtctattggcctgaagatgtttgtaagtttttcaattcaataaattatgttttctttctttcttttgctagaaatgcatgttgtgtgttatttcttattattaggcgtctagaatcataatttttccacagggttccctattcattgttattatttattaccatgtgtggcctttttatgttttctctagacaaatagggggtgaaaggagttggatgattaattcctgatgaacctccgtacttggccttgtggttttgattaatcacaattctacctgccctagatgccgatgatctttgctttgtttactttatgatttagatagaaacttcaggtcatcgttaataccactggaaacaaacattttaaaatcaccaccgaatcactgatcttttgtcatttttctagtatgcaatggtatgagactgacacaaacaatttaaaatcatccccaattcactgctcttctgccatatgagactgctatactgttaagatataataatatatggaaactatctgatttgccttccataataataaacaggaacgacaaacgtcacgagaaggaagctctgcaccctgtatattccggatatcctctgaaggattaccagtcattctcccatatgtcacaaaacaaatcctatatgcatcccctgtagatttcaagcatcttttacagtataaatccatcaaatttgccgattttgttgatgctgagtttggcaagaaagtgtcagagttgttactaggaagctgtgtgatagttttggggaaaggtatgtttcattatgttatgatggatgaaaattaggtttcccttggttattttactttcctaaactagtccaaatttctacagatggtcaggcgacatcgagtcctatcaaagtagatgagtcaacaattgccataagctgctggaaaggtaaggccagcttgactgtgatggtcaatgctgttgactgccaagaaatgctagaaagaacttcagcattgattgaaattgaaaaggaatcagcggtgaaagaaggcggaagcccttcccgtttggagtcgggggtggatgaaaagggcaaaaatgatgtagaaaagaaggaagacaaagaaagcatccaaatggcgattgatggttaagtaagattaaaattttgacattcgtagcacattttatgttgtactctaattgtgtttttctcgtaattgctgcaatgacacggcatacatcgactgtgcttttccattcgatttgcagatatgcacattggataaaattttacttgacatcataatttattttttagggagctttggaagaactgtagcttcatttctcttcactattaaatcatgtggaacattaatggtaaattgattctgccagatggttttgctaattacttttaagtattgacggttgggagtttgtagattttttttttttttgaaaggggggactttgtaatttgatgcgtaacaaaagccgacttctggagaaaatttaaaaagttatagaacatagcaaatacacagtttttgttctttggtgaaagtttaacttatgttaaggcagaaccgtttctctgaagaaattaagagctggaagagcagtgccaatatcaactcaggacaatcgattttattgaaaacgaaataagtaggagtgttagtctaattcaattaacactattttgcttatagtgcattagatttggattaagtacggattttatattcgggatctaatacaatctacacaatag

SEQ ID NO: 238879 - DNA, 496 bp, Cannabis indica
gagagtatgcattgcatactcccccgcacgcaacgggtgtgattgtcgtttagggaggctgcatgcagggtcctggggcggaatttctcagtcacatgcaccttcagataaggtcatgtccgaaaaaatctcagacagcccatgtctgaaagaatgtcttgactaagttttaccctcgaattcgcgagcatgtcaccaactctagcccaatatattttcaaacttcaaaaaatcataaagaattttgttttaatccaaattgagttctgtaaaagcctaaattgattaatttttcaccaactttctagaaaaaatacttccagaacgaaaacaaaaatatttttttttgtagaaaatttgtaatttacattcagttatcagttaagcacataaaccaacatgcagggtcgtctcaaatattttggaggccctgttctaattttaaaaagtatgcccttaaccaaaaaaaaaatatataaattgtaaataatatttt

SEQ ID NO: 238880 - DNA, 830 bp, Cannabis indica
gtatcgattttatagccagatgaaaccaaatttaccgactattttaagcagttggtgtttccctattttgtagtagtgtacaagccttttgaaataagtgtttgttagtgcatgtagacccattttaaggtgatgtggcattagaaatttgtttctatgtaggtcgaagatgccctaattcaacactaatgccaacttaagtaacgtttggttgaaaggaacgaaaaaataaaaaaaaaatagaatcatatttaaaatttatagaaaaaaattgttaataaattattaaaaaatttctcatcttacattatttttttttgtgaataaaccagtacataaaaaaagtattacataagaagaggcaaatcacgaactcctccatcccaaaaactagaagtcttacaacctaaaacattcttagctatcaaatgtgccactttattattagcccgcagctaataagttacaccaacaatattattctttaaaatcaactgcttaatctcctccacaagcagatcgcattctccacacaactccggtggcctccctaacatagcaactgtcaattacaatcagacgagatcatatatacaacgttctaaagataacaagccaaccatctcaatcccatgttttatagctgacaactcaactgctataggagaaaaatgcctatttaagaacataccttgcgacacaataacctcctcgacatgattctgaaccaccaactagtactacagcacccatcaacctcaccaattgcagcatccacattaatcaacatccccccatcttaggaggctgccatttgcattttagtttag

SEQ ID NO: 238881 - DNA, 1042 bp, Cannabis indica
ttcttaaaaaaaaaaaaaaaattctaactataactatattataaacaataagaatcatagatttttaatatttttttgagtgtagcataatagtattttacaatgaattaatagcttatagtttaaaagttttgaattcaaatctatgacctctctcttttcccgttccttctttaccactaagctaacttcaatagctttagattttcaatttattagtacaccaaaaataccgataaataatcactatttttatataatcttctataaaatatttattaagtcaacacctctgattgatacttacatataggccatacatattagttaggccgaccaaaggcagtaccagatttcatatcatgtcttatcctgtcatattttcacaaataatattagaagaaataaagttcctatacttttactgatcgactttaatcctttccacactatatattctgtaatatgtatatgccacatgtcttcataagtgtgggacatatgtgtgcgatgagaaggaacgccattatatatacttttgatatatactaccacttgctttgaaggttgaatcaggccattcttaagttccattatatattatatttttatataatattatgttaaattttaatttatattaaaataatatatatttaggtatttataaaaattataagaatattaaggacactctatattatactcctttttatactttttttatgactgatatgtgtaattttttaaaatatatttaagtatagttacaattatattatttttatatttcattaataattaagatattcatctcatttacttatattttttttagactattttattcattttttatttttttttactaaacaatatgcactattatgcatttttttaattcttttttataataaatatgtactattttatgttataaaaaatgaaaaacaataattctttcttttttttcaacaaattttgcatccattttttttttatatatattgtattattccttaaattattttttatttcatgt

SEQ ID NO: 238882 - DNA, 885 bp, Cannabis indica
cataataacaatcctaacaacaacacttacgtcaaccatttgcataaaataagaatcaaatagagcaatcctttagaaatcctaacaacaacaattacaacaataatttgcataagataactaagaataaaatagagcaaccctttaaacaagcccaacagcaacgcttataaaaccctccagaaaaagaacagaaatgttaaaagtagaacaactattttagcaatcataacagaaacccttacaaactctatccaaacagaaccagaaaaatcaaatagagcaaccctttcagcaactctaacaacaatcttataacaaaaaaaaaaaaaaaaaaaatgaaataccagcaacacacggaacccgacaacaaggtaaaataaataagaatagatcaacttaaacacctagttgatcaaaataaagaataaattcagatttacctacaagctcaagaactaattaatttagatgagaattcaggggtttaaacttacctgaagttgtgatttgaatgctgtaataaacattgaatttgaaatttaatggtcataattgaaatttgtaaataactttttgtcaaagattcatagtttttcccaagttattgaaatacttgcaaacttgaatggatcctcaaatggttgggaattttgtttatttttatttggatttattgaaaaagatgaattgctggtttttaatgtcagtagttccaaaatgactgtcgaaaaagctgccggagccaaaggcggagactatattgcattcaactttatcatcgtaattttgcaaaagaaaagttagaaacggtaaattattcaggtaccgtattttgtcacaataagtacttatagccgtatatataaaaagctcccttttttt

SEQ ID NO: 238883 - DNA, 756 bp, Cannabis indica
ggcatcaagtggttgcttgtagatggcatttgcaaagggccaaagtggtaattgtaagatccagatgttctgtgtggactaaattgtgctgctcgggtcatctatttggtggatagtttaatctaattgttttttctttgtctcatcttgacaggtcagcttagtaagtctaaaccgtggacagttgtccttccttgattgctgagctgttaagtttgttatattagagttgttagtatataaccagggattaccggtttaactaactaactcttcttctttgattagtgattttgctttgttagggaaaaattaccttcttttgtctttctggttattcttgtaggtcagctgattggatcttcgtggattgaaggagaatcagtgatcgtgtttgtctgaagggagttcagattgcattgctgaagggagttcagctgcatagaagcaaggggatcttggcttctgaagtttaaggatgcttagatgattttctgatttgttcgtgttcaaatcagtagggtagtatgaattatttgtagattacttttgaacaattgtaatcgaaactggatagtgtattcttttaatgcatagtgaaggttattaccctggtttaagggaacccaagtactagtcgtctaaaatgaattttcagggttgacgaagcttgtaaatctctgtgttttcttattagtttcttgcaatctgagttaagaataagtactttagttcaactaagaagaaagtaacact

SEQ ID NO: 238884 - DNA, 1027 bp, Cannabis indica
aacccaactactctattctgaatatattccttacaatttttcatttttaataataattctcatgactcaatatataaagtgattcttgttttatctttttctgtacttatatttatagtgaaggtgattctctataaatatatatccattacaaaacccagagttagaagctttagagaaattccatagagacagaaaatccacttgggagactatccaataacttaatataatcactagctactatagataattattgtagctgccattaaattctcacacctaactaactagcttattgtaattacagcttgatgtttgtattttgtgtaagctatactataatggagttctttaaatagaagaaaatcaacacattgcaaagagactaaagattacaactaagagatcacaatcacaaactaaacccatcattatatagacaaaccttgttctttctttaaaggcatagctgaaaaagttgcagaaaaatatttataatatttatgtgagtatataagcttagttagtagtttatgtgatagaatttcatttgacatggctaatagtgtaaatttttttcccttttgtttttgagatctaaagtgttgtcaagtagttggggaactcatggcgcaaaatcatttaatcaaacatagatagtattttaaatgtgcattaggtattttattgaggcatttaatcaaacacataaaaggcatgagtgcatccattaatgactagatgcttctaccaacattaaaattcctataagagatgaaacttgaatagaaactaaacaaaaaggtgaatataaaagataaaaaacttctcacacacctgaaatgatgagattagagagtgaagagttgtagtctaaaaattggcatcaaaaaggaagagcaaggtgttgcacatcaaattttatatctagaagaaaaacaacatttgcatatataagaatttgtatagctcacctaatcattaatgtggcaatgatacccaaaatcttgggaccaaaaaaatt

SEQ ID NO: 238885 - DNA, 2541 bp, Cannabis indica
atagtttttcaaatttcccttcttctcaatatctttacatcatctaattcattttttcataaaattatttatcatcaataattagatacacaaaaaattgcacaaatataataaataattaacgaaaaatgagaccaaacaacttatagatttcactgatattttgacatttcataatgaacaaattaatttcaactcaaaataaagttgataataataataaaaaaaaaacaaatggtgttggaatgacccaatcaatgtccaaattcatagattttgggctctccttttaagtttaaagactctgcaattgcaacaaaacatcctatttcacttccgtaaagatacacatcaaaatgattacactagaaaagcatagatagatacaagcaaaatatccctgactagtatccagaatctaatgagagagagatacaattcaagctctgtatttagatctgattaagagagagaagcaaatattacaagaatggatggaatacatggtgttggtgttggtgatggtggtgtcaagattgcattggcatcatagaaaccgagtatggttcgtgaccgtgcatcctcaaccgataaatgcaagtatgagaagggcttccatggtttgaagagaaatctaacctgatagtatcaacaacgttagagcccactgactccaacacatcgaaggtctgtgcattgctcttctcaaggtcataactgaactcggctagaagaaacatcttctctgaatcatatgaccattcagaattttgctcctgcagccacccggagactctgcaattcttcggagcacttgatctgtcgaaagcaacactctatacagaaaacatatataccttagtgttagtacaacatgcacatagaagagaaaaagtaggtactacaaatgcaagacagaaaaccaatatgaaactaacttcaatataaaattataaaataattactcagaatactcctagttttgacttttagaaagaaatttgtatcaattaactttattttccacacataaaaaattttccattcctcccatatttcactgttgatcaatatgaatatctactaatgggtgtgtgtgagttggggggaaagggttcgatccccacttgtatcaaaataaatatatgaatatcttattcataagaaatgtgaggatagaaaatttccaaacagtaattaccaaacaactgttctggcctaagagaatttccaaacacccaagtttaaaatttcccaagagaattggaaataacaactcaaaagcaacacatatttgtaccattatccctgcccgggaaaatcagaatttattaaagccatctagcatattattacccttgaaactttattacataataccagtatatgaaactctatttcttgcatgctacatcatgtgacaagcttcaacaaatatcagcgcataaacatttacatagactaaaatcggaagaaccatccaacatcaaaacatatacagaatcagctcagccccatacacatctaaaaccacaacacaacaaaaatttaagactggtctataaaaacaccattattgatccaggaagtgcaattgacaaataagaaaactgatatacaaatattcaattaaaaatatatagtcacagtgtcaaagataaatacaagttataaataaacggtattagagattcatccacaaactaaaaaatctatttggccaatttcatcaaagacgtttttggtaagtgatgcacattactatacataaaatctggtgggtctatagtcatacaatccatgacgtatcaacttgcctagaaatcatcatcaacatgttcaatactaaatattccttgtcaatttaagcattggaaaaacttatcaatatagtgcctgctgtaattaaatcattcatatatcacatgcaataagcatgaaatcttctaccataacaagactccaaaacaaggttattcgctctatatgaaatcgtatgtagagaaaataataccttggcaacatgctccagagtaacagcttcaggaataattgctgtcctgagcctaatctcaacaaatccactactgcccttcaatgcaaaacattgtcccggctctccaaaactcggctttaacatctttctggcatcattgtgaacatcataacttgcactccttaaaaaccacttgcctccttttcctaccaaataaggttcagagtgtttgacaaccatgcctccaccactacccaaagcataatccacccgcccaagcccatcagctgcgtgtttctcaatctccttcaataccaaatctcttgcatacattctaatgtcattcaaactagcttttccattaccatcatcatctcctgtaattttattcttcagttcttcaaaaatcttattaaactcatccttagacaaccaattcacatctttcaattcacccaatgatctcgctaaagattcaccttgggactccaattcaatcaatctattctctaaaacagaccctttttcctcaatcattttcccaa

SEQ ID NO: 238886 - DNA, 5623 bp, Cannabis indica
gcagccagagtgacgtactcgtgtgtaagagttattattccgtgggtgtaaggatccaatggaggcttgaagcggggacgttacatattttaaggataagtccgacatggcctataaacccacattttcttgtcgtgcttgaacttgtgccagcccttttttcataaatggttttgcctatatttcataaataggtttgcctgtttttttatacgggtcaaactcgagcttcatcattattctatttgtttccttataattaataagttaatcactaaattatatgtattttttatagtttaaattgtttttatatgatttttaacaatactttacacataatcatataaaaattaattaaaatgattaaaattgaatatttttttagtaaatacatttttattactatcaaattataagaatttttattgtgttgtgctttcagacttgtctatctatgcttatgtgttatatttttgggcttattctgcagtatcgtgtttaagcctattttttgttgtgctaatttgcagtattatattctgtcttgcctaaactcatatttttcatgttacagtgtaattgtgcctcccgagctcgtctcagatttacaactctaggcttaatacaaaatttattatattttataatttttgtatataaaatatatatttttgaaagaaaatgggagccctttatatatatataatatataaataattagcatttttaaaattaggaagaacctcacacttataatgcttcattaagtgaggccttataaaattggagtttttataaaaataaataaataaataaataatactagattttaggtaaaagtttataattttactgtcataaataattttttacaaaaatactgtctttttgtaaaacaacaaaatagaacaattaaaacaacagtagaacaattaaaaaacaactgtggaacaaccgtgaaaacttaacacaatacacagtataaaatttacacagtattttttaaaaaaattctatcccacaataaaaaagtaaaataattagaaatttcagtatatgatataaaaatcccaaaattcatattaattctaattacttgggtaactatattaaatgtaaacttttgggacccgaagagcttatcgggttccttccctactacaaatcgcaaaggatttaattgcctttggaaaatgcctcacttacatggggcatttaaaaaaaacgcgagtaacatattcataaaaaaaattaaaaaaaaaaaaacgaattaacatctattattataccatttatctgaaatatgttggttgtgcttgttcttactcaaaatatattacattaattatgaaagtatttactcactatatttatttattagaaaaccttaattataaatgtcatttttgaaagaaaaaaaagaaaaattgcaaaattgacaaacaaaaaagttgattacttttaaagctttgaaaaggaggtttttataccacatactaaaatttctaacttttatatttttttcattgtggagcaaattttttttttcagaaatactatatttttttttcaaaaatattgtttaggttttatattatatatattgtgttaagtttttacggttgttttttagctgtttcactcttgttttaattattctgttttgttattttactcaaaatccactatttttataaaaacctcttgaaacaacacaaggccacatatgggccgtagcccataatcatgggccacagtttggtctcataaattcaatatacatttttctaaggacaaattacaatattgacacttattccctaaaatattctcaatatgtaaataatttattaatgacacaaactttgaaattaaatatccaaactgaacagcttgatctgcatggtataattaagttgaatttattatctttacatgaccaaatcatatatataggtataaatatatataattattcttagaaaaagtgcttaattaatattcactcaaaattattaagtttcatgatgttgttaatgaggtgaaagtatatacatcttacatccatgaggaccaacataagaactcaatcgataactcatatttcttgacacaaatgaatgctgcaaaaaataaccacacacacaagaaattagctagttactaaatgttaattttactaaatatttagtatgtaaatggtatatatttgacattttattataaattataagaataaagggtatttttttaaaaaaaatatatatattaaaaaaaagtagtggtgaaaattgtgaagttaagagtaatttgcagcataaatatttaaatttaactttcggctctaaataaatatctaagtttaatttttggcgataataatacttaaattatatatttagaactttgtaggtacttggtcgttacatatttaaaataaaaaaaaaatcggtacacatgtaaagtgaattaaaaatataaaatgttattttataaaattagttgaattggcatttttcaaaagaaaaagtattggtgataatataataatataaaaataaaggataatggttgtgtatatcttacaagtaataaaagtacgatcctaaccattcattaatgatcacatatctaacctatagaaatatatgtaaactaaataaataaataattaagggttattgctttgcttaccttccacaaatctctaacaagaacatgtgtaaaggttgagagtccaatttctctccatcccacagatattgcagccatggagttacctctattccaaaacactaccaccactctttttcttgataatggcccagcccaaacctacaatgtatatatatatatatgtatatatattcattttatatagggagagaaaataaaatttaaatagttagttccactcctataattaaaagaatatgttgtgacagtaagattcttgtgattcgtaaaaggaaaaattaagtaagatgtggaagatcaagtgtgacgagtttaagacatgtatatatgagattacatagttgaagatgacttaaataaattgataggtgtatataccaacaacatgcatatttttttgggtagtctatcacttgagaactccaaaattaatagtagtctcataatagctaattttctgggaagttttgttagaaagcgtgcgagtaaggataaaacacgaatacgctaaaaagactcgtgttagtttgtaaggtcaatcattattttagaaaacaaccaaaataatatacccatgtatactgtgtagatatgagattacacaactaagtagagaagttacacatgtactcatgcaatagagtgtttaaatctcatttttgtcatacctctagtccacctttggatcgaattttccttgcttgaacacccaaagggtcttgattaacactaatcacttctttgtttccaaggatttcaagagtttctttgctcaaagatctaacatcacatccaattagcaatggagcctatatatgccaaagcaagatttttgataagtcaataataaaagagattaatatttagtgttactaattaagagaattaattaagaattaaacacaccttcattgctgcccaaatactaaaatgtgatcgatattcctctacattcatccctccatttcccacttccaacatgtctggatctattcacaaaatcatcatcataaacattaggatatttggaaaaatgacattattttgtttctttcagtaaaataacatttccaacgggcccttgccttaatcgaattttttcgaaaatattatatttcacacaaaattatcaaaataaaattattttatttgcaaaataagggtaaatactattttggactctgtgttttgcaaaagttaccgattggaccctgtgttttgttaaatgacaaaatgaaccttatattttccaaaatggtaaaaatatgacactgagcttatttttgacaactttttttcaatacaaccaacttgaagacaattactaatacgaacagatacagaaaatgtaaacagttttgttatagcacttttagatcggattataattaaattttattttgacaaaaaattaatttagggtcctatttgtaccattttataaaatacatgatccattttgtcatttaacaatggtccaattagtaacttttacaaaacaaagggtccaaaatgatatttacccttaaaataattatactaaaacataaccctatcgaaatattggtatgtaaataattatcgaaattaaaaatagtattttgtaaaatatttttcgaaaattaccattccacttgcctggccctgcataccttccccaaatattgttttgatctgcaatggatgttatactaaaacaccacacaaataattaacaataatgattagtatttaaactatataaaaaaaaatatttttagtcgcaacaaaacttgtaactaaaagtgaaaatattgtgactaattataaatcatcattcctatgttgtgactaaaagtattagttacaaaaaccacagtttgttatgactaaatatatttttaattacaatatttattgtgactaaaactaaattagtgacaaattgcatctaaatactatattttagtcataagttactttttattgtgactaaaaatcacatttagtcataaaaaatttatattataactaaaaagttgtcactaaaataagttgttttttgtagtattaagtcaactaattattacaactcaatgttataatttgtacctctcccaagtgtctttaatgtctccggtagttcgccaagaattaccatatcgaccggcccatgttgctggattctcttgtcccctgtaagaaaatattttcaatgttaattaatttccaaattaacaatattaaaaatttataatttggagttttttttttttttttcatttttacactttaaagcagtttcttttcggaaatctatatagtaatacataacaaccaacagaacaatctaaattataaccaaaaatcacataacaatccacataaaaactatcagagcaactcaaatcgtatatttagaaagaaaaaaattaaaaagtagtacataatttcccttataattttgatcctatgagacaaatctaatatataataaaatttaaataattatcatgaattctttacaaaaaaaaaataaataattatcatgaagaataagtttaattaccattcacacaaggaataaaggattggccgaccagccttagacaatgcataactcatcttagtgtatctgtttcaaataataataataatcaataagtatagcataatcattttttttatataattaggctattaataattattgtagaaatatttgttatgaagtatagataattttcttgatgtctaatgtaatgaccaaaattataataacctttcttgaggcttagatccatcattgtagcaattatcatactttaaataatcgaccccctgcaacaaaaaaaataatcacctatttagtacttaatttaattttaaataaatataatttatccccttcaaatacattgactattgtaaattttgtcctttt

SEQ ID NO: 238887 - DNA, 1749 bp, Cannabis indica
aacatacagataaagggtctttcaaggatgtagggaatagattaaatatgtggataaccaatgtttccaaagcatatgttgaaagcaaaccatgttggctaccaaggatcctactctcgtaatagcaccaggctttgattagaataaggctgcgcttgaagagatgagcgtttcccaaacggcgatcaatctgcaatatggcattaacatagaagcataactacatgtaaataataaagcatactccttagttgggtgggcttttaaaagctttcaattttttagctctaaatggctcttttgacagaagccaagtttagttcctgagaagataaaagcagaagtccagccaagccaaacaagaccatattcatcaggagctgaaagaacagaaaccatacctgtaccaggaaacgatatgtagtaagtcctcctagttgattgaaggaaatgtctactactatatcctgtataacgcacttaacgagcttaacctgccacataaaccaccagagaactttaagatgtagatcaagtaaactgaaattgccatctctcatgcatgtaccagctttttcaatcagagtatagtgtagtacattaagtattatgtagtaaaagactatcacaaataaaaatgtaatacaatactaataccaattcaatcaaagagtcagattctattacacctccaagctttttatcttgattgaactagagattttgtgctaattatagtagcgaaaaaagggcttgaaattgaagacgattcaaacaaggaaatagaaaagaaataaagaaatgtaaaaccaacatttgaatttcaagacaatgacttgcaatgatctgttgcattgtgaggaaagatatgcataatccatacatgtgatatgaagtttttccaattgaaactacgaaattcagtttcaatgtgaacacaacttgattgaaatactctcaaagaaaatgcaagaaaataaaatatatcatagcaaagcatctgaaaaataaagttgaagatgcaacattatcaggatatacatgcaagcaaacccaaaagatttaagatggaaaaaaaaaagattagaccaagaagatagaacctcagcagcgtcaataaaatgggtgtccttgactttgaattgagcagcttcattacgttcttcatccttgagaattttacaaacttccaaagctaactgatcatttggaatagttggacacaagacagtcaagtctatatctccatcaggaaggtaagtattaagtggaacagatccatacaaatagacctgtacgaaaggatctcacatttcaacatataagacaaagaaattaaaatatcaagaaataactagcattacaaagtgtttaatgttacctgaaaatttccaagaagtctttcaacatatttgaaaatgttaattctcatcaggttggaacgcttggtgggctcaatcatggaaagtatcagtcgggtagtcatttctgctctgtcccaagaatcggaactaatcaaagttggtccttgatttgatgccggcggtaatggtgagagtgaagaaggtaatgggcaaagtcggttatggccataacacaccccattatgagttggtacggacttcaaaaatttaacatcagccattttttttcaatcgagtcaaaacttattcaagaattcaaaggttcaaacataaagcagagacccaatctccctcaaactatcaaactattttcaagactgaatga

SEQ ID NO: 238888 - DNA, 1374 bp, Cannabis indica
catcactcttaatgggtccgtctaccataatgtgacttaaaatttctggctgctaatattttcaagagacaaattcactaatataaataatttattgaatagtaccttagatatccgttcgctatatatatttttcttcaatgtccattactgctataaatctatataaagactagctaggctttgggttactatcaagtttatatgtatattgtcaaaagtttgacattaaagtagaaaatcaacgtgtatcacaccgatggtttactcaattaggacattacgtacgtaatccaaattttaagtatatattgaactagataatatagctgctggttcgcgcagttaatttaattaatattagcgaccattaaaaaaaaacttaagattaatgtaagggagatattttcaagacggaaaatcccctcttctttacaatgataattgatacctctagtataataaataatttatatgtcggtaattgaaaaccacaagtcatgatttgatgtgatgatccaatatatttggtttaatttaaattaaatttcatgtcaattccgataatgcatagcccactctccaaaagactagggaggggtgtatcatatcatgtgtgtgtgtgtggctgtaaatagtttcacactttgtttttgtttttaatatatgttattgattgtttattatttaattaattaatagtataaatgattggccaccggccatgcatggttgatttgttatactaccatcaactctactattcgtcatttcaaaaatattgatcatgtaaaaaacacttaataaccaaaattgtcaaattgacattaattctttttgtgtttgtttagttgtccatgcataaacgtgctagtgttgtcaacacacatatatatacaaacttattattacgtactcagcaatatctatatgccttgtatgtatatatatatagtttgagtaggttgaatgagtcaagctaattcttttctagatagtgttgagaaaattggaaattttgatgaaagaatgtaaagggtacgtaagtaggaaagatagtgaatatattaggcaagtttttatggaatgctatatgtggagttatgtaatatgtattatgttactatgaatcatcttctcaccaattacatataataagaacaaactataacttgtgagtatatattatgaagtcaaaactggtaagccaaccccatcttctcaactaaactatctcctaaatttgatattcacacaaacgacacagtctacaaaagtacatattaggaaaactcatcaacctaaggagaacgacagccaaccacttttcttttcattcaatatttacttttttctttttggttatccaaggta

SEQ ID NO: 238889 - DNA, 1207 bp, Cannabis indica
tggtgaaacaaagagctatgtgttgatggtatattttttgagtggtcgtatgtgtatggagagggtaggaattaagtagatcatagtactagtagtaataattgtgtcattttgcagccttaaaaattcaaaaagttgcactaataaaagcgccggaaagaggaagatctcacttccaaaaataataaaatgtctgccaacattgtcgaatgaattaataatatatggtcatacaacaaacaaagctgcctaaagtagtctaccaaaatacaaaaagaagaaaacgattataattttacatctatctacctaatatctatcccactaatctatctacactgtacccaccagctacaaaaataccattagtctaaaatatattattaacactacttttattatctactaatcacatcaaaagtagacaattttctttgtcaattcagctcataaaataaagaacgaatcactaggtaattacttgaactaaaagaactcaaaactatattgaaaaaagagaaagggcttcttgtaatatataagtagctacctttaatgcacaaagaatattcggttcatcaattcaataaaaatgttgccagacatgataataaaggtaattaactacaaaagaaaaaatggaaatgttaagggtcgaatatgatatatagtaatttagtagttgctaaatggatcttgtcagttatcaccacataatataataatgacaacactaaatcatcttcttctcttaaaagaagcaaaatcacattttcacaactgaaaaacttaattcaaattttcgttacggttttattttttagataaaaaaaaaacaacacatttttgtctcattcatctaataatagtggggaatttacataaaattttgtgtaaaactttatatatatgctatgataaatgattttctttacataaaaattgtgtaaagtaatttttttttttactgttttttattcaattcctactgagtttttaatttttttgtctttaattctcatttttctctctttatttctttaatggacaatctttcattttttaagggatttttacaccgtatactgaaatttttaactttttcactggagtgaattttttttttcaaaaatattgtaatttttgtgtactgtgttaaatttttacggttgttttttagttaatccattgttgttttaattgttct

SEQ ID NO: 238890 - DNA, 711 bp, Cannabis indica
gttaaataaactctagtactgcaactatatttgtgactcatggccaaatatgtaaatcgtttcgaaaaatgagcgggatgtgactgaagggagatatttacaatgctttttatagtttgagggaacttttgtaacaaaaaagaaagaggcaaaactctataaggatcatagttaagtgggaaaaatcatatttattctgaatatatatatgctgaaatttgtatataagatcagtagctcttgaatttatctaatacagttggattggatataaccgaattcggtaaagcatcttccatcttttgtgttagtcctagcaaaatccaagaacaacaaagagaacaatgagctataaaactataataagaaagaacgaacttgcacgtttaacaactaaattttcactagcattgactttagacacaagcaagctgattttgaattctatatagttaaacaacattaacaaatttctcagcaatgtcataacaaaaaactctttcatggatcaaatatatcaatgcttacatgttagtgtcataaacatgttagttggatataaccgaattcaatagatcatcttcaatcttttgtgttagtcctagcaaaaacctgaagttcttatctgttttcataatcaaccaagtaaaatccaagaacaacaaagagaacaatgagctataaactataataagaaagaacaagaactct

SEQ ID NO: 238891 - DNA, 844 bp, Cannabis indica
tctctccttatttgtttttctttaaaaactggtaatgagtgaggatccatacttaggagagaccaatgaataaagcttcgataataacaataaagtacttatatactgagaataatcagtaagataagcatgactattttgagtgtacgaaacacgtgtatcctaatcaatttcttcattttaaaggaaaaatttatcgttacataaaacacttgtcatattggtcaaatataaaatatataataacaattcctttttaaaactttagggtaggatttttttggttctatatagaatctgaaaaaaaaaaaattggaaaagtttttggcatggtcttctttcctcttttactattatacaataaatgagtcattttttgccggttactaaaaagttattacataaatataataccgttacataaaacacttgtcacataggtcaaacatgaaatgaataataataataattcttttttgacaatttagggtgagattttttattgttctatatagagtctgtaaaattatttttggaattttgtttattatagtccccctttctcatttactattatataataaatgagaaattatttaactatttataaaaattataatatatattagtttaaatataatttatcgttatataaaatatttgtatggtcaaaatatgaaatgaataataaagattctataaaaagaaagaagaaaaaaattatatatactttttggtatcctttttctttttggtgctatgtagacaggtccggccctgggcataggcgggctaggcctgtgcctagggcccacccagcccaggggccaaaattttttttttc

SEQ ID NO: 238892 - DNA, 672 bp, Cannabis indica
gaaagtagtacatggaaggaagcagttgaggataaaaggtgggttgggttgggcaatgccctgtcagtatttgtccccaaaagctctttttagctttggttatggtaattagctttggaaataggaaagagatcatatgagaatgtgggggccggtgagtattagtgcaaaaaaagacaaaggctagatagaaagaaaggaataataatctttaggagagggaaaggggcaactgtttgtttattttagctttgattgaacaataatgtgtgacaaagacaaacgtcccaacacacacacacacactagatatcatttttgtcttggagtttttggatgggaatggcatgcacaaatgaaagctgcagatgctagccattggggatgattagatgcttctttatgcagcaaagcaaaaaagagtgtcaaattttcgattttcgaagcccaaaaattgaaaaagaagacttggttggaccaggcgtgcatttagtatagttttttctatcatatccatttgcattgggcacatgtaaaagaatgtttaaagtctatattatcttatacaattcttcttatgctagctcctatagacctatgagaatttatttatttaattataaaacattaatatattaaatggggcaacgattaccatgcatgtttgaacaa

SEQ ID NO: 238893 - DNA, 1760 bp, Cannabis indica
agttttaaggaacatggcacataacatgaaattcaagtatgaccaggcccgaccctgggctaagacaagctaggtcggtgccttaggaccaccaaaaattagggccccaaaaatcagcaaggatttcaaatactatgcatttttaaaaattttgactttttgtttcttttctttttcacacgtccaccacaacaccaatctaggcccaactccaatttataaattaaaaataatgggaaatttacatggtatactaacttttgttattttcttacaaaaatactgccagacggtattttttacttttttactgtatttttttataagtttcatactgtagtatactgtgttaagttttcactggtgttctactggtgttttactagtgctctactgttgttttgagctgttctgctttgtgttttactggtgttttataaaagcacaatatttttgaaaaaatttccgtgtgacagtatttttgtaaatgtcaaatttcagtatttttgtaaatttcccaaaataatagaaagagacccaattacaaaatgagtcatgtcatcccatttgttttattaataaaataattaaattataaagaaaagagagaaataataaggaaacttgaatgggaagataaaaagtcatctaattctcaatcccatcttggcatctctgcaacctaaagagacgaaagaaaaaaaaaaaaaaagagtactggagagtggagaatcaaagtttgcttcatcacttaatcatttttctctatcaaaattacaaaagtaagtagttttactttgatattttttttataaaaattatatgttatttaacttaaaattatatgtttatattgtcaatataattttgagaaattttttccatttattggtaacaactaaaattaaaagctttggtaattttattctattattttgatttgtgttatttaacttttttttatattttaataataattaagattaactttttagtttttacagtatatgtaataatgtaaatataatgtatcaattcaatgaaattgatatattatcaatcacgattttgatttattagttatattaatatggttttcaattataagtagttcattaattttgtttgctcaatattcacttgtaggtaatgggtcctattagaaaatacaaatctgaatcagaaaaaagaaaggagaaattgaggaaagaagctttgcataaaactcaggttggttctctaaacaaatatttaagttatggaattgatgtgaatggaattgagaatcaacatgaaattgaaagtaatgtgaatggggtagaaaatcaagttatggatgatttgaaaaaagtaagccaaacaatgaatgagaatgagagaacttcaagtgatataaattattttccttttgacatagatgatccaggaaattgggataaaattagttgtaataaaatagactttatagttgaaagaggaccaaaaaaaaatcattgatcacatatttccctaggatgattttgatagaagattttctacaaggcattacattagagagtaaccaaatggggggaaacaggatagaaggtggttgatatattcagttctttgaataaagtattttgtttctgttgtaaattatttgcgaagaaataccttttagctaatgaaggtatgaatgactggcataatatgtctaatcgactaaaaaagtcatgaacgaaataaagaacaccttgagtttattgctatttggatag

SEQ ID NO: 238894 - DNA, 1535 bp, Cannabis indica
tagagtttataaagtgtgtgtaaattttctaaaattttattatatttattttatttttgaagatttgtcatttctaacacctttttgttttggtgtttgcaatttttcagtttcgctttgctctaaagaaaactagttaataatgggaaggtggttttttccaatgtgatgtagtgttgtttgaagacgttatagctttattgtctaaatttccgggggcagttttgtcccatgtggctcataatgagaattctgtagcacatggtttggcaaagcatgcccttcggttagacaatgagctatcctggttcgaggaggtgctgtagctgattgtggattgctgctttgataatcttgtgtgattttgatcaccgcgtcaaaaaaaaaaaaaaaaaaaaaaaaaaaaaaataggtgaccgcatatgttatttgctgccactaatgcccaattaggataatgtcgtatatggtcctttatttgtggtgtaatgtcactacaaatagtcaaaatatttcacttgaaacgtaaaactttaagaaattttaggtgttatttatctttataatttaaaaatttatttcaatatttaaaaatagaaaataatttttaaaaactaataagtgtgtttagctaaatttttaaaaaataatttttttgaaaatattattttaaaaaattagaaaacagaaaacataaaaatgttgttttttattttcaaaaataatttttttaacatattattttttactgtttttttttcacatatttggacttagatcccggactcagacccaggacccacacttgaacttcgaacccaaaccccataccagatccctggaccctgacttcgaccccgaccccgaccctatccaccttgaccccgaccccgaccctggacccgaccccaaccctggacccgagactcggaccctaatcccgatctcgatccaaatccagatttggaccttaaaccctaacccgaagcagaactaagaccctagacccaaaaccaaacccgaactcagaccccggacccaaaactggatgacctggactcagacctaaccccaaacccaaatcctgaactcgaaccttgacccaagaaccagactcggaacaggaccaaaacacagacccagaccccgtattgggatttatgccctaaaagaaagtaattaatggataataataagacaaatgaataaataattataatagtataattaataaatatctgaaaattctttattcatatggagaatgcgtaatcttgtaaggatgtacaagagaattaagattatacaatatgaataaaactagtcggtagtgtattaaagtaaaagaatctttaatatagaactgttaagtacggattactatctactataatctaggttgtgtgattttgattgacatcgcatatgtggatagatatatatgtggtaaaagtgttgtgtataatttgattatacatgacttgaccgatatgtaataacatcttttattgatataatcaatataagtactcctc

SEQ ID NO: 238895 - DNA, 7389 bp, Cannabis indica
ttattgaaaagttgttaagggaaaaataaagtaaaaaacaatcagcacaagaacccatatatccaccaccgtactttaataatggggtcactgacttcaccattaccaagaagacgctgtgagtgccaaccctgcatagcacgtgcagcagcatcccttcgtgctctacctgaacctgaagcctaatagcaagggagtaagacacacacacacatatagcgagagagagagagagagagagttcaaagaaactaaagtattagaagttagcaacagatttagacccgtaatctctagtggtaaacttcactaggaatcttagtactagataatcaaaagtcaaaatcagaacttacctgagtatcaacaatgacaggctctgcatgggaagaaacaggtatattaagctcacctccacttgttttatgcctttcataatccaagagtgcctgaaaaatcacaaaatagcaacatttcgaactaataaatgtaaacccaaataggtactaaactatttttcagaagatcaaagactagagagggttcaaaacatagagttataataaatagaacacataggatttttttaccaaactatgactattgtagagttttaatccccttgtaaaataaattatctaaactatagtttgaattacaaatatgccccaccccgtcagttgcatttcattcattttctctaaccattttctaatgtggccactggccatatgtatacttacaatacaagcgtctatttaactaattttaacaaactgaaatcaagtacaatagtgttaagcatgcacacattagctctaagaaaaaatacagattctcagagtttgtcattagactaatatgtatgcatagatttttcaccgcgactcttgagctgcaccagattagtactaggtcagtgcacatttgcaattatttctattgttcaggggatttttttcacaaaaaaataaaaataaaaagttcagagggcaaaactatacaagattcatagttcaggataaaaataaataaaagtcagaaacaagggtccaatgttccaatacatatatgtcaagcaccaaaaaatggtagtatgacatttttcaggaattcaggcttcagatttatgccatatgttccataatacaatagcaattataagtcaattgttcaaattagaaacaactcaaatttgtttctcttcatcagttcatgtccgtatgtaataaagaaagaaccccggatgatgaaccagtgataaagtagaatgtttgccattgattttcttttcttacccatctgttaaattagcctagctggagtatgaacccaaacttcttaaacacaacagacacacccaaccacatgtaataaaaaatatattccagttaaagtatagtaatattatatttatttttccttctacacttttcaataagatcacgaactgtggacttaagacatttttcaagacaatgcgaaagatgttaaatttgtagttaacacaatgtctcgacacactgttaggatgtagtagactaaatgcaagcacttccaaaattccaataagttcaaccattctgaactcaccttctcataaaaaccacgaaatgtccaagaaactgttgtgcatgtcctgcagaaggattgaaagagagattatctaattaaaaagagccagtaataagaatttaattatacattaagaataagaatatgcattttttcttactttgggggtttgaaggactcccccacttgccgccacagcttacatgtagtcacctatcaaaaagtaagcacagagtttgaattatatctattgatgaaccccaattaaactattaattcaaatgtaattcccctatgatccataagtgtccagttccaaaactctccaccacatatttacattacaatacatgtaattttgaaattttaagaagtaaactaatcagcagagagaatagtgacataccttgtcatagccacctaatttagtcacagctctccaaagcctatcccaaatataaaacaaatacacaattagaaaataaaaaattaaaaaaatagaattaagagatgcaataaacgagcacagactcacttgaggcaatttagaccttctccatagaacttgggaggtttgaattccatggccctctctctaaagaaattttcgagctccttcataaagtttgactggtcctcttctgtccctgattcatttccttcatacatgtgttggtctaaaagaaaagcgtgttttgaggtgggctcagctataagaacaccatttccatttccatttccatttccaggttcaggtttcatatcagaagaggatttagaaacaggctcatctccaggttggtgaagaggtacttcagaagcttcagttttgggtggaagtggaagtggaagaggggtgtgagtaggagaaacagcagttttttgttcatcccgaggttggttttgatcttgggctggagttggagtttgagtttcagtttccaaaaccagactagattcttcttgtccatgcccaacaccgtcatcttcgttcttctccttggaattagtcatatttttttttactattgagacaataaattaaacaaggttgagactttaaaatttcatctaagaagaaacaaagcagtgattttgaaattgtatatttttgaatcagattaggttcatgtgcaggtgggaatttcgtaaaacaaaaaaagattggaacttgaaagagggaataacgtaggtacctacctggttgaggttgattgtcgggagagaattaaagcaggtccaccagaagcaagcaaacacagccggtgaatggtaaaaaaaccctattttttgttgttgtaaattgaaaaggaagaagaagaagaagaagaagaagaatgtgtgattgtattgaaactgcgtttgaattttgtggatagtctactctcatagatacattcacatcatcatcatcatcatcatcatcgtcataataataataatcacaaattcatatttttggatttacattatcaaacggattgtaatttcaataccagatcacgacgtcggcaactctcggtcccgcaacactctctctctctcgtcaaagtactaaacaagttatttctattctaacccttcaacttataaaagttttgcaattcagtccttcaactacaaaatgttacaagaaagtcccttattactaatttctactctccactagataagagattgtggtaaccaatatcattataatgtgaggagacaaaaaggttggattggatcgaatgcccacgtaaacttaatggtgtaatttactactagatgtcattataatgaaattgatgaaattattgaattctaatattttagtacattttattgtattgtgctatattatattaacattaactaatacaatataatatttggtattaatttgtattaacaatttgtctaggattacattaactttaccataaactcgaccccaactcgtttggagtctggggccgggtcgagattcaatatctagggctgggttgagatccaagatctagggccgagtcaaggtcagggtttggggccaagttcgggttcgggtcctggtatgattcaaggtttggatccgaggttgggatctaggtccgagtccgagggccggttcaggtctaggtttgggttcaggtccaaagtcagggtcctgagttgggtctatggtccaagtcagggtccatgtccagcgttggggccaggtttgggtctagactcgcatccgagtccaaggttcaggattgaggtcggagtccccatccccgaaccctttgtaaatttataatataagctaatactgataatttataatttattatgtattaaataatacaattcacattatattaaaatttatgatcacaataattaatacagtataatgttttatgcaaacataatattacttgccatttaatataatataatttaccaaaccagctcatagttggcaatacaacacaaaaagggcaaattttagagtagttggaagttgaaaggccaactcatcttatatgatctattattgctcttgatagatttataggcttggtcccttctgttaacagtgtcaagtgttattaacaacaccttacctaaatagttataaaaaatgctttccatcaatctattgtagatttattattaataatatcatggtgtggaaatgttatttgcttggtttggtgatgatgctgagagtaagagtagtgagtgaggagaccaatatgtactatctacaatggttaataacgcattgatctcatcatcaactttcctctctttactttaataacaataattaatttatttgtccaactaccaaaccaactactaactaccaactaccaaatactaagtacctatctgagctttcttttctttcccacattccaaccttactgttccaaggacaaaaacatcttttaataagaccaattgagaagatatatacttcataaatgaaaaaccactgtctaacttttatacaaattcttcttgaacaacatgaacagatgaaactaataaatatgtaaacagggcattttgcacaatcatattggaataaaaccatcagtaggcaaatgacttgtgagctttttattcctttctttgtattttcatatgtgtttgttaactaactttaacgaccataacacatacacaaacttgctccgtgaaactgatgacttttagaacaaatgaaaattttagcagagaagagcagcaacaataaattaagatttgatgatcaaaggactttcaactcaaggtccggatgcccaactcgacttttgtgcttttcgaagagctgttcaagttgttttacaaactgagcatgcacttcagagacctgaaaattaacaaggccagatgaaaaaaaaaggtttttgtattggacaactttaaacataaagtaaaacaccagctttctttagctttagcgttcagaatattcggtgaaaaatagactgctcacaatgcaaactaacattctttttgccaaagaccctgcttttatgcggggtctctatactataatagcattccatacctcttccatggtaggctgtggagttttcttcagttcaattggtttgcccacaaccacatgcattggatttctgtaaggtaaaggagatctgcaaaacaataaccagaatatggttggtactcataaactaaacttgccttttgataagttatctgaatcaagcacattcaaactcattctttgaatactaaaagtaagcttagattatgcatttccttactgagtatagtatcatcctcctactaaatctattatgaatatatttctgaggaacattgtgaagaaactacagacttttatattcagataaatactccaagaaccaaagagtcctgtgtataattcaatacaagttatgctattcttcaagaaaacaagaatagtcattggagaatcagaatgtcatacatgaaggtattggtatcagcatgcaatagaataggtcaacttcccaaaagtgatacttctatttatttagaatgcatagacagatttagctgccaaattagttcactaaatacaagtgagactgtaaacataaagaaaggtgtcaaagcaaggagaaagaccacaaagtaaaataacacacatgaattttgatgtaacatacccgaaaattccccagaagaaaataggggtgaacttgattgctctagaaaacttgagaaataacttcccaccaggcttccaccacttgtaaacatttgactgaacaacaatttttgaagattcataagaaaaggaaagcttcaccaaatatatataattggaagtgaaaaaaatcatccctttccagtccaagattagatatatatgcttgcttagaagttgaagacaatttagtacctggccaaaacagaatacaggaaccaggggtagccccatctccattgctatgcgaacgaatcctcttctagacttcaagaatgcgatctgcactacacattaagagagttgagacttacttactacattggccatggagccagaaccaccaaacaaagagataagaaagagttggctttagattacctcagaaccatggtccatatgaaatgtctcttgcactccacctgggactaagatgcaactataaccagcagctaagtgagagacaaagttgttccttgttgctggagtaagacccaaccatgtccatatatgtctcaagaatggtgtgtagaacaccttaaagcatgaacatgaacatgaattgttgaattcagatttagcaaaactaataagtaagagagaaagaaagcgttggttggtagtcttacagcactgcttgcaaggactttaatttttggaagaggcataaagccagtaaggtcagcaagtgcaaccacaccaatgggcaaaactgaatggggttcataaccaaacactgaaacaaacaaaccaacaaaccaaactttatttactttacagaaaagaaatgaaaagaaaagaaaagtaaattggagagttagtttaattaccataagcacggttgggatggaaggcatgaatatcctctacatgaagagttaggggaaaataagcacaagcgtacttacaaatgaatctgtcaattttcaaagtttgattatttatggaatgaagaataagaaaagggaaaagaaagagttttgagtattgagttgccttgagagttttcggccatatttgcttttatcatcgatgggaatgatgacgaggagaagtaggaaagcaaagaccctgaaagcaaaaaagacaaacacttttagcttaatccaacgcccaatgcccaatgcccaatgcccaatgcatgtacataaaagaagagaaagagaaagagaaagagttgagattacataagagaatattgtagaggaaggaagaggaaggagaagaggatgagagccacgttgaaatgaatggcacccagccacagactcatcgctaccactgatttcactccattttcagacgacgaccccttaaagattttaacttgttcattcagattctgattctgattctgattatccagcaccatctttcttcctcgtgttgattgagtgatgttatactatatctacgactacgactatgtctatgtctatatatgattgatttaatcgaatcaaatgaaatgaacgttgttattcaatcgaagctcaaatgtgaaaatggaattggaattggagtctgtacttgtctagaattagaatagaatagaatagaagagaaagagaacgagaaagagaggttgcctctttcttatgtaagactaa

SEQ ID NO: 238896 - DNA, 1587 bp, Cannabis indica
tgcatgcaatacaccgtttctacatattacaattttatatatttgttttcactatagtgaaagtttaccttttaaaaaagaaaatattgcatgtaattttgttgaaagttgatcattatatatatgcgaatttgttttattttattaggatagatagttaattcattgaaaattcaacgaaattttgctgattaatgccttcactagaaaagaatctttcaacgtatgatttaactgttatccttgtgagtaatactttcatattagttatatagttttagacaaattaattgttaagctatgccttcattaacgtttgtctgtgcattggttttctcagcaaatttttctttgttcatcgaatgatcagttgtgacaacctgacatgaatagcccatgagaagaagttaattattttaaagaggaaaaaaaacatgcatatgagttgcttatttaaaagtgccaaaccaagtctgtgccagctttaagattcgatttacaagttgagaactttttatttcttctccagtaaaactaactataatttacaatataatcattatcagcaaacaaaatacccaggaaaccatagaaaggaaactgaggtgaaaccaaaacatcttaaaaactcaaatacttatttgtcgtcttggaggcagtattgaaagtatgttgctcttttatttctcagttacttttactctctaattgtctttggtacaagtggctgaagctgttactagtattaacgacattgtgtttttcttcatatagctcagctcagaaagtaactagagaaacagaatggcccaagttctttctgaaagccttactaaagatttgacagaatggaggatcgaagcaatggttctccttagtctcctcattcaaaccatattgatcgtagccggaagcaggagaaagtactggactagcagctcactcggattctttctatggatggcctatctatcagcagactgggttgcaacactctccctcggcttagtttccaataccacaagaactgatgcaagtgcaacagaggatcctagcccgggctacgttataaaagccttttggtcttctcttcttcttcttcatcttggtggccctgacaccattacagcttattccttggaagatactgaattatggttgcgaaactttgttgttctctccggacaattgatagtctctctctacatcttcctcaacgcctggtctgcagattggcttaactatctctcccttccaatacttgtggctgcaatgatcaagcttggacagagggttttggttatgatgcgtgccagtagcgaacattttagaaaatcattgtttcctgatcctgatccgggtccagactatgccagatacatggatgagtttagtttgaagagagaagagggattcaaggtgtcttcaagaagaataattgacatgcctaaagtaggtcatcatcttaattctgcttcagcaaacgtcacaattcccaatgcacaaacattgttagacgcatcacttctttaatatgttcaagccacttttcgctgacctgatcttaaacatccacaacattttcaa

SEQ ID NO: 238897 - DNA, 1170 bp, Cannabis indica
aagatcctggttttcaaaaagagaaatctgatgcatcaaaagactataatttcaaggctggtatgtttcacaattttttagttcagcgaagtaagttagattggctgagaaaaggagatgaaaataatgcctattttcatgtgtgtattaagaaaagaagagaggaaaatcacattgttacatttgttaatgatcagggagaattagttgataattatatagaagtagttgaccattttgtcaagcatttccatatttacttgggaagtcatagttcagccaacaagaagatggatttaagctgcatagttgttgggaacaagcttgatgtaatgcaataacttaagctgctgaagccctttactcaaaaggagattaaagcagttcttttcagtatccccacatacaagagcccaggcctggatgggtttggtttcggattctataaagctctctggccagaaattggacaagaggttagtaaagtcgtgactaatttttttgatactggaattctgccttcggagtttaatgaaacttcaatatctcttgtgccaaaagttgacaatccaactaaggctattgattatagacctatagcatgttgttcaaccatctataaatgcatttcaaagctattgtgcttgagactttcagaagttttgccagatttaattcactagaatctaggagcttttgttaaaaacaagtccatagcccacaacattcttatttttcaagatcttattaaagattatggcaagaaaaatgtttcagctaggtgtgctatcgagattgatcttagtaaggcttatgacacgctggactgtggttttttagaagatctccttaaagcttactgttttcctagctagtttgttaggtggataatgacttgcttgaaaggtacctcgtattcaatcatgatgaatggaagattacatggaaagtttcaaggggccaagggtttaagacaaggagatccaatattcccttttttttttgttctcgttatggagtaattgacaagaaaattgaaagtggaatcttaagaaggaactttcagatttcatccaatgtggaaaattcttcaactaactagtttatgttctgcatatgacctcatcttgctttgtaaagggacggttcaatctgtgagacatttaaaat

SEQ ID NO: 238898 - DNA, 2115 bp, Cannabis indica
cccactaaattttaggaccggccggggcaaaggcaatgttttaattaagatgccatttggttttattgctagaaaatatggggtggtataagagtagattagctgataaaatatgcttgttaatttggacttgaactaattggtcagtactaagcttatcaatagccggccctgaggtgaggcgaacaaggtatgcgctttgagtccccgaatactcaagtcttcgaattgtgaaaaaaaaaaaaaaattaagtatagataaaatattaaatagtagagcaatatatcaaaataatatctgacatagtagtaaagagtgtcgttttaaagtaaaggtcaatgatcaattcccagtttttatcttttaattttgatttttagaaatattaaatgtgtgtttatacaaccaacttagaacttttaaaaactataaaaatcttataaaaagttttactgctgtgttaaagtattagaattattatttttaataatattaaactatttatataaagactccaaaatttaattttatcttaagccttatataccttaagactgttattatgtctgaaattttgtagtaatattactttttctattttcaaatgtctttgcattttgattaaagtgatcttaactaataattgtgtttttgtttggatcagagctttactaggaagtgtgagcagttactgtgtgaaccatgccaagtgccctgttttggttgtgaaaaaaaaaagattaattaatcaggttgcatattttgatgaacatgatttttaatatgtaagagattgagtattctgataaatcaaataattagatcaataaattactaccctgtaaatatattttggttgtgttgtgttgtgtttgttttactcaattctctgttatgagtccattttgtttttacaaactctatttttagttaccaattactttactatataataaagcaaattttatggaagaatctcatttcaccaattcatttctttctttatttgtttgaaaaaatggcatgaaatcttattctaatgagactatatatgattcaatgagaagaaataatagaattatagcttaattaattcattttgttagagatagtctttgggataatgatatttcaagaatatataagactagtgttttatcttatcttgatgggggatcttttgtttcttgggtaataggtgattagttttcaatatttataagttaatcccttaacaaattagaaatattactcagcttatccactctcatgacattttaataatacctaatgacttaactactaaaatgattgtgtgttaagatgcaatgtaaaaactaaaaagaacaaacaagagtatatgtttagatatatgtaaatttaataatctcaagttaaatgtatattatattgtatgatgcatattcttaaaaggatgcatcgatatatttctatctattttgatatctaaaataagtttttaattaaatttgttctcatagtcatatacgttataattatttaagatattctacaaaattttaaaaaaattcgaaaaaatttattacgtggaaaataagattcaaatattgtgttgcacgcataactattttattttatacgaatgtaaaatagactatttgaacaatactttctatattataaattattttaaatttttcaaaattttgtaatgtattttaaataactataactcttccactcttgcccccgaaaattgatcccgtacttgcctcattagggacggatgcttgcgggtataattgctaaataactataacgctcccacccctgcccccgaaaattgacctccgtacttgcctcatcaggagtggatgcttgcgaatataattgtcatccttatataacatatacgaatataaataaaattaaactattttttttaaaatattaaaataggtagaaagtatatcagtacatctattttaaagaatatactgtaaaatgactctacattatatatgtttattttagtatgatatgtgttagaaatattaataataatcaatgtaaaaataaaataaaataaaattaattactagatattgcataaaattaattactagatattg

SEQ ID NO: 238899 - DNA, 736 bp, Cannabis indica
aaataaaaagtgaaaaaataattattaagtttgttttaacaaaaattgttgaatttaatttttttaacaaataaaataatgtaaagacaaaacatgtataaaaatattactataggctaggttccactatgattattatgtttccttgattttatcacctttagatcaataatcaaggtataagaaaatgtcaccaccataaggacaaaacaaatgttcatatcatagacatgttcattcgcgataaaaaatcatacttttagtcacaacaaaacttgtgactaaaagtaaaaaagttgtgactaacaataaattatcattcctatattgtgactaaaatgtccgtagctaaagatattagtcacaaaatttacaatttattgtgactaaatatattttgtcacaatacttgtcgtaactaaaactaaattagtgacaacttgtatctaaataatatgttttaatcaagtaacattatgttgtgagtaaaagtcacatttattcacaaaagaattatgttataactaaaaagttttgactaaaagtagtagttttttgtagtgttataagtaacgttaaatattctttctaaattataaccaataataaaagtagaaattacactatttttgagaaaattttaagagtttactttcttatggtataaataaataaagttaaggggttatcggtttttttatttttttttacatttatatgggttttttatgccata

SEQ ID NO: 238900 - DNA, 716 bp, Cannabis indica
ttttttcttcgtattttcccatcaatatttagttaataagatcaattaacctaaacaatatatacttctcttcgactttatgggttttttttttcaacatatggatattaagatagaaattttttaggaattggaaccaaaaaaatcaatctagtatattccagtgagcaaaaaagcctaaaatgtttttttgagtaaatgaaaaagaatctcaacttcttttgcggatctaaattaaaattccatttgcaagaaagtgaaaatgacagtagtacttgggtgaacagctattaatatattatttgtagaaatgttattgagcttttccaatgacaaactacgtattttagccaactaaatagttcaaaaaaatagtgttacatttatagtaagaaacaaatctatacatacatacacacttcatatgtcatatatactgtaaataataagaaggggaaaaataaaatcccagtagttgtcaaaacacgatgtgtcaatttttttgcaataaggtacgtaattgtaaatatatatccaaagttgcagccagccatttttaaatcttatttttttttttttttttttttttatttggtaggccaaactactcttaattaagtttaagatggtagtaaatattctaagagatgactgggattcagatcttaacaagttcatcccattataaaaaactgttacttttagtgataattttt

SEQ ID NO: 238901 - DNA, 1329 bp, Cannabis indica
aaccatgcaacattaaatgttatttctgatctatattaataagtaaatctgattgtattgaaatgagttttatttagggcataaaacccaacagtccttttatattataaccacacaaccttcttcaaacaaaggctgggacttaatcttctttgtgattggtggaaactagtttccttgcgttattaacccccatgtttttcctctcacttattgtcttgttacatgttacaatgttatttcttttgacattctttttttcttccttcttttatgaaacttacttacaattgacttacgggtattttcttacttattcatgttttcatattttcatgtttccataattttcttttttcagaaactatttagtattaaggtactttgtgatggaaattacttttacaggatcaatgccataagaaatacaagaaaattccaaatttctcaaagaaaaagataaaagataagtaaaaaatgataatttttcctttttttctttgctacatgattttcgaaatttccctacacaagaacaagggaattcaaagtcctaattctattgggaatgcttgaagaacagagacaattgcctaagattgttaaaattgatgtccatctggtagttttgagaaaccgggctcggttcacgtcatcaagtccactccacacaagtgtaaagctaacttgggagacatagaaacttttcttggtgacgtgggcatcaatgtttgacacatggcaagaaagatgatgtcacagagttgagtagacccgagtcatagcagttaacttgggaggggtaccttaccttgcgcccaggttgacttcgggaactccgggatagaagtttggactttgataactcatttccaactcattacctttcggtattctgtaccatgaagaatggagcaatcaaatccaggccttgggagctaaaattacatgaacctacaccacggaagtcaacctgggcactgagggtttcacctagttccaaagttgacatccataactagagtttttgttttcgggactatcttagtgaaaatggatcaaaatttgcatcaggacatgaattagacataacacgaacatatttgaggcactataattagattcaaagaaagttaattttagcacctacaacacctggtgcccagacacccagcgcacaggttgacaatttgtcaatctgggcgacttccaagtatcagattgacgatctgacttttgcatcatctttctcttcataaaaaatggggatataggtacttttatggaagaaacagcacttcctaggtgccaaaagcaaggcccagtgcc

SEQ ID NO: 238902 - DNA, 657 bp, Cannabis indica
tatggtacagaatcatggtggtatgatggtctttgcgaatgctaaggttagagttagtgcaccatcacctcttgttggtaaacttgaaacgattcaggatggattactggtgggcattcagcggtagctaagtagatttaaggttgaaaccagttgcttaaaggcattcaaattaattcacaatgtggatgaaaggtgccaagatacatatgggttggtcatgaggtgtgatagttttcacaatgtcatggtgtcattggtttgatgtttgtacgtagaagagtgaatcaggtggcacattttttagctaattatgctttggctaaaaatactaacgctacgtggattggggttgatcctctttatgttcgttatgtagtgatacatgatttgccatttctttataatgatttttgattgaatgaaggaattcctttaaaaaaaagaattattttattaaaaatttagttatatttatcatatatattttattatatatgatatattacttataaaaatataaatttttttagagcttttttatttaaactcttataaaattagaaataatataaccttaaaatgaaaacaacataacttcgaaatagaaacagcataacctcaaaagaaaaataatttgtataaaaataaaaaata

SEQ ID NO: 238903 - DNA, 1465 bp, Cannabis indica
attttaaactttaagatcaagaaatgtgatttttcaccaataaatcacacggtacaggactagaatctgttaaggccgcatcatctcgcgagtttggttcaagcgaggtcaactctcagagtcattaataaacaactcatccatcccttaaggattggatccacgtgtcaattttataggagactgatctcgagtttctaagcgaaaaattcgcactataacaaccacctagatgtgtcagtggcagagctaaccacatattctagtgggggcaatttttatttttttttagtaaaagagtcttaatgaaaaaataaatcttatagggacaaaaatagtaaaagaaaaatatgaagataaaattaaaaaaaatatataaattttataggtagaaaaattgaaatgtataaatatataaataaaatacactaattttgtgggtataaaatataatattaaaaatttacacaattaatttgtaaaaaaattgaggagtctatctataagtgttatatcactattattataattaagtattattgaatataatcaaattaaataactattattgaatatcgttaattatttacaagactctacatctagctcatcatagacactaatgacatctcatatcaatactcttcatgttatccctcttgattgagacttttaacctatcaagaaggtgggttaaaatagtcccaagtgattttttatttttaaattttttattttttaattaagtttaaaatatatattcattatatttcaataactaaaattttaaaaataattaattatcttattttaaaattttattgaaatagtttttattttttaaatatgaattttacattttaaaaaaaataaaatcataattttgtaaaatattatataatttgtaatgttattatattttattgaaaattttattttatttatttttaattaaacaaaataaacatttatcaaaaagatatactacagtagaacctctatctaaaaatacacttaggattaagtaaattatattataattgagaggttataactaaataaagtaattttaaaaaaaaaatactaaaaaatattaatgtaataataataataataaataatctttaatataatattataatagaattatttttaagtaaatatagtatttatacaagtattataatttagaataaaattatttattttaaataaataaattaataatatatatatggaacacttcttaatagatattacccatgaatggttactaaacaaatttaactataaatattaattttaaaaatatcaaaccatcgaattttaatctaataacgaatagtaaaatcacaaatctgaatttctatgcttaatttatgacatgtagtaaatcatgctccttaaattttttggccgttaaaaattctcccgaactattgagattgttaaatttaaagatttt

SEQ ID NO: 238904 - DNA, 4131 bp, Cannabis indica
taaattatataaaatttcattctatacgtacgtacgtaggaaacaaaagcatgcactacctatcaaagaaatcatattaaatatgtatatatttctactagctatagttgcttgagaatatctatatacataatgaattaatgaaataaaaatatactaatattaatataaaatattgaacaagtatttaataagtgatttatatctatatacttgaataatattcaatcttaaaattacgctagaattaattaacaaacatatggttttgggtaaataaaattaaaacatatatggagaggtaagtaagaaattaaggtgattggaaggggtttaaatgtaaaaagaaaaagagtatatatatagtgttacaatatgatcacaagaaaggactgcgtaattatattgtcggtaaattatatggatgattcactgtaatcaaactgttggagaacactactcagtagtagagatacaccctaaaagcttggagtgcccaccataacacttaataaagctaaaaacaatttcatatctttctttacacaattattttttttttaaaaaaaaaacaaataaaattatctcaagtaaagcaaagccaaaataattgatttgagaggatgaaattaagtaaaggaagtgttatttttaccagctaattaattaaatatatagtagctagtatatattataattctattggtaaagtcaaggcaatgttcaccatttctactgcataattatattcctcatttgccgttgtaaaaggagccagtagatatgtgattattgtgagacgatatgccaatcatctttagacacaattgatttgttgtgtgtatatcgatcataggttaatatttactttgacccttattatatatataagatatcaggtcattcattgttataatttttgccacggttctatattatatatattctataataacgtttatttttttgtttcatttatagaatagaaaaatgacaaaaatgtgaagaaaatgaaagatccataaagattatatatgttattattaaatttcacacgtaaataaaaaattgctagcttagtatctttgtacatggatataatggatttgaattatagtaatgagccgcagaagttgactgtgcatgccaaagcaggctaccaaaaaattatctctacttaaacaatcatactaatgaagcatgagtactttacgaacagttcagtagtgcatgcttatacaaatatatatataaatatatatatgagacaagtaattaaattttgaattaaacgaaacgttatattttatttgttacaactaaataatacaaatagtttaatcaataatttgaatgcttaaaaagggaaattaagaaaaagaaatagatgagaatgtaccaacgagatctggacccagatgatcaatatcggttgtggctaaagtaattaaagggtgtgccaaaatttttgcctggcctgctaatcaaaccaatacaaaatatgtgtataaaaaagagaaaagaattaaaagatatatattttaaaatatatataataattgtagaccccctaatcaatatcggtttgagttgttaagatcaatatcgggtcctaccgtacacatatttaacttatatttaattaaattttcttttggattattgttatttccttatctttttggaacaaaagcaaggatcttatgtcatttctagtgagcagtccaggagatcagaaggcaaagtgtagtgtgttgtgtagaacaatgaagaaagaataataatgaaaaagaaacgaaaatgaagatgaccaggaaggagagctaataatataataataataaagaaaattaagataatttccacgtcatcatgccatctggctagaagtatccagcttggacttttcatgcacgcgcgcgcttgaaaaaaaaaacaaatctcttataaagcgtgtgaaaaaaaaaaagcacacaaagaagagctctctctctctttctctctctcaatcatcgtcttctctaatctctctctcttcttatcaggcgtggtctctggcttttgattacatactcaaaactctctctctctttctctaaagcttaacgaacacccatcaaagcgcatgtctgctttgttttctttctcttgttttgttcccaaacagtgaaagagagaaagagagagagagtgtgagtagaagtgatagaacaaatctaagagtctttgtctcttgaatttgtcctttttacacatttaatcatcaattttttcttttcttttctgctttggtgttttatcaaacacctaagaaacacactacaatctctgttgtttttctctttctcagcttttgacactctctgatggaaaacaaataattacccatcatttgaaatccaaaacccagtactatacacactgtttctttcctccattattattctctatctcattactttgggctagctagtactataaattgaaaccaaacaatggagagttgggataacaactctcaaagatatcatcatcttcaccaccaccggcatcgtcatcggagagaaaatccttctttctcttccactcttctcgacaccatttaccgttctattgacgaagggaaaggaaacgaagaaggagagctgatcttgtacagagagagtatgaggaaaaaacagagtagtattagtagtagtacaaccacaacttccgggagtttaaaacaagaagaagaaggcatggacaacagtctccgtcgagcctgcatcatcgagaaatggatggagaagaaggtcagtcatgaaaaagtcgtcgtccgcagaaactccgtggaggatttcaatctaaaatcgactaaacatcagcacagagatattatgcttctcaactcaagttcaagctcttccgagtcgagttgtggaggtgggttttcatcttccgagtcagaatcgttccgtacaggctcaaaatcgaggtcctcttcttcctgttactcaattcagaagcctaagcctattcggacaagtgtatcggctccgaagtctaatcagcctcctctgttctacgacagtcatcatcaaaatcgttacgaccagtcatataatatcggtggttcagctccaaattcgactacacaaaaacccaagcacgaaaacgggtttgtcaaaacgaaatcaaaagctctaaagatctacggagacttaaagaaagtaaagcagccaatatcccccggcggtcggctcgcgagctttctcaattcgcttttcacaaccggtaacacaaagaaaaccaaaattgaagaattgggttcgcagagaaaatccaaatcaacaaatgggtctacaacgacgtgttcttcggcttcatctttttcgaggtcttgcctgagcaacacaccctcatcacgaggaaaattcagtagcagcagcaccggagcaaaaaggtctgtaaggttttgtccggtaagcgtgatcgtcgacgaggattgtcggccttgtggacataagaacttgcatgaagagcaagattcagcaacatcagctctaatggcgttagccagtaataatgtcgaacaggttgggtactacgttgtggacgacggtcatcgtcgggttcaagaagttgcgattgatttgctaaagagttaccagaagaaaaatagtagtctaaacgacgtcgtcgctctaaaaaacgacaataaaaacgatgtcgttgagtttgatatgagagatgtcgtacacggtaacgacgacaatgaagcgtttgaagacgatgacgacgacgctagttgtgcaagctctgatctttttgaattggataatctctcggctattggaatcgaaaggtatcgtgaagagttacctgtttatgaaactacccatttcggtaccaatagagccattgcaaatggtttcattttgtaatttttaaccaaaaaaaaaaaaaaaaaaaaaaaaagaaagaagtggtgaaaaatggtataaacttcataattaattagtttttttttatttttagttcaagtaatggtgtggggttttacatttagtgaataactatatttctttctttgttatttatttggtgctatatatgtgtacttattattatcttaattagttacctctc

SEQ ID NO: 238905 - DNA, 1311 bp, Cannabis indica
ttttttgaaatcttgattttctttttcttaaatctgaataaattgttgaagtgatttgtggtaattatcccaatatatgtaacatgcaatgtttttatgattttgtgattttatgattttatgatagttctcattgaatccatgaattccacttttcaggtagataattcttgcataaatttatataaactaggtgagattagcacgtgcaatccagcttaattcttcttgttttattttatttatatttttatttgtttaatttttatttcataaattattgtgataaaaatttatataaaaactaatttttttttttggatgtcaaaatagtacaggatgcaccataaaaacttcttacttctattataaaattttcaaccaataatcatttaaaatataataaaaagaaaaacttagagaaaatatagtacgccactaaaggagtgttttggtagacctccttatctatttcaacatccgagaaaattttttagtccaatttattttatcatgattgtcaatatgttgtagttatttaagaccacctataaattttcaaaaaaaaaattaatggtttacaatgaagagaaataaggtttaaacaattgcttactgctagttaaaaaacaattacttaccacgtgtataagaaaaaataattacgcatgcaaccaaatatttaattattttttacatatattcatgttaaaaaaaagcttcaagttggtttttttaaaaatagaaaattgagaaaaattgatctcaagctattattttgtaccattttagaattacaaagtctaatttactattcaacaaaatagaaaattaaattggtcacttttgcccacacaaggttgaaaataatatttatcctaacaaaaaaaattgaattatactttctcaaaatatgaaacacggcgaaatcaccacccataaggaaaaaaatctatatagatactacttatatataagttaggacataaattataattattttaagaaattgaagatagctcattaaaaataaaaatagtaaaatgaaaataaaaacatagcatatacttttatataatttaaatataaaaaaaaaaagtagtagaaatattattggtaaaaaaattaatttttgcatatagaaaattaatcgagtaaataattataaacatatgtaaattacgtatatatagggaaatttgaaattctatacataataaatcctaatattatttccctaaacttaaatattatactataggccatatgactacattttcattatcctcataatacccctcacatttgaac

SEQ ID NO: 238906 - DNA, 7756 bp, Cannabis indica
agttggttgacatgatgacaacaattgaagcaaatttctaatggactccataaatacagttgtggaatttggattcttacaaaataaacataaaagaaaaatcaatagaatttgtgcactgaaaaaaaaaaaaaaaaagaaggaaaaatcagttttttttgtctcctaaaagaaaagaatatatagtaatttgtctattaaagagaaaattctgtggaatccacgctagtaagtggttttttatatatttttcagctaagttggaaagaaaatgctataaaacaggcggccggatccaaaagttgttggcatagaatataattttttattccaacattaaagactttagcactaatgataacagtatattaaaatgacatgtatgtatcatttatggcaggataaatataaagaacaataattaaatattattaagaataataacatgagatgagaagagattagagggtatgattccatgcaagttgtgaaaatgaataaagttctagtgtgatctgaagaaaaaagtatttgtacttcaactgtctcattcttacaaatatatacatatattataaatttatataaacattttagtttcttcatctccaatctacgtgggtccacactccattctcatcaatgctgactttttctaagataaagataaaataacagtaaaaagattaaacaattgggtgttttattggcctccaatttcaggtctcacaaaattccctccttcaaaatgtgatactcgttgttttttacctctgctcacagctcaacttgatttccacaccaacaaaatctagagtttatgtagagttttaaactcttttattcttattgggtattgtgtttaagtcttcccttttttctattgttttgtttttggctcttttcaaagctaactaccctcctacaaattttcatatccattcacaaatatttctgggatattttacacataaattattattattattattgtcttgtttataaaacccagtttgggaaactcgtgaaaattaatgtttagacgagttttggtgcttcaagaagaatgatgaggttggtgcctttgtttagtttggtttgcttgttcttatgtactgatgttgtcctttgccaaagacctcgttctgtgaatattggagcaattttctccttcaattcagtgattggcagagttgcaaggccggctatagaagctgctgtctcagatattaatgccgaccaaacattactcaatggtactacactcaacttgattacagaggacgctaactctagtgcctttctggggtccattgaaggtatgttttatcaaatatatattttttcttttctgggtattttcaagtttcactttttttttattctttccctattgagttcagttaaccatgtatttgatattatataaggttttaatcttgaattggagatgttaaaagttgtatctttaagtgtacatttgctttgggcagcatttcaggtacttgaacaagaggttttggctataattggtccacaatcttcagaaatagctcatatactttctcaaattgccaatggtctccaagtgcctcttgtgtcttatggtgccactgatcctactctatctgctctccaatttccttacttcttccgaaccactcatagtgatgccttacaaatggctgccatggctagtcttatagagttttatggatggaaacaagtcattactgtatatgtggataatgagtatggtaggaatggtatttcagcattagaggatgagcttgagaagaaagacttgagaattgcttataaattgcctctttcaatcaactttaattcgagccatgtaaccgaaatgctcaatgcttctaagttatttggtactcgtgtctatgttgttcatgttgatgttgaccaatctttgaaaatcttcaaagttgccaagagacttcaaatgatgaatagcaattatgtgtggtttgcaacagattggctatcttctacaatagattctttctctccaagggctcgaaaatcgctggattctgtgcaaggtgtagtttgtcttcgccagcacactttagaatccaagaaaaagcaagagtttttgtctagatggaaagatttaaagcaaacaggtttatcaagctctgaattgaatgtctatggcctttatgcttatgataccgtttggacagttgcatatgctgttgatagattcttgaatgagaatggaaatttgtcattttctctcagtgataagttactaagtattaaatcatctgatcttcagctgagcaagcttagagtatttgatggtggctctactcttcgtttgaaattactggagacaaatttcaccggtttaactggtcatgttagctttgattcggccagccggagtatcattagtagcggttatgaagtcattaacattgataatatgaagattaacagacttggtttttggtctgaaggcatagggctttcaatttctccaccagaaactctgaaagcaaagcagaatgaatcttccattttggatcaaaatcttgacaatgctacttggcctggtggaggcacagaaaaaccacgtggttgggtgattgcggttcatgagaaacctttgagaattgtagtcccaaacagaacaagttttaaggattttgttacagtaaaccatcctcatgatattcggggatactgtattgatgtgttccttgaagcgcgaaaattaatcccttatgatgttccttataaatttgtgcctttcggagatggtcattccaatcccaaatatgatcagcttacaaaactggttgcagatgatgtaagtagaacttattcactcagtgtaaatgatatcttaaattgtactttttatcatattttcttggtagagtggttaaatttgtgctgtttagtgaagataaaaagtttgatatgcagagctattttgctgatataattaagcttggtgacaggtatttgatgctgctgttggggacattgtaattgccaggaaccggacagcaatggtggatttttctcagccttacgctagtactggtcttgtgatagtggcacctataagtcgtccgcagtcaaatgcttgggtgtttctcaagccattttccttggagttgtggtgtgtcacaatagcttcttttctgatgattgcaattgttatttggactcttgaacatcgagtcaacgatgattttcgcggtcctcctgttaggcaacttgcaacaatgcttctgtaagttttcttcttcttttttaatctaaatttcttgatgtacatattagagactagtctaaagctcaattcaactgtttcattattgcaggtttagcttctcaacattgttcaagagaaatcgtaaggatttcttcaacttctgcaatctaaatattagatatgtacttggtagtttgttgaacaatatcaactccttaaactcaacaattttcatatggttctgatcatattacagaagaagatactgtgagcccacttgcgcggatggtgatggtggtgtggcttttcctcttgatggtgatcacatcaagctacacagctagcttaacttcaatcctcacaatacaacagcttccttcttcgatcaccggaatggatagcttgatggcatccaattcgcctattggttatcaagtaggctcatttgtgtataactatcttactgagattcttttcataccaagcaaaagacttgttcacctaaggactccagaagagtacgaaagggcactgaggctgggcccaaatgctggaggtgtggcagccatcatagatgagcttccttatgttgaattgttcctatcagaccaaactgatttcgggatcattggacagccattcactaggggtggatggggatttgtaagtatctatctatctatctatctatctcataacagtttgttttgtagtgatcttgttattgtgtcattttcttacttttaatttaccataccaggcttttcaaagagattctcctctggctgtggacatgtcaacagcaatcttgaaactttctgagactggaaaacttcaggagatccacaagctctggttttgtaagataggatgtcctggtgacaatgaactagacaatgagcctaaccaacttcatttgatcagcttttggggtctgtatctactctgtggagccttttctcttgctgcccttgtaatatttcttatcagaatgattcaccaattcgtccggtacaaacgccgagagaatcagaatgctccctctctttcaaattcaccaccaaggccatcatcatcaggtcaatgttctggtgtcatctctagctttgttgactttgttgatgagagggaagaagctatcaagaacatgttttctcactctaatagacctcatcaagaaacaatttcagagaaaacttgatcaataaatatgtaaataacactatgtagtagtactgagaatttttttcttttctttatacatggtgatttgtttgtaaaacaaggaagaaaaaacaggcaaatcgttttttatataatgtaataatagtagtgacctgtcacacttttccctgtatgtactttatatatgatgacatgatcatgtcatatacacatatataggcataaaaatattcataaatatttggttaaaatggcatgtttggtatttctaggtgtgttatgcattccactagatagtgtttcgctttgtatcaattgaaactcgcgtaaagttcttcatgattgtgggatccaattcaattttttttttctaaaagtaaatactttcatttgtaatctttagcaccaaaaacacaaaaagcgaaaaaacatacttaaatgtgtaaagttatataatagaaaagtcatatatatatatatatatatattatgaaagtatgctagtcaaaattgagattaataagaattgccatcctgtgaagtgattgaggaactttatagactttgtgccaagttctagtggagaggtgataatgataacaaaaaatctattggtgcacttgggagagattttgttagcataagtctaatggcggtatgggattttgggacgtttttgtgtttaataaagttttattggtcaaacaagcttggaggttatattctattccgaagtctcttgctactaaaattagaaagaaatctatttcccggatcgaaattttctaaatgcagaagacttccacatactcttctctttggaagagtattctttggggtaggaaactttttgtgaaaggcggtaggtggcttattggtgagggtactaccgtaaataaaagcgttttcttattcatttcatccctaaccttttgtctatatggtgagtgatctcaaattctctaatagggattagagagcttattgatgaattatttttcgtgaataaaactcgctagattttatcgttaactcgatctcaacaatagcttgattagttgatttggcactataacttttgaggtgggtacactatgaagagtggctactggaatgctaatagactcttgggaagagaagaatatgacaaaaagataaaaattgtcaggacaaaaagacaaaaattaaataaattagaaaaaggcaaaaattgtcaggacaaaagacacatcccttgtcttacgggagacgagggaggcgccacctacaggtgtcccactagttttgtctttttaggttaattaattaatttattaattctaaagataaatatttatttaaatttgaatttaaaaagtaattatagatattttcttatagttgatatattctcttgaaagattaccacaagtagagagattctatcattcagttgtaggaaataaatatttataacataatcggttttattaattatttaaatatttaaatatgatttaattaataaatttgaaattaaaataatttttttattgatttttatttatatatatatcgtataaatcaaatttaggatataacaaaatttacgagcaaagaaatgcacgactttattagcaatacgtttaacaaaatttaaagagacattaggtaaatcatcaaacaattgcttacaatccgaaacaagaaagccgaagtaagaagggaggcacagagaactatgtattgcttgaactgcgacaagacagtctctacagtcaccgaatgccaatcttgagacttgagctagccaactcaaaacctcttaatcgtattggttactggtttagtccaatgctcatcctccatcccttgaccagtatggttaagtagaggctccattcttctttgttgagtgcacttccattaattaagattcgaacgtgctgaaagaacaaccgcattagctgtcgaagttttttggttccacaacaaatcatttcgggcattccaaattgcccaggtgatcattaacacttcctctacattggaagtagagttcacatcaaacagatgccaaaaccagtccacgaaacacatctcaaagacattattaagatgcacaccagacttaatccaacatgaattgaattggcaatagaacaacgcactaacacatgatgaattgtttctgcatcagcattgcagagtgggcagagtaaattcacaactatatgtttcgaatgtagctgagttttataccatattagttttaactcgtttacaagttgtaaaaaaaattatatatatagtataattttaattgtttacatatatattaccttaaaaaaaatgtttacatacatttatattaatttggatccttaataattttgatttttcatgtaattttacatcctgaaaaatgggtttaatttttcgacatcaagataattctaattttattttctttgtttatatgatggcatacattatacttgaaattgagcataatttataataaagacaataagtttaaacaatctatttcactttcacatgtgtgtttgaaaaataaaatatgcctataacaaattatttaaactatatttttagtattataaattattttatatttttgaaaaatttgcataattaggttctaaatatttatgttacaagctattcaaatacaaaaaatattaagaaagtgggagttcatccttgacttgagtttcaatactacaaattaaccccatcaaccaaatttttatgaagtagtgtgaaaagaaaattaaagtgaaaaagatagtatgtatactatgggttaacgttgggacagcatgatatgatacccaccaaaggccttatcatcaccaggaggcatccccacacaacttacacaaattcgatagatagaaaggaagaagaatagaagatgcccaaaccaacacaataccaattaacccacttaacaagaggacctacctagtgttgtgcttgtgcccaccacattataattacaccatacttttttactttgttgcacttgttgtttttatatatgctgtattgtttcatcattaaacttctatatattcactgaagtgaccaatgacaaggactatatattatttaaattgtggtatgcattttacataatatatagctacaaaatactgaaaaacacaatgcattcaacgaaattgaatgaactatacctcttttaggtcaagaacatgtgctctcaattttgtcactatgtagaagattctttctctttttctcacttctatagttagatactttttgataatggaaattgttaaaaataatcct

SEQ ID NO: 238907 - DNA, 2590 bp, Cannabis indica
ccttcattggaaatctgaatacacgtgtcctttaaagaggagtctggtctcgagtttctaggtgagagaaatctcactataatagaaatcaacatagcacaatattcttcaatccttggaacccaaaaatacaagataattttccaaatttttaacatgaaacccaaaccaaaaaccttccaaaacaacataatgcatcaaacatatatacaatagcataaccatgctataatcaccacacttctcctaatcttcacaaccatgcaaccccaatcttaagaatacatcaaacaccattaacaagctcaaaatctagaaatttaaagcaagtaaaagagatcaaaatagttacctaaggttcttcaagctccaagcaagggagcacacaaaattccataccaaaactcaagcttttcttctaaaattgggtttgaaatcacaagatagaaagataaagagagttggacaagttgggggtttcaaaaacctagaaattgtttttcctctttcgctgaaattattttttgttggaaaatagaaattttaggccaaaagactattttgcccctaaaacacacacataagcataaacacataaaagggaaaatttgtcattccactcacacacatatatatcacatgatttatattttatcattaacacatataagctataactaaatttcgaaaatatattttggaccctgaaccaagttcggtcaaaaatacccaattgtgactataccgtgttgacttgtcagaaattacctgcagaaagatagaataaacatactatataataatatagtctataaactaatataccgtaaaattatgtttttttacccttcttaggtaaaaattatgaaaatacccctgacacaccaatggggttttaaaatacaataaatcacaataattctacatattaaatcatataataatataatttctcattaagacttaattaacttagttagggttactaatccagtgactaaactttagcgtattacaattatcccctccttatagaaattttatcccaaaatttatctgaacaactccagatatttctgttgcatacctgtctctagttcccagcttgcctctatgactttactgttcctccataaaactttgatcagtgcaattgtcttgtttctcaagagtttctctcttttgtctagtatttacactaattgctcctcgtataaaaggtctggttgaagttcgaatgtttcataactcagattacgcaacaagtctgaccatatttccaaagcataaaaacatggaacacatcatgtacagcttccagcgctgggggcatagccaacctatacgctacttgccctatcctctccaagatttcaaaaggtccaatgaatctcgggctatgtttttctctcttaccaaagcgtttaatacccttcatatgagatattcaaagaaataccatatctctaacttgaaaattaatatcttatcggtttggatcgacaaagctttatagtctactctgagtagcaagcatttacgctctaatcttgtcagttgcctcactttgagccaccaagggagaagacagaagatggtgacaatcaaccaaggataagaaagagaagaaggggtgacgagcccctgaggagaggagctaagaagaggtggcaagccaccatggaaatgagagaaggagggtggcgagccaccaaggagaggaaaagagaaaaggtggcaagccaccaaggagaggagaaaaaaaaagagttggcgagccaccaatgagaggagagaagagggggtggcgagccaccaaggagaggtgaagagaagaggtggtgagccaccaacgatatgagaagtgaagaggtggcaagccaccaaggacaggtgagtggttgtgaggtgagatgaatcatggagagctttaggagctctttaggaaattcttagcctacttgggtgagccccatgccttttttgggggagggagtccctgactccttgggcgagctcaagacctcataggtgagccttgatttctcttgcaccctcctttagtaatttagccataacttgctcaatataactcgaacttaagtgacacagatcttttggaaagctaagaaagatatctacaactttcatgcttagctctaaatccagttcttatttcatggttcctaaagctatcaactattcacgcttcataacccaagctaccaatcgtttcctgtctctatcaataagtgtcaaaggcactttaaatgacttagataatgtgatcagcctccaaatatcattgtcaagggaggacctcttattttttactacttcattcgtcataacttcgagattacactttgtgaaatcttggggttaacatattttaatttgtaatttgtctaagaacaaatttgtaatttattttcttttaatttcgtttgttttataaggcttcaatttaatccaacaaaaataaaattatatctaaataaaatatttcaaatataaatgtatattacattaattttatgaaaatattatttaaatttaattaattttatatttttatactaataaatat

SEQ ID NO: 238908 - DNA, 1515 bp, Cannabis indica
cttcttttttactttctttaaaaaacataaatacaaccattagcggacccacattgtagtgagagggggcagtcgcccctcctgaaaaaaaatcgggaaaaaaatatatatgtattttagttagttacaataataaaatatgatattcatagacataatactaggcttatgtaatggttaatgtagtttacatatatgataaaggtacaaattccttacaacacattattttatctttttaataagtttatttttgcccctaatttaaaaaaaatacgccacttactttaaattatgggttcgccaatgaatacaactatgtataaaagttgtataatgaattacacattatccataaaaaaaaataaatacttatgtatgtcaaatttatattgtataattctatatgtacatatcactacagcaaaaaatatacaaacacattatcatctaggatataaaaaatataacttttatgaagacaaaaaagataaaaatattgacagacaaaaatgaaaaaatatatattatgggagataaaattgaaaatactaaaacatttctatttattttagtttttttaaaaaagtttccattaatatctaatattacacattaattctgtatacctactttgacaatattacttcatattatttaatcttttttagactcactttgtacatgctatataatacataattaatttatcatcactaatttgagaattaacagttaatcatattatcaaatttcaccatccagacaagattggattatttatctcaattaatccttatccgatttaaaaataaataaaacagtacaacattttttgtttttaacacataaaatttcaaacataaaaaaaaaaaaattataacatctttttaaaaataaaaataaaaaaaaatacacaacaaaaaatatacttaattttataatatatttatcaaaacacaataaaatattgctaaattttaaaattaaaacaagaaaatattattttggagtaatctatcaagtgatcacgtgtctcccatggccaacacaacatatttaggtacatatgtaataatgtaaatgtactgaaaatattattatttgatgcaatattctattttatagggttcacttgtggaaatatatataatatatagtcacaatattaataaatatttggtacgtatgtgtacgtttttcgaacaaggatattgaattattattattattattattattaataaataatatatgatagtaataaatgttataacataaaatatatgatacacataaattcaataaatatatatagatagtagaaaattattttggtactgatataaacaaaaatggggcttggttgtttgatgatgaaagaataccaacatcaacataattaccatgcatagctctctctcatataaatatatatatatatatacaggggcggacccacattgtagcgaggggaggcagtcgccccccctgaaaaaaaaaatcgagaaaaaa

SEQ ID NO: 238909 - DNA, 1762 bp, Cannabis indica
gtagcgtgccttagcattagggcgttacatcaaaggtctttgtttttcgtctaagttcatcaattggatcctagtttgcatttgtgatactttatattctctaatgctagtagtattcatggttcttaccaaggaaaaaaaggtcttagataaggggaccctatttcccccattctctttgtcattgtgatggagtactttactcggttgctcattcttgcgccgaaaataaagggcattggtttccacccaatgtttaagtctatgaatcttgttaatctctgttttgtcgatgatttggtaattttttgcaagggcaacactacttttcttagaatcattcatatggctattattgagttttgcaaagctactggtctctctaccaactttaccaaatcctccactttattttggcattgtactttactgaggagacaaaacggtagatgctagacatgttagtatgaaagagggcttgtgatcgtggaaagcttctgatgtgggggcattgttgataagattcataaaagcttcatggttgggaaagccggcatctctcgtttgcgaggagagctcaactcattcattcggtcttgttggatatccataactattggatgagtatattcatcttgccccatgaaggtaactagagatattgaccagctttgtagaaattttctttgggggagcacgagtaagagaagaagcaaacttcattttacgtcttgggaaattgtttgtttaccaaaagagtataggggcattggttttagagaaggcaagaaatggaatgtggcacttatggctaagtgtatttgggctctagctaacaagcaggatggtctttggattaaatgagttacgtccatttatatgaaaaagaaagattaatttctatgtttgttgtccaaaggatgctagttggtatttccaaaagctttttaatctttgagataagattaataggcaaacgttgtttgaggtaggaaagaggggggaatttaatgccaagaagttttataactctttctactcgagctcgaaagtttcttatcacaaagatgtttggcataggcttaaggttcctaaacactattttattttgtggcagatgttcaatgagaagttgcttactcatgatcttttagcaactattattcaagtggactcgcttgcttatctggtttgtgtgctggcctaagacttcactttcacctattttttgattatgttttctcaaaaaaagtgatccttgatatcaattgttggctaggtcagtttgatggccttcaaatttaggagcttggctgaataggctgaatgaaccgtgggttggcttaattgacagcattttttcaacggtagtggctgctactgtctactacatttggtgcaataggataattgtgtgtttaatgatacttgtgattcagctaggatcattagtgttatggttaaaaattgtcttaaggttagagtgaattgtgtaatgtgactaagcttaatgctaaagaaagggatgtaatccttaagatcaacaatctttgaggttgtgtgggttcttccatgttttgtattttgtttgatggttgtttgaataatcttatcttttctttattcaaaaaagaatgtaaaacttaaattatattaatttatttatagagtttaataaaattttattttttaataattttaattatttgttatatgattgtctgtaaaatattattgaaaaattacataaatataattgaaa

SEQ ID NO: 238910 - DNA, 1294 bp, Cannabis indica
atattaacagcaataataataaagttttaaaattcaaggaaagtactatttaattttttgaatgaaaacactatccttttttttttttttgaaaaaagtctgttattataaatcaaacacaatcatttacaacaacagagaagatggtataataggtatctcttctaaccaaatacaatcactatccaactgtaaagcttgtttagccaaacaacttagttatatagcatcccgtttaatataagataaacaagcatgagagagagaggataaatgatatgatacatcttgaaccagatcatagaaaaaccgaatatggtgatgtacgccctttcaatgcattaacaagcaacaagcaatcagtttccacatagtcaataggaagattcaattgttcagcccaacaaagaccaaaaaacattacctttgcttccatttcctgtgatttaaagttcctaacagttgattttgacatcgcagccaaaacacgtccattggaatcacgaataatcacaccaatcgccaacgttctcctcaaagaatcaaattaaacggaaaaatataatattaatctttgtttataattaaaaattaatgtagatgacttttataatcttctatcgctatagcgaagataaaagttaaatattattactttatatttgatctactaaattttgaaatatatttgtatatttgtatatcttttatattaaaatattaaatttatatataatttttttaaaaaaatatatgcataaatatatgtgaattggatcgatcagatacttttatatgtcaattaatataatctgcacatgcaaattttagattttacaattcaatctaatccgcacgagtatggaaatcctcactatgcggattggattgaattgagtatcatgttatcatccctaattatgcaaattttatattaattatttttattttatttttaaaaaataaattcattttaaggggtaaagggatcatgttctaaggtcacacgaaaatagagtggcacaaatctcataaaaatagtacaaaaaaattacttttagtgataatattttagttacaacataaattttttgtgactaaatattatttgtcacaataaaatgttacttgttactaaaatatagtatatttagatacaagatgtcactaatttagttttagtcacaacaagtactgtgattaaaattacatttagtcacaataaattataattttgtaactaatacattattagatgcagactttttagctataaaaataatgatttataatt

SEQ ID NO: 238911 - DNA, 745 bp, Cannabis indica
aaatattcaagccctcactgaacagaatttctggctccgtcactgcacacattgtagtgtagtgagttttgtgatcgtccttgtctcatcacaatatctcacgagttaagaatatattatgattacataatagtactcatctaatagaatctaatagcccagttagtaaaaaataccacatactaaaatttccaacttttttacttttatattgtggggcgaattttttttcttcaaaaatactgtgtaagttttatactgtgtgtattgtgttaaggtttcattgttattctacgattattttttaattattccactgttgttttttagttgttctgttttgtgttccactattattttataaaaacacagtatttttgaaaagatttctgtgtgacagtgtttttgaaaaagttaactaaaattctagtatttttgttaacataaaataatttaaaccggttataattgaaatataacaggttctataatataatgaataaaaacaaataatacaaataactcaaacacgttataattaaaatagaacaagttctataacaatattataatgaataaaaataaataacacgaaacaacctcaaacataactaaaatagaaagggtttatataacataatgaatgagtatttttagagtagatatagtataagtgtaattatttggtgggttgaagcatgttgaatggatgtttttgtttgagttattttatttaactgatttt

SEQ ID NO: 238912 - DNA, 434 bp, Cannabis indica
ggtctcagtccggggtgggagtttaggtcttgagctagggtccggggtcaaggttcagggcacaagtccgagtctgtggtcagggctaggtctaggtttggggttttggtttgggttcgaggtccggtgctggagtcggggctgaatcccatgtctaaaatattaacgaaagaaaatacaaacagattataattaaaaaaaatgtgtttaaatgcctaatttttaaaaagtgacattgttttgttttgaaaatatttccactttttaaattagaaacacaaaaatctgattaaaaagtattacagaatgcatccttcatgtctcttattttaatttaatttttttaaggaaaagatgatttttttttcttaataaatagcatctaagagcacttacatgagatgatgtataagtgccttttcttcatttaaaag

SEQ ID NO: 238913 - DNA, 749 bp, Cannabis indica
gttagacctcgtacttacatgaacattatatctcgaaacgattcgtgcacttgcgagtataaatattaaaacactcacttttgggtacaatagcttcacaaaacctcgtatggacaagttttgttatttttctcccacaagtaaaaatggatcctaggtttagacaaagttatgttatttaggcccactgatggaccttaagtttctattttgaatccacatgcccattgccagaaacatagataacaattttgaatcttcttcttccaaattagatacagttccattttgtttcagagaaatgtgctccatgagctttgtgaattcttcaactttttctactgtacgcttagtttttgcatcttgggattctcgttcgcaatgcgatcattgatgtggtttctgaaattctctccacgaggtcttacctttttgcttatgactttatccattttagcatttattcatgcacggaggtcatttgtggaaaggcttccacttcaatcgtcagaaagcggatgaattttgtccacattgtcactccggttgaaagaattgttgggatgatcttttccttttcaagtggtcgtcttttgtgtccgagtactaggtttatctttctacgctgctttgcctttacgatccgtctgacagccttggtgtaacaccctaactattataatgtgacagtcagtagtctcgtgatccgtaacgggaaataccgggtaagctgtgcaatcccacaccgc

SEQ ID NO: 238914 - DNA, 1653 bp, Cannabis indica
aaaaaaaaaaaaaaaaaattgcagggtggaagctcacaacagctctacaaatcagtgcattcacaggcaagaagataaaactacaaaatactaataagtttgaacttatgcctctagagtcctaacattttgttattattggtgtcagatttttacattgcccaaggaaacattagtttatccagctcatgactacaaaggatttactgtaagtaaatgcttaaccttttgttaacattcttctagattatattactactaattactaagctactaatttcaggttagcactgtgggagaggaaagtctatacaatcctcgcttaacaaagaatgaggtaactttaatttcactcttcttacaaaagctccacgtttacaagagaacacatcttttcatgaaaaaaaaaaaaatctcaactgcaaacttatattcttttgcaggaaacgttcaagggcattatgaaaagtaagtacatgctaaatctatataacaagcttacaattgacaggaaataagtaacttggattattaaactgctagctgataacaagctcaatcttaatttgcatcagatcttaatttggcatatccaaagatgatcgacgtagctgtccccgcaaacatggtttgtggtttgcaagacaccgacatcaattagccaattattttgaattgcatttgcattgtgaaatcaaagcatgtttttctttattgtacctaacaatttataaacttgtgaataaaagtgacaaaagcatgtaaaataaaagcaagaaagaatgagagaatgatcaatgtgtccacttgattgatttggtgaatgaagtttgtttaataatggggggccaggcaggcccactgagtgaagaagaagattagatgactaggctgttggttgcggattaataatgatttgacagatttgtgttatatgtaattagattccaatgcaactaataactatatccaatatttggtaataagctcaaaccttatcgcttcaattcatcattcaagtacgaaagaatacaatagagcttaatatagtcggggtggaggagccatggtcaacaaggattgggaatccgaatatgctgctattgctatatataaaatataaaaatataaaaatataaaaatatagctgtatgttgtttacacaattgtatgtataggcacatgtatgtgttgtacgcataaatcactcttaaatgaagaacaaaacattttaaagaaagaaaagaagatattttgaaaaaactggaaaatattgaaaaacacaagaatgtattgtgaagaaaagtaaaatccaatctcatagtctaacaaaactaagtcatttgaactaacaattgtagttgaatataaatgtaacataccatttggactaacaaaactaagtcattctcaaaataaaaaagctcagttgacactattccagactctcactaactaaaatattaaccctccaaatatgatactacactaatggattgatttcttttggtaaagagtatttatttttcccctatttagatcagtcatactatataacgaagaactgagaaaaattaaatgcgaataaatatgttttttcgttagtaaaatttgctgaacatgtacctaaaaatttatatgattaagtagtaa

SEQ ID NO: 238915 - DNA, 1056 bp, Cannabis indica
aaaattaataaatttataaaaaatttatcatagtttcaaaattattgtcattactatcttgtaatcgttactacattcaaacttgttatcattctaaaataaagatatcccaaacatttagtgaaaaggagattataaattgaaaaaatttcatacaaaaagaagacattttagctttttgttttcttttcatcaaaaaatagaatataaagagagaaaatagataaaaaaattaaaatttagagggatatgtatatactagtaaaaagttacgtgcgagacacgtatattaaattttatgctaggtattttctactttatttaaaagtaatacaattaataattgaagaaaaaatattattagttattgttaggtgccatttatggtagtgtgagtggaatcatttcgcagtctttttgtttgttgttgacttgacgttgccgtattctcgacaatatatgtgtgaagatcaatatgactgggattactacttacactaatcggattgatcttaaatgcttttgtttagcatatctctctctttgttttttacatattgctttctttttttcgattggtaaatctttatatggaatccgctttgaaggttctctgtcacgatcttgtaaaattaaattatgaacattaatttcatatgtattagtttctcttaaacaaaacacatttttaagttttaggtattttgtgtatgacatcttaccatgtgtcattatgctaatgcagaaaatgtatgtttcaattgtaagaatccaatctacacaagtaaaaaaagatggtgtaataaagtaattgcagacattaaatttaaataataataattcagaaaatccatacttacatgaaacggttagatcaaaaaagaaaaactctatatgattaaatatagtatagagttttatttttgacaatattcattatatttgaatataacatttggacaatattcattattcacaatgaattgttacaactactttcttttttatatttttttttaatttacaatcaataaatgtcattactgtttttgaaat

SEQ ID NO: 238916 - DNA, 1121 bp, Cannabis indica
tagctttttcctgacctttcttagctctgttgcggctgaagtctgtgaagagctttttactcctagtccgcctcatgccgaactagctttgaatggggttgaagtgtttatgaatgcaagtggtagccaccatcaattgagaaagcttgatgttcgtcttcgcgcttttataggtgctactcacactcgtggaggagtttacatgtacagcaatcaccaaggatgtgatgggggtcgcctctactatggtatgtcgatttattttgattgaaccaactcttgtctcttatttctatcaatgtcttaatgaatgtccacactcacattgcagatttttagatcttttgaataacttgtttgtggttttactctttttgtggttagatggatgtgcttctgttgttgtaaatggagatttggttgctcaagggtcacagttttctttgagagatgttgaggttgttgttgcccagatagatctagatgcggtatgtacactttaaactccttttgggtttgatttcagtttagtctccatttccaaatggacaataatgttgatctggtattaataattttgacgatgatagttgagtaaaattaaacaatgtgttggcacaatgtcaatactattccatttctgttaactaaccattatcaaaatttatttaatgtcataaacttgtgtattctttatgcatagcattaattttcttataagctgtatgcataaacttttgttatcttgcgtattttgaaaaaaaaggggaggagggaccactcactaagattggcccccacccttgagataaataacaaccctcgcttatggcggaggaaaaccgtggttacaaagtgccctaaattctaaggcttaaacaaggtcacaaggatatgattacaacgagcatattctcttattaattctttatagcagtgctctccattctctcattaaatctgagaaagaaacattttcaaagagcttagtcttgtacacccaaagagcagtccaaaatttaattttatcccatagggcctctgacaatatcttgcgtattattatgacaatatatttagttttcccatctgacatgtgcataagactgttctctctctct

SEQ ID NO: 238917 - DNA, 2918 bp, Cannabis indica
tttgacactgttcacacttacaaatgcactttatgcaatcctcttcatcgtggctagaaggaaccttgacagaaaatctttttggacaaccttactttggaagtatggtctccacaataccctccgtgaacctcgtgcatagtatcacttattttggttctaaacagtaaagctttccatgtagtatcacgtatcagggagcctaatactagaccttctaggctatagccttgtcagccaaaagttctctcgaactcagatattggtagatggggcctatccaggaattggaatgatcaacgtgccatctagtatttggtgttcttgtcaccagcttgaagccaattagcacgagacctttgtttccaaaaaaacattttctttaattagatgtttatcaagagaaacttggagttggtttgcagcattcacatcattcgaagaaatgggggattgggagtaaatttttttaatgttctattgtaatgtctttatactattcttgattgtttttctccttccccctagagacctgttgttagtgcaattattctgtttacttaaaaaaatgtcaagaacaaaggtgagattgttctggttcctgtttatagcccaagtgttttgaaccaagttatagaaatcgagctcagtgagccaatggttctcaaaatgaaatcgtggggtacttttcgtgaaaggaggattaccatcacgaataagtttgatggccctatgatcagaaccataaaaaagaagatgctgaagagtagcatgggggaaaagggcatcccaagccttattggtgagaccccgatccaaatactcaaaaagggtgtcgtgtttccatgtgaatcagttactagtaaatggcaacagtgaaagattatacttagaaacaaagtggtaaaaattatggatagcatgagaagagggtaaacagttactattacgatcatgatagcccaggtagtcattaaaatccccaaacatgagccaatggttgaaggggacaacatcaaacaaacgatccaaaagggtccaagaagtatttttatcataaataaatggagaacatagcaacaaataaaagtgatagtttatattgccattaatggaaacatcacaataaatatgatgcaaagagtacgacaaaatatggacattcacggcatcattacaaaaaagaaacaaatcacccctataccatttcttggcaccttaaagacattatcaaaaaatttcctagctttagttaagaaactagagttagcagctaacttagtttccataacaaaaagatctgaggttgatgatgcttggttaggagtgagaagttatggaatgctcaggaactccctaatccacgaacattccaacttatgatactcatttttctgggcagggttgcaaagaaacacctgcctgttcctagttgtcatacatgtaagggaccgcgagaaagaaagaattcaaggctcgggcttgcttcagcatgctcctcacagaagagcccacttggtagttatgacaggtgtaggatctcttcttggtgatggtagtgcttgtgggagcttttggctgagttggttgggggtcaatagagagattcctgggaacttcagggaacatgagagctttacctttggatgaggaagtaacaacattggggactataatgggattggaaggtatgggatatgtaacttgagtgggaaaggggttgttaaggacagtattaggtgtagaagctggtgttgtgatgatattagaggcaagggtcacaagagcaaccgcagtagggacattagcaataggtgtattggtaatgctttggacgagaaattgatcaacgacctcctgaaggccttagctagacacatttcagagagtttgttgttcctcaagcgggatagaattcaaaagctcgaatatgctttttttgtagatcgatttgggtgggcctctaagagcatctttgtaggtcaatggagggggcaagagtgggtgtcacaatgacaaagaaagctctcacacttagtataagtgtgatggagtttgccacagttgtaacaataattttgaattccttcgtaaaaaactttagcaacttggttatggccagtttcttaaaacggacattcatacctctgtgaagaggtttagtggtatcgagaagaactctaacccgtatgaaaggaatgatgggatcatacagggaggagaggtgaacgtctatgaggttcccgatgttatcagccacaaactgggggaggacataggacctagacccaacgggaaaatagttgacttgaacctaaagtgggataaaatagaattggctaggtagaatggcatcgaaaccatcaggaatggcaaagatcattaaagaacgaccaaagtgctagagctgaccctccataacccttcaacagtcaccttcgcacacaaagtgaaccataaacattgcagagtgatattcagagaaggtcaaatagaaacaggccatctaagcccctttcatgacgttacaaatccaataatgttttaggcggtttggtggacaatattttgacaaccaggcagaaggaatctgtttgaggtttttggtgaatagaaacgtgatcaaagtcatggatcaacgcttcctcagtagtgaggtagatggagtggttggggtcatcagagagagtattcattgtggaagacatgcaacagtcagagaataacagaggacaatatgaccttaaatagaaaaaagtgtagagggattgcataaaggcggagtatgaagaagctggagagatgctagatcagtcatagccatcactagctcgtgtctacttctgtagaaaatcgtgatgatggtttcaatccacctgaaaatggcgacggagagtaaatgctggatttgatcccat

SEQ ID NO: 238918 - DNA, 1371 bp, Cannabis indica
ctcccggaccaatagggatgaccaccacggatcctcacggagacaccccgttaatctgggaggggtttgatggatacttaaggcagagggctatctatggccagttaacatcttcgagacgcggaaggatcgtatttgtcctggagcttcgagaagtcctagaatggtaggttggttgtttaacttctgggtaaggactactctggactgatcacggacgacaactcctacacggatgtggatggccacgtcagcctcatatggaaatcgacctacagacggttatacctttttctgacacaagattagatcttgtcccccgtgccaggccatggtagtgcgcgtacgtatctcaggacatgccttttgccaaatgacttgtctagagagtaatttgtaaaggagaaacctttgagcaacacatatctctaatatagacctttgggagttcaaaaaacactttgtaattgctcaaaacattgtctaaaaatgctggattagtctcggtggtggctaaattacatttttccagctgctcggtgggttctttgtggcacattctcaacattgttttcaaattcactagactctttcccacacaagaatccccttttatggttacgagttgtacccccactttgaaattcaaaatctgatgattccaatcaatgtgagtgttgcccaagattgccagccattgcatacccaagatcacatctgtgcttcctaattcaaaaggtaaaaaatcatcaatgatggtcagcccttgtagttctagcaccacactcttaatcgattttcccgatcccaaagtcactttatactcccctgttttagttaacgacaactttttcttttttactaattctttggaaatgaagttgtgggtagccccagagtcgataagtaccgtaactttatgattccttatcgctcctttaattttcgtagtgcgtggggctgctattctcgttgctgaatttagcgagacttccattatctttgtaatctcagctttatcaagggccaattcatccttctccggtcccgagtctttgtcctcatcacaagtgattaccatactcaattccttcctagcacatcgaccccggagcccttttggtatcacagcgataacaaatgcctttttgtcatttttcttgcacctcagaattagttaatggctgaaattagccaatgggtttctgatctttattagaaaggttagttctcctcctatccccattgttgcctggccctttgaaattgttccaattcaaatgagaaccaaataaagaatggttcttgctctcgatcttagcagcaaaatccatggccttgttcaaacttcaaagtattgggttcaaataa

SEQ ID NO: 238919 - DNA, 1118 bp, Cannabis indica
aaataaaaaacatgaccttgaggactattgccgctatttttggaggttggggacttatctgtattaaactgaactttttggggacttttaccgcaaatttccctattacttttaataaatttatagagcacaattttttcatgtatagtatacttatttattctatacacattgtatttatttgacaaaaatacaacaaggtctaatgttccaaaataattttctattggtcatgtatcttagcaaaaaagactttatttgccttgcaggacagaatgtaagagtagggtcacaactcaagtgttagtgataagcctttagttatagttacaagttagttattattatgttattcagttagtttagttttctgtttggctttactgttctttaacaactctgtaactgttttgtttagtttcctttgctgtatataaacactgatatttgcatcagtgtattcattcaatgaaatcaagattctctttcttctctttcattctctctcttaaactcaacatggtatcagagcttccttcgttttaagggcgtacgctacttccgctgactctgttcttcgtcccactggttccaatcaattgcagagagcttcgtccatctcgttctatccaccctactttccatctttttctaatactcctcgtgctcctagaggaggctatcgtgctggttacacaggttttgccaggggtacttctaatcctaaaacatagtgtcaactgctactgcaaaaattcatgcttcaattgccacccctgacactgtgaatgatcagtcctggtatcctgattcgggtgccacgaaccacttgaccccagatctgcacattctgatggctcctcaagagtttctaggagtagatcaaattcatatgggaaatggctcaagtttgcatatctatcatactcgttataacacctttaattctcctttcacttcccaacccttggttttacaaaatcttcttcatgttcctgatatcacaaaaaatctcatgagtgtctctcaatttgcaaaagataatgctctgtattttgagtttcacccctatttttgttttgtgaaagatcaggctactatgaagactttattggttg

SEQ ID NO: 238920 - DNA, 1366 bp, Cannabis indica
gggttaagtgtataaaagttaaaacataaaaaggttttaccaaaaaaaaaaaagagttatgtgtataaaaattaagagataagagagttttgcggtaaattgctcaaagaaaaatgtttggaattagtgccctagcaattttctttaattattgatgaaaactattgattccaggtgcaaaaattcatggttgtaaatcataggtcttatcatcaaactattcatcataaaaatccaactcacagttgctgtagcttgtgtttctttctctttcttgtgtcttctttgtctatttataagctaagaaaaatgaatgctattcttaagactattaggaaagctataattttaaagcatcgaaaccttacctcaccaaccaaaagtacagttgtgggctgtcctaccgttatttttcagttgcattttaatgaatatttatctattattatctattatagcaactcaaaagaaaaagaaaataaccattatagtatttcccattttttaaatattttttatggctaactgattttgattctgctgtcaatttttcctataagaaaaattattataggaattggacatgaaaactataagaaattattatacacattgaaatgagacaaatgttttcagcagctgttgagattttatttgaaattggctgccactcactaaataggtgcttatataaccctgaaaaagaaaagaataagtgcttacagtattaaaactattggctaatgatgaaaagatgaattttatgtactataaatgtggcaccaaagcataattattcttgtattaaataacatttgagagcatatatagttttgtgggtcttaattcttatcattgtggcttattttgtggagtggggattgggctagctaggtacgatccaaacattttttaaagaaaaatatatacatatatttttttttaaaaataatagcttaacaatgttttcaatcccttactagttacttttaggaccctctataagtaaatataatttagggtgtttattagaccacattcaatgtttttatgtctatccagattcgatccaattatatattagatgttagattttaccatttgatatgattcaattaatttcagtcattcgatcgatctaacatctaatagatcggttctatccgttggatgtattatatatatatttattggtttaatttagatttatccaatattttaaacctattattttttagatcggatcaggtccatccaatattgtaagtctagtatgtattggattagattggatctatctaataatgttaatttttatttttacatatgtattttacgtatagcaatgtaaaatctaattactcat

SEQ ID NO: 238921 - DNA, 1266 bp, Cannabis indica
tttttttattattattttaactaggatccctgcctaaccctacgacaaaatatgaattttcttttttaacacttcattaagcaaggaaatatgagattagtgtcagaatttcaattatttgcaaagtgaaatgagaaaattatacaatgtcctacaaatcttttagtaggtgggtgtaccacctcaatcagattttgaatgcagtacactgtgtactaaaacactttttaatcatccaacaggatgcctgtacagtcagccataatgttattcttcaacagcaaaatgaaatatcaactactgtatgtataaaatggcaatcatctgtcagtagaaattccatgtttcaaagcatggaaacatacctccaatgctccaataatggttatttggaaaataaaaattaagtactgtgaattttagccatcatatttcactgacttaaataagcaaaactaagaaattttggtgtcaagtctcagcttacattgacactgtaaaataatgaaagaattaaacgctgagcttcaatcaaattccccggtccagataaatttagaaagccttgtccatgaactcccaaatttgcgttagaacgtatcctggatgattcctacaaacaaaatccaaaattgtgagttcaggcataaaatctaccaaatatatgattgacagtagtacaaaagaaaaaagagtagaagatgatgatataccttaagaaccactaaattgcttgcctcaagcaaagatgttgccacgagtgtatcattaccaccatctataacgatttcagagttccacatcaagttcattttcacaatcatacgaagggccccgaatatctgaattaattatgaaaaaaaaaaagtaagagtaaaggtgccaatgccaacaatttaactgtttaagatttgggaaatgaaattaaaagaaaagggttgagagaaagaaacagaaatatataaagatacaagtgacaccacactaaaataaacaaaactacacataattatagaagatggcaccacagtacacaagagatcataattaacattataaacaagagcagaatagaaaaccacatagagagggagcaaccaaaataaaatacaagccacttgccttaacaacagagtcactcatcaaaaactcttctgccattaactcaaatgctgatgatgaataatgagcaagcccaaaactcaaagttgcaccgcaagtcaagcgaatttgtccttggacctatataatttataaattttttaa

SEQ ID NO: 238922 - DNA, 2581 bp, Cannabis indica
cataccccttaaacttttatccatgttaaattttttttactaaaattgaaaaaaatccttaaaacaataactcatcaaatctatacaataacattaaaaaaataatcttcaaatccatacaaaataagaaataaacaatattaattatcaaaaaataagtgcacaaatgtgccctcattaactttttgctaggggatgcattattgaagctcccaccgagatattattatgaatcttttcttttgacatatgatgtcatagtttgatatatttttcatataatagtttgattaatatgcagaaattttgattttatttgttttttttttcctttgtatctcagacatagaaaaataaaggaacaaatagtccatgaaaagtgtagtttttttttttttagtaagtgagataggcaatattgccatttcttaatgaaaaatgaggtgactttgggaccaagtagatgttggctatttgatgccattgtttattttatgttgggctgctggtacataattaagaatcaaattttgttgaagcaaagttagatattctaattcaaatcatctacttttattataccctatcattatttttaaacttatggtacacctttaaagatatacaaaagaaaagaaaagaattttaattttcccatcaaatcaagttattttctccttttcaataccccacatcccaagtatggaataatagattatcttttcttttgttgttgttgaattatattatatatacacaccataacaataaaacctttggttttggatttgagcaaaaaaccaaaaaaaaaaactctttgtatacttctctcctaaagcccaaaaaaaaatgcaaaagaagaagagcaaccttttccaaccccttgtgattttcttcaggctatttagtttcatcatggacagtctaattcccagaggtttgaagcgcgtggtcaccacgagccagtccatgcaccatcaagcctcaaccgtcgtcccaatggtctctagtaagcccaatatgaagagggttgagctccaaccacaagcccattacattaaccattcagatgacttcggctcttcttgggccgaagctactcggcccaaaattcagaaatcggcccaattatatcaacacagtgaggatgaggacgagagtaacaactacgagttgtttgtagatagtaagatcaattttgaagaggaagagagaaagagaataaggaaagggaagagtgtgacagtagagttagagaagcctgaagatgtgaaattaccaaattgtcctccaaggcagaggcagaggcaggtgaggcctctttttgatgttgctgtaaatattaatgagaaatctgatgcgtttattcgtagtaggaaggaagccatgagaaggaattttacatgagattaatcaacatatttggtatattggtaatttggtatggatgaaaaaatctatatactattgtatgtaatcttctacttccttcagtatttgacctctgctttgaattgagatgattctgtttgttatgtctcatctcatcaatatgtaagcgtttttttactgctgtaaaaattaacttaaaactaagaaaagaataaaacatttgagcccttctttcttctttcaaagaaaaaagaaaatgatgagactcccgcaatagatagattatagataatcattattcagataattgtaatctaaatttaaatatcgcccttcatgcaattttatttgagtcaaataaaatgttaatcttctattttagagtcaaattacatctcgaataatatgacttttgttttgctttattgctctctctctatctccatcacccatgattttgcctccgaaagcaatcaccaagaccaccatccattacaaccacatatttgttaagaatttaggtggcttttgttagaggtaatgaaatagaatggaaaagaaagaaaataattttcattctattttttttttgtttagttgcatattaaagttatgaatgtcgttctaataaaatagcctttacaccattttgatagaatgacaattccattttaaaatggaatgaaaaatcattccaaaaaatttaataattttttttatgcattttaaattttatttcattctatttctattttcattctcattcttatgttttcaatcctcccaaccaaacgtcactctaattcttgtttgtttcttattctcggagtaaatcccaatttcaagtcttcaccccgaaaccatccaaattttgggtttttggaggacaaaatatatggataattactatgtttacatcatatgaatatgttattttttttaacatttataatcatatttcaaaagatttattattatatgggagtgttttctttcatcttacattttctgcaaaatgtttacaatttacgtcgatgaatgcacacaatgacaaatctagatgaggtattatgaccttaataaatctcattggacctctaaaccttaataatattttgtattttttttacatgtacaaacttagaattcgatatactttagtggacctcgccatgttatcctcgataga

SEQ ID NO: 238923 - DNA, 565 bp, Cannabis indica
aaataaacacgagtgaattaatggagctctaaaacacatatagagtgcattgagattgagtgaaattctactagtttagtctagtctagtgtacactactaaatggaattttgaaaagaaagacaaataaggctgctgcatgcacaaacaaagcacaacgtggttcttgcaccaaaccctataaatggctagctatggttcaaccattcatccacacacacccacttattataatatagggtacttttattgtgtacctctaaaagagaaataaaggcaccagtagtatcaattaccctcctacgtatcaatatcacaattagtctaattaaatatcgagtcttatacagtttaatataatagcttttagagagtattactagccaatcgcaaggcgacacgtcttaaaggtgttaggcaccactggtactcaatagcaatcctctaaaattaggtgattctacagtgcacgtatactgatatactctcttcgtgtttttgacattcataatgttttaatctttgctatttttatggactacggactttgaaatattttaatttt

SEQ ID NO: 238924 - DNA, 574 bp, Cannabis indica
ataatgtatagattagagtggtcgatctcctccaatatattagtgggaattcatcaatgtgtttttttatatgaaaatggatgatgagatgggaagttctaacaatacaaattctgttatattatgtgtatttttcaattatttgttctaattaatttcgtattctcccttctaacttttccaaaggaagatactttaccttttttttggttgtaaatttagctatttaggtatcgaaatttacaaaaaatatgttttcttttttgtaagccaaaaaatatgacaatttattgcatttttttttgtaaggtttattacattatatattaatacacggagatttaatttttgacacaaaatataggattttgaccaaaataaacaaattataatattgtatttctatgccattatagtatcacagtttgtaatgactacatacttaaaatattaattagaaagtcaattagtacaaattatttgcattttgtgattatatatattgtaggtcctattttcaaaaaataagaattaggttataatttctcaatttcggagattttattaaactcta

SEQ ID NO: 238925 - DNA, 1638 bp, Cannabis indica
gagagagagagagagaggagttgttttattaacaacctttgacacaagtagggcagcaagttgacgttggtgctgatcgaattcctcatcttcatacaagctctctctgcaaaagaatacatcaaatgaataaacaacccaataatgtcatatgtgccagtgtgattcataaggctgttcaaacacgcaaaacaaaaaatgtcccaaactaaataaggtaacgagcttctaattacaagacacaatgagaagcaatcaacttcaattctgaagccaattcccaggtgagttaacaaataaactgataaggtttcaaataaaaaacgaagttccatagtgagcacataattctagtgaaattgtaaagaatcaacaaataggtaccaatggaggttaataaaaaagaccaaccggatctcaatgctttgtgtatcactttcttttacagcttcaaacaatatctataattagtattgtctcctaactacaatgtacagactaaaattcaagaaaaaaacgtgcccccttagtcataaacacgtccacaaaacaatcaagcccaaaattttaaacaaatgactctcaaatacaataattcaagaaacaaatcttaacaaaatttcaactaaaccaaactaagtttatagactcgacaactttcaatcataaacctaataaaccgcattgtaaaaaccgaaaaccctacaacaaatcccctctcagattaccctcattcccatacgaacaaaacaaaaacagatcataaacaacaagaaccctaaaaaacacatcgaagaaactaaaagcaaacaactttaaacatatataaagagagaaaagagagttacatgatgggaacgctggtagagatctcaggccagaaattatcgaccaaattgttgagattagatagggcgtggagcttgagtagaggatgactttcgttgagcatagccaaaaggccacccgccgagctcaccgtagtcgccataaccaccgaaggtgtaatcggatcgattggtgaggagctagggtttcgattgaaagctctctggtaatttctagggttggggtttttgcagagagcggaattcgaaaaatgagagtgaagagagagaagagaaagtaaaagagaaaatgactcaaaaaattggggatatacttgtttcttagtattgggtttcctttgctttccttacttacccaacaagttaaaaccaaaaccaaaaccaaaaaaaatatagatataatttgcggcttaaatacttaagtttaaatttcgattaattgtgatgttgcaattttttttaattgattttattttagtttgttttgtcaaatgatttggaaattaaatgggtgattatttggctcgtttttctaattgatcgtgttttcaataagtgtgatgtattgaatctattgattgaattgtaaattattattttagatgatttttattaataaaatttcataatttatttaaaaaaaataagttgctgataagtacataagtttaacttttttacaataaagttatatttctagaatttttgtaagtatcggatcgttaagtaagttatatttacgtgtattttttattagtatgtttaaataattttaataaattaatgatcg

SEQ ID NO: 238926 - DNA, 1552 bp, Cannabis indica
atactgtgagtagatctaagttcctggtaaaataaccttccaacaacctctacacatcctgatttgtataataacacagttagttctctatttcaggttgatgatcgaagatgggattctaatgttgttcatgacatgttctcagtttgggatgttgttatgattttagagataccattatgtgattctgcagaagctgactgctagtcttgggtagaggaacaatcgggactttttactattcgtagtgcttacttgctgctgcaacagaaaaaaccaaaaaaatccaagccccaacaactctagtttttggtaaaaattatggcacttgaagatcccacccaaagtcattaattttttatggcatgccatctctaaatgtcttcttacatgtcttaatctcatcaccaaacatgtgcaagttttatctatgtgtcctgtgtgtaatactcatgcttaaacaaccacacatgccttgctcacttatgattttgtagtcatgctggtttgtgtttggtacacctctaaacatggatatctcctcttcgttgaggctttgctgcatactgacctgatttatcgcattgccatgctttgttgggtggtgtggaaagcccgtaactaagctgtttgggataaattaacctctactataaatgatgttattgcttcattgtctgttacttttgattattggaagaaggcacaagacaattccactctattatcattgttgattgaaaataatggtgatgggtctgagttttggattaaactaggtttgaatcaaatcaagattaatattcatgctgctctttttcatcaagagagttcatatgattttggtttagtggcaatggatagctcagggaagttaatagaagccaagacgtgctttcaaggaggcatttatccagttgaggttgtagaagccttaggaattaaggaagctcttaagagtaagaactagcttaatgtaaaaattgaaactaatagtttgctttctgtccagaccattcgaaataatcaagccatgtcctccactttggctttacttattcagaaaatcgagtagctcatgctattgctagatattctcgatttctctctggtcgtagcatctttgagcataatggctgggttgatataaaagtctttttgtatttagaatgttaatatttcaataaagttgctatttcatataaaaaaaaaacttgttttcagttttagttgtttaaaaattatttttaaaaacattaactgaaaaccatttactttttaaaataacaaaaaaattgttttcccttctcacttttaaaatagttttttgaaaactaaaacctgaaaatacagtagttgtttttcagttaaaccctttcaactattattccacttggacttaaccctctaagcttaaattttgacagtaaaactctccaaattactgaactgcttgcaaatttaaggtgttatctattatttacagttagttgctaatatagactgcttatgtgtacacttttgtacatgtctcaaatttatattggtacac

SEQ ID NO: 238927 - DNA, 842 bp, Cannabis indica
atatatatatatatacgtagatacatatatgcaagcaataaaatatctatcatttatatttccaccaagcaaaaaaaatcatatatataacttaattttcaaatctgcaatcacattcacccccaccatattgctcaagggaccaatccatacacactaagctaattattagccgccttgaaaaataaaaagtgtggttatagagaaaccccaagttattgcttagatattctatatattctttaagcttacaccttagttgtccaatattatgagcttatatattataactattagacaataatatactattaacaataaaatatatcaatatgtaatgtaaaaaaattacaaatatatcaaaattgtatatgccataaaaggactgacatgtcattctttattatctattatttaatttaatagtgttatcacaaatttaattaagatagataataaattttcattttttttaaactaattgttaaattaaatctatcataaggttaatctaattttattaaatttaaaacttagcccacatgcaattttagatttaataaaattttcatcttcagtttatactttagtgactagtaaataacatatttttaaataattaaggagtagccataacatccttaattatataaaattatatatattaagtggaccaagatcacataatggacatgaattataattaattatgtggatataataatcttaccccacaggatttttattatatttatataattaatatattaaattaaattctctcaattttttttcacagggaattatatagatttaatttaatagttttatcataaagtata

SEQ ID NO: 238928 - DNA, 871 bp, Cannabis indica
ggaatagtgtggccttttgccatgaaagggaacaaaactacgtgatgatgatgatcgagatttgatgatgaaattttggtgttctgagaatcagaccccattttcagattgccttgttattttatcttcttctctcttttgaatgattcttgtaagttatgaatctatgagtgtatgagattacgtttagagcttttcatatatagacaaataaagtaatgaccaggaaaccatacgatatgatatttaatgtttctgatttttttcttcaattgaatggactataaggattctagctctgtctaaaaaatccatgtcttaatccttattcataaatcaaatcaatacaactaataacaatctcaagcttttaatttttttttgtttttgtttttgatctaggattgtttgtctaaaaaatccatgtcttactccttattcataaatcaaattgatacaactaataacactctcaagacttggttggtatgatgtcttactccttatttaataaaatattatatttggtattggcttgtattaatacttaatagattgtgtaaagttataatatatttttaataaactcgacccaagtagggtctaggtccggattcaggtctgaggtctaagtccaaatctgaattttgggttcgagttcagatcagagattagagttgatcccgaatcttttgttatatattaaataatacaagttacattgtattaaaaattttaattctaataattagtacaatacattgttttatccaaatataattttatttattatttaatacaataaaatcctaccgcataccaaacgattctgcaagcttttaattttgaattttttttttttaagttaaaa

SEQ ID NO: 238929 - DNA, 1099 bp, Cannabis indica
tatttcattcttattgctattcccattttcatttctattcttatgtgttcattatatagaaatacgttaaaagatatgtttctaggcatggtttgatgaggctcatatgtctgctcatattgaagttaatatgtagtaacatggttagaagacatagaagctgctttgttttttacaccatgtgaaattgtgaatattagttacgattagagttgatattacttattcactttatactaaacattgaagatatgattttcatgtccattattgttcccaacaattgaagaagggttatactagttatttttccaatggttggttcatgttatcattgttctttattcaaaaattttatgaacttttacagactgcaaaagttagcgcagcaacaatatgacaagattgagacagtaaaccgtgaaaggaaatatcatcaggtgacttggacttcctcgcctttaaattaatgttcttccattctatgttacatactgatgagataaataatgtgtgctccatttgcgtccagcaaaacactgcttatgagcttaatgctctctctgctcagtggaaagagctttgtcacaagaatatcgaaattcaagctgcatgtggtcaacttgaaaatcacatatctgatttaaaaagagaagcttcagaaaggtaaaataaaaaagggtttctttcttttgtgagcatttagtcattcacagctaatacatttttattcaattagaggatggagtttggagacaagtgcagaggttagttcaattcagaacttggaatgaggtattcttctctctttctttttcttttcaagggtgggttgggtgtgaatttgtgttttgggcaaaatggtgtgtattgttcttagaatcgtttgtcctcgaaaatagtgaatgttcgcattatgcatgttagatatcctcatgaaggcattctatgatctctatgatttcaggcctgcttaatgtgaatcagtgattctttgcgaggcttttatccattgagggcatgacaaccttgtctgttcttttctttttatcccgatttttttctcttcttctgttacatgataactttgtctaattca

SEQ ID NO: 238930 - DNA, 4496 bp, Cannabis indica
gaggcccactcgcgcgcctggaaagtggcacgcacgcacggccaacagaagctggtgagccgcacgcgcgcgtggaaaggctggggagacaagctcctggcgtgtctctgcgtgcgaatgatagctcgccacgtggtgaggctgtcttttggtgaagagaaatgggccggctcctcgactgggctgggcttgtttgctgaatttcattgaaaaaatgccattttttctatactttgacctcatttttatcatcgtgttatttcttttccacttttcataaatactatttttttttcttcaaacacaaacacaattaaatccaaataaaatatttccaacataatatatatcacattaattttaaatgaaaatatttatttaagatctaattaatttgtatttctttaaataaaaacaatgcattttcttaatttctttttatttctttctttcttttatttgtgtcataaaatattattttcttacaaaattaactcaacactataatattttcactataatattttcaaataaaaatatattacattaatttcatgaaaatattacatagaattaattttattttgtatttttacactaataaatatacatttttgactacttaacacgaattagtttctacaaagtcaagtagcaaatcaagttgtctagcccaacaaagaccataaaacatggcctttgcttccatttcttggggcctgaaattgccaataacgggcttggaaagagcaactactacatgtccatgagaatcccgaataacagcacccaggccaatttgttctttggaggaggtagccatggttgatgtgtagccgagccattctgacagagtgcagtaggtgtttctgcacttgtataatgctaaaagttgcgaagataggtcgtaccttttgaagaaatatgtactggactttgtagttgcttaccatgaacaaaacagtttctatccgaccatatataccatatgatgcaaataatcttttccatatcagatttggaatagattgttgaaaggtgaataagaagatccccatctctcatttgatttgccattctgaaatcaaaagaaaattcagtagttctccaaacaactttggcatgatcacaagtgaataaagcatgtcctttggattcccaggcattagaacataagcaacaagttgtagagtttaaaactttcctattaagcaatgatttagcaccaagaagggataattgtaccaccctctagccaaagaattttacttttgaaggaagtttacaatcccaaaatttttctacaaagatgcttgagacatggaacttgaagacagttcctcctcttgtgaagagcacgcactcgagtttactaaatactcaccagttccattataatgccaaacccacttattgttagtagcaagaaaagaaagtggacgggtgagaatatgatctacatcagcagaggaaaaatccaattgtaaaagctccaagttccattctctattaactgttatatagtttgaaactcgactcacagcacaacttgtataatgcaagggaatgcaaattaaaatccctagaatccatggatctaaaatccatggatctgaaccacatataatattagttccatctcccaccttcatttttaatcctttaaccaaaaatcacgccccaactaataccctatcaagttaaagaagacataccccaactaacagccatcataaaattattattaggaaagtatcgacccttaaatacacgactaagaagagtattgggattttgaaatatacgacaagcttgtttagccaataaagtttgattaaagtgaacaaaagataagaatctcataccaccttccaaatggtagagtaaagaaatttctattttttccaatggattttcactttgtctgatgtcgatccccacaaaaatttagccatcaaagtctctaaatgtttacaatatttggaagataatcaaaaacaactcattgcataagtggtgatcgatttcacagtcgctttcaaaagaacctttcccaccaattaaaaaaaaattatgagtccaagcatgcgttaacttccagatccgttctttaatgttgctaaatatttattttttagtctctttcagagtacacgggaaggcccagataagattatggcactcacaaatcggcatacccaaaatttgttggaaagagtttttggcagctatcgatatgttaggtgataaagacatgacaaacttatctatatttaactattatcctgatgcacgatgataaatatcaagagtatgcttgattgctccacaggatagtctttagcctgaaaaaaaaaatagactatcatctatgaaaagaatattagaaatagttggagatctacaagaaatagccatccccttaagtcgactaatcttttgctcatattgcagcaaatgggaaagaccctcagagcaaattaggaatagatatggagagagtggatcacctcggtacaaacctcgatgaggaatatctaaaccaaaaactactccattgatgaggaatgaaaatatgtttgtgtgtagacacatcataatgagggaaatgtaataaatattgaatctcatttccctatcacaactgcattaaaagaccattcaacctgatcaaaggctttgctcatatcaagtttgagagcggcataacctttggaacatctattcctctgtttcaaactatgaaccaactcaaaagcaacaagaacattatctgttatcagcctatatgggagaaaagcattttgtgtctcagaaatgaccgttaggagaatctccttaaagtgtatgaccaacatctttgagattagcatatagataatattgcatagacttataggatagaaatatttcattgtctttggttttttaactattggaattaatgcgattaaagtcttgttaaaggttgtaggactgtcaccattattcaacacattcagaacaacgttactgacaattgtcccataatctgccaattatgatggtaaacatagctgacattccatcaatacccggacttttttcttgccccatagtcttaagagcagatagaacatcagaggtagtgagttctttcaataaaaaaatattttgctgaggggtaattgttgctggaattgtagataggacatgagacaaagcctaatgatcctcttcaaaattcgtaaaaagactttcacaatatgaagagaccatttcaaaaataccttagttagaagatatagtattcccattctcatcatgaagagctctaatttttttatttgaattcctagcagacacctttgcatggaaaaatttggtgtttcgatctctgactgcaaccactccactctagatccttgttgccaatattgttcttcatcatttgccaaaagttcatccaatatggattcatcgaagtgaacagcctgagagtgatcaagatatgaagtcagattggagtttaaagttttaactctttattgagcatgtgagatatccttcttaagcttaccgaacttatagttgtgccacttaaatgaaccgcacatcagccagacaagacacaagaccaagaaaaatatcaccatcattgttgtaataccaataatagaaaattatatcagaacaatcctcttcattcaaccagattcattcaaaacaaaagcgagatcgtcgtcattcattagcttcttggtgttgagaaaagtaaagttcgaccataatttctctttgatctgatccatagtaatccaagtgggtgatagtgggtgatgctaagttatctttccaaacatgattaatgaaataccaattcaatctctctttcaaggtagatatgtttttcttatttttagcccaagtgaaattgataactctatggtatagagttattttttatgcttttaaattggaattattgtgagaagagtagtgaaaatgtgtttgtttgcttaattttagttagttttagtttcattttctatttagtgagctaacttttaagtcttgtaaaaattaatattgtcaggtgtgttttttctaattaaatgtgcatgtttgttgttgaaaaggaagaattgaattgatagaaaaaaagaaaaggaagcaaggatgaagtggggacaaaagctgaaattggggcaaattgctgaagcaatgctaaaacgaattcagcattctggcagtgacatggaaacacgagatttagctttccacgtctgcaggagcatgtttgttatttaaaatcagaccatctgaatgttgtgtaagaggaggactaaacctagtgggccaaggtgcaaaaggattgggcttctaatttagggtgtgatttttttaccctagggactcaacaacaaaaagagaaaaaagccaagtacaccaccatctagaatctaacgtgagcaactgcatttttttggaaggagaagtaaatgcagaaggaaagt

SEQ ID NO: 238931 - DNA, 3536 bp, Cannabis indica
agtttctgctattttaaaccatggaattatattgaaatattcacttgcatgtttatataataataattataagttggtaataataaaaacacataattaaaaacgtaacaacagtacatcatatatttttaaaaatatatatatagccatacagctagctaataagttaatttactactaaaaaggtcattataaacgtgttttgacgagaggaggaataatattagacaaaaagtaatttttatgaaaaaagctaaaatggaaatggccatggctggagaaaaagtggaaactcatcttttttagctagaatgctttggttttacgttttatataatttgataaaggagtattcaacagccaaataaagtaggcttttacattctgttttatgatcaaacgattccttatgttaacatactacagagcactgatttgataggttttttttgtctgatattgttggatattcttttcagtccattatacgtgtactataaatggatgttaattattgtttaatcatagttgataaatagattatattaatattcatcagggatcctatgatatatataatatactagtagtgatgactgcatgcatatatatggtataaatatatatattttacatttatatatactgatcgagaagatttggtatattctacatttcatggtatacgtatacttataacaatgtaataaattaatcattttttcttttgtttgttacatgcagctatataacttgtactataattaatagaaaatatattaattaaagcaatactaataatatggatcgactaataattataaagaagttcttgactttcacaatgaacacattggaaacctgaaagctaattatttgcaaatattataaactagacaaatttttctttgtagaaaatggaataatcttcgagcaatcatgaatatcttgaggtaaaaataggcatgaatatcttggactaaacaaatattaataatataatatatataaaacttgtactactagctacacatatagctatatattatatatagctaggtagctttgtttgttgcttttgaaatagaaaaagtaagagtttggaatgcttatgatggaagaaagaagaccaaacgagattcttaatttattgtggcacatgcaacaataaatggcaacagaccccttatgctttttttgtccagatttcaaaggacactaactgtaagagatttttgtttttttcccaaactctttctcttgtggaatcatatgaagtacatgaaagaattatgaccgattatttctaatttctttgtcctcttctatccgcagattgattttggtacgtgtcattttcactctaattcatataaactccctcctatagatacctatgcgtttgatcaaaatgataaaataattctaagtaaatattattttcttcttgttacatatatgttacacaaataatagagccaattaagaacagttcatattattttctctctctatatattatagatttctatacggattctatcatatgtaaaaacggcaaaaactctaaccaacaatagctcccttttggttatctctaggttgtgtaattataaaggggaaaaaaatatgaagggaaaaaataaaacttttacacaaattgggtatattcgtaaaagggtcctccggtcttcattgattaaccctatggaacccaataacaaaaacaaagtgatcaaataaaagctaaagttaaagtaactttttaatattctaccttctttcttaaatcaattatcagtgtcaccaatgatgtgggagagagagagacacatttaaataatgtaaacacatacattaatctctcatcagtactccatattaccaaacatcataattaattactaaattaattcactagaaaaatgtctatacatttctctttccatatatgcatattcaaaaatctttataatatatatatatataataaaacaaaaaataatatgagagagatctaacaaaagaaccacaatatatgaccccatatatatatatatttatataaaaggagccaaagcaagaaaagcagctctctctgttatgagatacccattaagcccccatgcatgcttccaagattgcccccaccatagtgccttccttctcttcatggcaacccccccatgaaagaaagtatacagatttaattaactcaaaattgaaggaaacccctttctctttcacatacctttattttattttcatgagtatatcccatcaatttattattattattatttttatttattattgttattagggggcagccaaattttgatatattttacagctttttggaggcatcctgatttcttgccattgttagcgcatatactctcacgtcacaacaccctttgtaggccattcacttgtagagatagaagtcaaactttaacggattgtagatatatatagtactaacatatatatacacacacactacacatatatatgtacaatatatatcaatcggttttttaaaaaattgactcatcaccaattatttttttcttcattttggagatcttatcttgtatataaatatttttttaagttgcttgaagattgaatgaaaacgacacaaccatatattataataagatgtattgcgaattaatttaccatacatttactttaatctttaaaattctacctataaggaataatgctgcatggaacaatatatatacatatatatgtatgtatatttttatgcatgtgtgtgtataaattaataataatcattggtattgctaaaatgggatgaacattatgtttgaaaggtgggttaattagcataatttaatttaaatagtatatactcattggaaaaggaaaaagctgagttgaaaagatgtctaatggcaattatggatggtgatcatatttgaggtggtccaggaatattatctttttggccatctcttctttatatgttaattattccatttataaagttaagcttcggaagtcaattcaggaatcagaaccaaagtagggtcgtccttcttaagatgactacataaacaaaaccccaaaaattcttaatggttaatttttttcatttatattctattttatatgcatatattgttttaattaatctctatggtagtgaaaacccaaccattggatgaaacagtaatttttgtttttgtatgtggggcatagcaagtaccctggacttctgtcccagctcttaaatgttttgctaaagatagacagattcgtttttcttttcaaatccctttttctcattttttttaataattatttattataattttttttatcttgggtcctcctttttttttttttaatattattttttaaggggttgttcagcatgtaattgcggatgtggattttgccacctttaaatctgggctttgaaggaatatctggttgtgcatgattttgttttttgtcggttgtctcattagtgttttgatttggttaatttggaacataaa

SEQ ID NO: 238932 - DNA, 1021 bp, Cannabis indica
ctttactttatcttacgatttttttttttcttttaacttataacggttatatatccttaacaaaaaaaaggaaaaaaaaaagtcatcatcatgtattacgtcgttctttttgctattttgtttttgaaaaaaataatattaattgcttgtaatttaaagatgttaaaatcaatttttatagaaaaagtatattagaattgtaagaagcataagatttttatatgttaggagtatgagagtttttaacatctcctcaagatatggtatggtagctcgatcacaggcagttctatttttagctctgaatcataagtgactcttttaattctactttttaaatttttgatggctcttttagtttactttttggaattttagtagttctttttgattcactatttccgaattattataattgactctttcgactttatatactatattagaattgtaagatacatagaagttttatctcaaaattaattaataataaaaagacgtagctcataaattttatatattttattgttatctttacatacattattaataatgagattttctaataaagtaagagttaagcttataattttaaatgaagtgtttttaataatgagaaactattttcattgatcattatatatcgtattattgttattagtaggtagtagtagtacaattcattattaatattcacatattttaatataatatatatcaaaataaatcactaacagcttataaaataagatttcataaaaagaactctcttcattacacatgatataattaaaagtacatgaaattccaactataaatataaactaaaacgactccctatagcaatataattataaaatatatagcaagagtcgcacgtgtaggggtataaactataaacccacacacactttattcttatattttttctatatattatataacctatatatatatatatatatgctcgaaaatcatcttgtgcattcttcacaagctcactgcacactgtattaattaa

SEQ ID NO: 238933 - DNA, 1291 bp, Cannabis indica
atatatatataaaaaaaaaagtaattatgaaaatttcccttaaaaaaaaggaagttcctctaagaacatttaatgttattgatagtttcctaaatagtattcatgacaccctcttaccatacatactaatattcgtttcattaattttaaattaataatggtcacatttatttatttttactttttggaagttaagacttatctgaaattattagagcatccgcatcagttataatagttcaatcttaaaaattaagagaattgctaaaaaaaattattggtgtttaatatttttttttagtattatactgttattaatgtaattgagtatcgagtttcatataatgtttttaaaaaatattattaatcaatcttaaaatattacttagaaaaagtattaattattagtagtagccaataacaatattaaaattaaatagctaaaagttctaaaaccattctccatgagatgcttgaaatgccttagcgaagcaaatatgctctttaatacagtttttaaaaaaatttattttctttttgtccttttttttatttctctttcccactaatatttgtaaatattttttatttatttattttttaattattttctttaaagaatcaatattatttaaatgaagtaaataaaaaatataatttggtgaggtattataaagaatagagtagagaagtaattttagtgtttttaggttatgtctatgattaaatattaatttatttatttttaacaaaaaaaggttaaaagaaacactaatagtgtctaacacccttctcaatatcatattattattggttacaattaaaatatcagatctcatagataataattattagaaaatattgttaatcgtaaggggtgctaagcaccacactgattactaataacaatattataatattgagtattgtgattgatcactatttaattaagaaaaatgctaaaaagtaccagtaatacacaatatccttttatgtataattatcgctattggtgtaactaagtatcgagtccatataatttaatagattttagaaaatatcgctaactaatcgtaaaatgacacgtctaaaaggtgctagacaccactagtgcctaataataatgttatttaattaattgttttatttagtgaattacatacatgcatagggtagacgtaggcttttgagctacttcattaacatttaataaattaatcttatccacataaattaactttgactaatttataaatataacttatataataataataatttgagagtgtat

SEQ ID NO: 238934 - DNA, 1263 bp, Cannabis indica
aaagcctccttaatatcaaaaatttcaattaggacaacatccataggtttaccaaaagagaaaataggaaaacactatttcagtttcacaactttatttatagtaactagcattaaattaatttttttttataaatactcaatttatctgtatcaatgtttccatttattaaaagaataaataaactagttttaaaataaggtaatttgaggctaagttatttatacttttaaactttatacgatcaaccactttaattgaaattttaagggtaaaatctccaaactttgattatgttatggtttttagtgttcctttagtcaactcttgttaaatgacaatgtagatatctatgtgtacttctattcaaatataaattttgtaccacaatactcaaactttgtatataaaaattaaatatgcaaaaaccctaattcactattaaaaacctatcatttaatcaaacaacatccattcaatgaactagaaattacacccttactcttaccacaaacaacttccattcaatgaactagtattataaaaataaagagtcttttgcggttaaactattccaattatcatttcacttgcacttaactttctaagcttaaattttagtggtaaaactttctaaaaatactgaactgttaaaaaatttaatgtgttttttatttttgatagttgattgccaacatgaacggtttatgtttacaattctatacatgtgacacttgtacattggtacatctaatataattatttaaaaattataaaaacttatttcaaaaatatgttttatttttaaatactttattattttttttattaattttatttagttttaaaatgaattttgaaataataatattaggtgtataaatataaacatgtcacgatacaagagtgcatacataagtagttcatggtggtagttaatcatgtgacactttaaatttgctaacaatttagtaatctgaaaggttttagagataaatttgagcttgaagagttaaatacaagtgaaatgatagttaagagaatttaaccgctaaaaattcataaataaatgattgttaatagtgttagagctattttatttaaaataaaattataactcaataaagtgaattttacaaatactaaataaattgattaaatcaatgttacaattttataacaaaagtttttttttttaatttttgtaaagaatctaatctaaaacaaaaattaacaaataactcatggaaaaaagaagaatat

SEQ ID NO: 238935 - DNA, 2127 bp, Cannabis indica
ggtctagtagtaattagtaaactactacttattctatacaattaaacattaaaaaacaatgcaaacaatgcatggatattacataattacaaattggtttagaaaataataaaataaataaataaataaagcatatatatataatgatctgactgacatcaatcatttgttggcctaccaaataaactatatatatatataatatatatatagtcatgatgttcctattttcaaccactgctttataatgatattcgaaatttctttatatatatagtgttgtaatatacatgagcccccattctataaatatatacaacaattaatcttttattaggtgaatagatgtgataaataaaatactctaacgtgatttaaagtggaaaaggttcgtagtacatatgctaatttatataattgaacttattataattaattatatgtaaacaaaaactaataattatgaaatctgtactctctctcctcttatttatttatttaatgaaatattttatatatatggattaaatatgtaaatgttggtcccattggaagagaagacacataatgtatgtatatatatgcatgtattatgtgtatatatagtttgttgattcaatcaatatatatatataaatattccatccctaccatgtatatagttgggataatcacgtggagagagatataaattaacacacagcaagaccaattaggctttattctccccactaattgttcccattcctatacaataaaatacacaataaatattcacaactagtcactatatatatatattatcttattgttttattatgtcattgttttaaacataagacaacttattaatttgtttaattttagtggtagattcttgggttctgtcattgtatttaatcaaaattgttttagaattgagttataccgtaatatgccaacaatcattgtattttatactactcatgaaattgaaattttagaaggttttttttaattgcaaaagttaatcaatctatatgtctttattattactattttttttctaaaaaaaaattgatgtatatgtttctatgatatgaatttattatatttgtatgtgtttatcaatctaataaaaatcagtggtgtgtatgcattttctaaacatatcatcttataattaatttgtgaaattctttaaaagttattaaattaaattaagtatgacatgatatttaatcagactaataacaatattaattcgtagaaaaatattaaataccactagtacattttaatatttctcatttatattattataactgaaaaaagctagagagagggcaactagaagaaaaaagggactagagtggaagggtattaaaaaattagtggaaaaaaggtgtcgttcaaattaaaatatatataaatatatatatacacatatcatactattgttttaaatttatgcttgtggtggtttatatttatttgtattttttaaaatttgggtcgtgtcacaaaaaaatataaatcgtgtcgtgtcgtgtaaatatttttaaagggtaggtttggcacggcccgtaagctcaatatttttcgtgttgtgttttacttgtgtcagcccgtactttttaaacatgccagtttgtttttatatccaaacttgaattcgtgatttattttttttatattttttttataattactaaactatatgtatattttattgctttagttatatttatataacttctcaacaatattttatatgtaatcgtatacagaaattattaatattattaaatttcgaatatttacttaaagtctcaaatttttataccccgctctataaataatatttacttattaaattataataatatatattaagttttaatattattttaacttatttataatttacaaatatatattattattatttataaaaaaaattagggttatttcgaacttattgtgtgtcatgtctttaagactagtatatttgtatttatctgtcgtgtctttcatacttctcgtgtcatgtcgtgcttaaatatatatttgtcgtatcgtatcgtgccaattaattatagtatcatgtcgtgtagtttatactttttttcatgcctaatcatacta

SEQ ID NO: 238936 - DNA, 1003 bp, Cannabis indica
gcatatagaaatgggtcatgactcatgggtcatgtcatgtcatgacatgtgtgtccttaataatattagagattatgtatggtatggccatagttataaatgttataatataaatatttgtacataggtgcatgtgtgtgattgatatataagattttacaagatttaaggtgtttctttgtggaagcataatttacctaataaaaaacaagacatgacaaaacagggaccaaatcagagagagagagcactggattgactttgaatttgaagattatagagcgagagaaaagagagaggtgatgggctaatgggttaggcccaaattcgtgtacccgagcccgatcgcgcatgaacacttgtctacagccataaataataacaataaccaaataaatataattttactatcacacaatttttttttacaaaaattctgtttttttatataacaattgtaaaataacaaaacagaacaattaaaataagggaaatttgcggtaaaagtccccaaaaagttcagtttaatacagataagtccccaacctccaaaaatagcgacaatagtcctcaaagtcatgtttttatttgtctgttagtctccaagttaacagatccgttaaacccaattcaaatgtcacgtgtcgaaataatgttggtccaaattattattttaattttcttcttcgtcttcttcgttttcttcttcttctcatgccagaaacccaaccccaaaccagcaccaccaccaccaacccccttcgaccaccgtccacggtcccctgccattcaacctagcccttcgactagttcccaatcgacccagagcccccagagcccttcgtcttcttcgttttctttgtcttttttttcttcttcttcacacgaaaccccacccaccatcactgtcatgcacgtcttcttcgtcttcttcttcttctcactgccaaaactcaacaactccgaacgccaaaccaactatatcatcacgcctaaataccca

SEQ ID NO: 238937 - DNA, 2332 bp, Cannabis indica
tgttgctctgtaatttgtactctgtgattaccctgtattcattcactttgtctataaaaggaaataaaatccatcagcatcaattgagctgatttcatcaaataccatatctgttagtaattttacttggtatcagagcaaatttaggcgcttgccatgtcgatccctcaagaacagacgacaccagcacagtcagaaacaaaccctgaaaatcagggtcaatcagctcccttgaatgcgatgattcaaccatcgtctgcatcaagtcctgctccgattgctaacccatttagcaacacgttgagccagcccttctctctaaaactcgatcgccacaattttcctctgtggtaaactatggttaccacaatcatccgtggtcatagactggatggttatctcaatggtaacagaccacctccacctgagttcttacctgcaagagtagctgaagatggaacacctggatctggttttgatgttaacccggagtacgaagcatggttagtccatgaccaactcttaatggattggctttatggatcaatgactgaaggagtagcagcagaggtaatgggatgtcagtcaactgcctcactttggaatgcccttgaagagttatatggtgcctattccagagccaacatggatgatattcgaacaaagatccagatcactcgcaaaggcactcagtcgatgtttgagtatttgagacagaaacgcatgtgggccgattctctggccttagcaggtgatccttaccctgaaaaacacttaattgctaatgttttatctggtctagatgcagaatatttgtctatcgtggttctgatagaggctcgggaacatactacatggcaacaattgcaaaacatgcttctcagcttcgatggaaggttggaaaggctgaatgcttcaaaaggtctgaacaatcccactgccaactttgctcagaagccatctcactcaaacaatccagggggtacatctcgaaggcctaatttcagtcacaacaacaatcgtggtaatcatcacaaaccaggcttttctcaaggcagtggctccaggggtggcagaggtcgaggaggaagaggtcaaggatcaaaacccacttgccaagtatgtgggaaatatggtcattcggctgctatctgttacaacagatatgatgaaagttacatgggaaatcaacccaatactgataacaatcaagacaagcaactcacagctctcattgctgctcctgaaaccgtgaatgatgacagctggtatgccgatagtggtgccagcaatcacctcacttcggatcctgaaaagatacaaaacaaagctgagtatgggggtaaggaacagatcacaataggagatggtagtaaactacctatcctacatgtgggatctggttttattcaatctcaatctaatactcctttactgctgcataatgttctgcatgttccttctatttcgaaaaatctgattagtatttctaaactaacctcagataacaatgtctcagttgagtttttccatgattcttgtgttgtgaaggaacaaccagtagggagagtggttctgcaaggagctcttaaagatggcatttacatgctccaaacatctaatctacctcacaagacacttcaaaaaccattcacagcagtagccaccagttcctcttcaagtactgtagtttcttccaattccctaaaagatgtatggcatagaaagctaggacatccctcaagtaatgttcttagacaagttctcaaaatgacaaatgtaaccgttcctattaatgataatttgacattttgtgatgcatgccaatacggcaatctcatgctttaccatttactaactctgcatctagagcctctcatgtcttagacttgatccatatggatctttggggaccatcccccatcacttcccacactagctttaaatattacattcattttctcgatgatttcagccggtatacctggttgtatcctctcaaaaataagtctgatgcattagaagctttcactcattttaaaagcatggttgaaacacaatttgaaaggaaaataaagaaactaagaacagattggggaggagagtttcaagctttttcctcacttgttcttgacaatggtatcatttttgatcactcttgtcctcatacttcggaacaaaatggacgagctgagagaaagcatcgtcatattattgagatgggcctcacactccttgctcaggcagccatgcctctcaaatattggtctgatgcgtttagtacagcagtgtatctcatcaatagacttcctactgctgtcctaaacaatac

SEQ ID NO: 238938 - DNA, 4778 bp, Cannabis indica
aaataatagtaaaaaaaaaagttggaaaagttaaaattaataaaaattactattttggaccttttttcggtgcataattgcatcgacaaaggtgaaatcgtgacccctgaaaaataagcaaaaaaaatttgatggcctatttgcattaacaaaagttttcccacctatcactttaaccacgccggaaatttctccctattgtttggtaacttttgtcgacgtatatatgtgccggtaaaggtgaaatttcatccctaaagacgagtaaaaaaatttgataaccttttgttagtgcatatatgcgccgatgccggcaaaaaattttcccaaacattatttacacgcgataaaaattccttccccttttttagacttttattagtgcatgattgcaccgacaaagcggtttattttcaaattattgtcgacgcaatagtgtaccggtaaaatttttggctgaatgcttttgctcttcatttagctcctttatgttgacgacttttgccgatatatttggccaaatacgccgacaaaagttacacttcttgaaatggcattaaagtgaaatttggggaaaattttgccgcaatttcccaaagaaaaattgcctaaaagtccgaggacttttagtactgtaccctacccttgaaccagcagctttagcgtcagatagtataaatgtaaaaattctcattaccataccaaatctgaaaagaatataaaatttggtgtaaaaacaaagattgtaaattttgttgaatgatctcttgttctttgactaattggtacccaaaatttgaacttagaatacatatcacatcagttcgactccactgggcttggacttgcttccatataggtgatgatgcataggactagttcgagaattacttggaatttgttcaacgcaggattcaatagaggtaatgcgtcttcttcgtcttcttcttcaagtttttcagtcattgtagcacaaactcattcccagactgtaaccaatgaggtggaagtccgtactgttaaagatgctctcaacatgtttgatagaatgttccacttgcgacctctgccttctgttgtgcgtttcaatcaattcttcggtaaaattgtgaaaatgaaacactattcccttgtgattactttctacaaccaaatgttttcagttggaatcctgccagatgagtatacgctaggcattttgattaattgcttctctcatttaaagcgtacccgttttggtctacctgtcttgggaaatttcatcaaatttgggtttgaattcaataccattactctcaatactttaattaaggggtttgtggatgagggtaaaattgatgaagcacaagtttggtttcacattatgttagcaggaaaaggatttaagcctgatgtaattacctataacacattactaaatggtttttgcaaggtggagaaaattgatatggcaaaagaatactttcatcttatgattggtgaaggttctcctaagcctgatataattacctataacacactactaaatggcttttgcaaagtggagaaaaatgatacgaggcaaaagaatactttcatcttatgattggtgaaggttctccgaagcctgatataattatttataacacactactaaatggcttttgcagagtgggaaaaatgaacgaggcaaaaagatactttcatggtatgatttcagaaggtttgaagcctaatataattacttatagcacattaatacatggtttctgtaaggtggggaatgttgacaaggcgaaagaatactttcccataatgattgcagaaggttttaagcctgatagaattgcttataacacattgataaatggattttgtaagatggggaaagttgatgaggctaaagaatacttttacattatgattgcagaaggttttcagcctgatatagttacttataacacattactaaatgctttttgtaaggtgggcaacactgctgcagctatacaattgctgaggaacatggagaaaaagttaaccaagcttaacataatttcttataacactgttattgacggtctctgcaaggatggattagttgttgatgccttggatctcctctcagaaatgactaagaaaggatttgttccaaatgtcattacttacaacagcttgatacatggagcatgcttgctaggccaacggcaagaagcagtgaggttatttaatcaaatgatcgataaaaatattacacccgatgtatttactttcaatgttttggttgatatgcttggcaaagagggtgatgttgtagaggcggaaagactgattaataatatggtacaaagaggcatcaaaccggatttggtcacatattgttcagtcatggatggttattgtttgcgaggtgaaattgatcaggcaactgaaatgtttcagatggttaagaaagatttcaacattaacttgcatagttataatataataatcaatgggcattgtaagaacaaggggatagaggaagctcttgcactgtttcgagaaatgtcttcatcgaatggattaattcctgatgttgttacttacaacactctcattggtggtttgtgtaccgtaggaagaactcatgctgctcaagagctatttgcagagatgctagctgctggccaacttcctaatattcaaacttttgccattttacttgatgggctatgcaaatatggacaaatgaaggaggcactgaaaatatttcaggatatggaagagaagaagttaccagtgaatattgttatctacagtatcatcattggagctatgtataaagctggagattttacaggggcaaaggatctctttcgcaaactatcatcgaagggcttgagacctgatgtaaaggcttatacaatcatgatagatggacttctaagtgaaggtcttgtaggtgaagccttaaatttgtttagagaaatggaagaaaatggatgccccccagataatgggacatataatataatgatccgaggacttgtcaacaattgtgaaatatcaaggggagttgagttcaataatgaaatggtgaaaaggggtttttctgcagatgcttcaactgcagagatatttattaaaatgatatgtaatggtgaaatagattcttctttgcagccagtgattcaaaagagtttatgaattattattggtcagacatatttattaaagtgatatgaaatgttaaaatagattcgtctctgaaaccagtgatccaaaagaatttatgagccattattggttttctgaagatgtatttgttgtcaaatgaaaaattagttgatgcttttaatggcattcatatgtatgttctttctaacatctgtgactaagtttgaatggatcatgtcatttttcgagttcatcttacagaggcttgttgagtggttttatttatgcttggagttctgaatgttgcaagctgtgaagctcttttattttcacactataaaaatacttattaccttgcgatctgttgagtaaaggcatgtctacaacctcatagactgctcgagactgagcttagtaaactgatgctgagagaggtatttcctttcaatttgttttgatttgtagtgatttgctctgtttcacttgttgttgggcttttgctatgttaattgcatttttttagtctcctagcctttttttttcctgatttggtaattttaaaggaacttcttgcactttcttcttgaaaattcccttgcaaaatgcaattttgacatgttacattatttatgttctgatgacatgagttcctcaaagaccagaacactagcttgttactttcgagacgagcccaagactggagagcatgcgttacaatgagaaggcggtgctggaagtcctcatcaggtgacagcacttgcccactttcgagaattcttgggagagttttgaagtgatcaatgaaaagttctcatcctttcaccttgaaaacgaagtgcatctgtgaggggggtaatggtagaccattggtaaaatatggctgggttgatgtgtaatgactgctgactcgtccgagagagtctagagttgttactgagtgctgagctgtttcgggaataaaaggggtgtgaagagaggagacgaattgggacagaccaggccctcaaattcctggaggtgttttcctttcatttctcttgtaatttttctactgttctatcatcggatctgtatctgaagctaacattcctagctcagcaagtatttgttcaattgttctggtttactgttacattgatattaaatcctacttgaaacttatcagtctcatttactggaaatgtcaaactgaaacttgctatgtcacagtgtactaaagtcttatttttctacattggtaaattttgtagccattggtttggaaaagcagaacactgattatctagcaaaagcagacactagtgaattatttaagattagataagaagtataattatcaacaagaccagtttaatctgagactgaatgtctgaaaaaatgcagattgaacaaaagagtaaaatatagtttcacttaagatgaacacacgttgtatgacttaatgtgaatgccaatgctctactttgttgattaaagggtttcttctgttacttctctaaatattctttgtttagatctgtcaaaagctctctttctttatgttttgatgacttttcaataatttagtgacaatgttcatcattatgtaccatagaatagacaataactgcatagtcatcatctcacaagtcaatatttta

SEQ ID NO: 238939 - DNA, 1779 bp, Cannabis indica
acatatacatatatatatatatacacacacctaaagtcgttacttactttttcttttaatagaatttctaaaaggtgttagaataagtatgttttgaagtactaaatagaaactaatcgaaccgaactactaaaaatttagttttagtgagagctctatttatcaattaaaaatatttataactacattataatcacttctaaactgaaatttatttaagttttattagaattttttactattttgatctatacttattaaattaaaaaattacatttaaatttcaaaagacaatattttattagtaaaagctataatatttatagatttgtcccaaactacatacaatcttattctcaaaaccatatttaatatcaaaatgttttgaaagaattcatttttatagtttttaaggtgtaagttgtaataataatggttttttattttttgtcaaaaaagttggtttataaaacttttttttataaaataaaaaaaactttgcacacattctatttgtaatttcttcaacatttatagaatatgaatttggacaattgggttttaatgctgatcaatattgatcataataagaacattggtttttgaattccaacacaaaagactcaaatgcttacattgtgttgtttttagggagattatggctgcaaatggagacaagcacaagataacttgtgctatagaccacatattagatgctgagaagaaaggagaaatcagcaaagagaatgtactttacatagttgaaaacatcaatgttgcagccatagaaaccaccttatggtccatggaatgggcaatagccgagttagtcaacaatccaacggttcaaaccaaagttcgcgaagagatcagagcggttcttaaaggcgaaaatgtaacagaatcaaacctgaatcagttaccatatctacaagcaactgttaaggaaactttgaggctacacacaccaatacctcttttggtaccacatatgaatcttgaagaggcaaagctaggaggcttcacaattccaagagagtctaaggttgttgtcaatgcttggtggcttgccaacaaccccgaatggtggaagaaccccgaggagtttagaccagagcggttcttggaagaggaaggtagcattgaggctgtggcagcagggaaagttgattttcgattcttgcctttcggtgttgggaggagaagttgtcctggaattatacttgctttgcctatattggcttctgttattgctaagttggtttcaagctttgaaatgaaagctcctaagggaatggaaaaggttgatgtgagtgagaaaggaggacagtttagtttgcatattgctaatcattctattgttgtgttcaatccaatcatgacatgatttaggttcaaaatcttgtgttgttaagtgtttgttttagtgttcttttcttccccacaaaaactattgtaattcacattggttcaatgttcaaaatttggacaaaataaataataagagatgttttctgtttcaaagatttcttttcttcaacaaaaattaatgtaattaacatattattgattgtactctctcattatttttataagggacacatttgagcaatataaataacaagagatttcaaaagtttcaaagatttctcctttgactaaatttgatttgagaattttgtctcttaactcaaaatgaagatgtaaaaagtacaagcaagaaaagggtcaacctcatcatcaaagcacttcatgaatgttgttgtgtctctaatctat

SEQ ID NO: 238940 - DNA, 7500 bp, Cannabis indica
tagggttcatgggcccgcgcaagtattttcaccctagagatctcaatttgccaagcaaactaacaaggacttgattaatttgggcatgaaaaggcttaaatttgtgcataaagtcaaaatggcataaaactcctcatggaatagagcctatgcaccgacaaccatatggagatggtagtgctctctagtttttagagaacactgccacaaggaaatggcagtggtcgaaacctacaaaacaccaaggaaaacttttccaaatgtgttccctcaacaccaaggagtgcaactcaagtgaaagaaaccatttctcaccaaggaaaaagcctagccgaccactgccatctttgtggcataatgagtggcagtggtcgaccacaaagaatgaggatgtgatttctttccaaaaatgcatatttaccaataatatgtcaaaaccaagtgaaagaagtcaccaagtggtgtggaaaccacttggccaaccactgccacatttttggcataattggtggcaatggtcgatctccacataggaggaggagtttcattggcaaaattgaattactaacatccatgtataaaatacaagttaggaaattcacccaaggctccatagcccccttatgcgaccactgccacttttttagcaaaaaatagtggcagtgctctcctaagcaattggccaagaaccaatgtgaccaaagtaattttctagcatccatatgactgaaataagcaagaaacaccatccatggcttcgcataagccatggacgaccgctgtcacttttcggccccaactagtggttgtggtctcttgttagggtttcggatgtcaaaatgaggttttgaggtactgggacaaccaaaatatgattcatcatcaaaaaataagtcaaaacacatcccgaggggtctgggaacatgcacggctggaaacaagtcaaatatcgtgcagcctttctcatcatcttgcgagcttcatttctatcattgggaagtactcttattgtaggtcgcaatcggagtaacttcttatgggtaagtaatgcttggctcttcaagatattcaactgggacaaggttcattttttctgtgaccacaatacttgctagtctcgccaatgcatatgccttcacatttgcctccctcaggattttccttatggtataccctttgaactgtggtagtagatctttgattttgctaaggtacgctgctatttttttcacctcttgccatgtattctcttaagacgtgtttgactaccaattgtgaatcactacatatgtctaggtgttcgacatgtacttccctagctagcttgagtctaatacttagcgtttcatattctgcttcattgttcgaagtaggaaatccaaattttattgccccatgaagcctttgccctttcggggttattagggcaatctctgtatcagaaagttacgtagtcgatgacccatctattgcaacttctagataggaccctgctcttgattcttctttggctttttcttctgctcttgttcttgcttcttcttgggctcaatagtatcttcaacactaggatctttattgtttgtgcatttagctataaagtctgccagagcccgaccttttattgttatccttggttgataggtgattacgtattgtcctaactcaatttcccatttcaggagtcgactaattgcatctggtttatgtaaaacctgtcggagtggttgattggtatacaccttgaagggatgagcttagaagtaaggtcgtaactttcttgatgcgagcaggacgcaaaaggtcaattttttgattggggggtaccgactttcaacattgatcaatcttttactgacatgtacacaaagtgttgggtgcgttcttcttctctgattaggattgcacttaccacgaattctgttactgccaaatagatccctaattcttctccatccaagggcttttataggataggaagttgtgcgagttgtttctttagtccttggaaagttgcctcacactcctcggtccatttaaacttcttagttcctcgaagactactaaaaaaggaacacatttatcagtagactttgacataaatctactaaggtcgactatccgaccatttaggctttggacctctttaattttagtaggtgatttcatgtccataagggcttgtattttttctgaattagcctaaattcctcaggcatttacaatgaaacccaagaacttgcccgaacttactctgaatgaacacttgaggggactaagcttcatattatatttcctcaaaattttgaagcattcatccaagtcctctacattctcctatccatctatactttcatattctgaccaatatgatctttgaacatttggttgactaggcgttggtaggtcgctctagcatttttttaacataaatggcataatcttgtaaaaatacaaatagacacgtgttcaaaagcttgtatgttcttgatcaggtgggtacaccttgatctggttgtaacccaagtaggcatccatgaagcttaaaatctcttgcccgacagtagcatccaccagctaatcaatcttgggaagtgaaaaacaatctttagggcatactttattcaggtcggtgaagtctatgtctactcaccattttccattaggttttgggataagcactgggttcaatacccaaaccgggtaaaatgcgtctatgatgaatttactggctcacagcttttccacttcctcaatgagagctcgagctctttccttgtcaagcaatctccatttttgttatactggtcagaaattgtgagtatcaatgtttagtgcgtggaaaattactgatggacatatcttaaccatgtcattatgtgacatcaaggtttttccttagaaatttgatcaaagtgaattttatttcactcagtaaacctcaacctatcttaattatcctggttggtaatattaggtctatctttacgtcttctaattcttccactggccttattctagtatcaaggtcccctaagcagggatccatctcactattctcgtattgggcagatccctatttttttcagtttgttcgacctttgaactttggccgaactagccttccttctttgcctttatgattgtcaggctatctgttagtctccctttatacatttgaccctattatggaggggaactttacacaaaggtggtagatggaggttacagttttcaagtcatacagtgttggtcgtcctatcatgacattaaaagttgatggtatggctatcaccaaaaattgtgtcatcattgtgctacctgtgggcactttccctacagtgagggggagatggatgactcccagaggtgtgatagtatgggctaagaaaccataaatcaattgggcacatggaacaaagtctttgagctggaggcccatcttctggtatgttttcttgaagatgatgtttgatgaggccccatcatcgatcatggatcgtgctatagtcatgtttatcattttcaattccacaaccaatgggtcgttgtgggggtaatggacgtgtgcacaactagcatcactgaatgatacaaacgtgtcatccaatcatggttgtttagaagttcattcatccacgaccagtgcttcctccctttgctcatattagattgtctaagcatatctctcctgcgctttactagtatccctagcaatatgtggtactccaactatcacactaagatgtccatccactggggtggtatcaagaaattttgtgcattatcctcttgttgaggaggtcgctgaacttgatcggtctttacataccaattcaaatggggattagtcctttgaatgagggattcaatttcctctttaggttgttacactcatttgtgtcatggccaaagtcttggttgaagcggcaaaacttggtggtgtccattttatttatatcttttttgataggagggggccttctgtaaggtactgatgactaggttgtcataaaaatattttcctaagtatcaatgaggatggagaaggtagtgtactaaggagctctctctctctctctctcaaggattttactggttggtattatttaatttccccttcttttcattgttgttgtcgtttccattgttattattattgttgttatttctttgtggttggaaattttggttgttttggacagggatctttcctacactgagactgccaaggtgaacactgtcgactcttcgttctgcctctttaagttttatgaacccatcagctcggtctaaaaattctttctttgaccccacggcgagtcttttgatatcaaaccaacgtcttcctttgggctcaatcccacctaagatcgttgccagctgccccccgtcggttaaagctttgaccttggtggcctctgccatgaaccgctaaatatagtccttcaagggttcgccaaaaatttattttacttcgaccaggtcttcgagcttagcatgtaattggtaggaggaagagaattgggtgtagaacttagacacaaaagcactccatgagtcaaatttcccatgtgttatttaaagtaccattgatgtgtggattctgccaaagttgcaaggcagattatgcacctgacatcccccttttccttgtaggttagtctgtatctcaaaatacttgatgtgggataggggatcttcttttccggtgtaaactttctaagttggcattttgaacttggtcaggatttccaaggaattgatccaaggagtgaatgaagaaccccaacttcaatcgagttccatctcagtggattttgggccagttaggctttgtaccaggcttttaagtaaattcagttgggcttgcatccctggatctatttgtgctacctattgaccgacttgtgtggccggctgttgccctgggactttgtttggtatgaagtttccttggttatttgggataaagttgttctaattattcggaacaaagtttccctaattgttcgactattttccctattgtgggtcaaagttcgaatcctaattttctcttcttttgtttaggtcgtcccataagtcatcgctaggacttggacccatcattcggaacaccgaatcagtcttgggtctccaactagcattttgactttttgccctttcttgcctttgggagtttctaccattgtggccattgttgcaatttctctggccatcattatgactgttgttttggttggcatggagattttcacgcctttgttgtcaattgtcatctcgggctcagcttttggcctcgtcattttcatatttgtcagaatattgttgatgactagagacttcggggtcatctctccttcttcagccttgctgttgttgctggtcgttgtttcgacatagataacacttggaccctttggtttccttggtgtgagacggctcgtcctcatgaccctccaacaggttgagcaggcatctcattttttcttccttctgaccatggtcaacacttattttgattgtttttccttaggtaatgttcgaacaagacttgttcatttgtgagtggcctttgctagttgttcgaatgtgccctctaatctggacgaccattcccctggtgaggccttggttggttattgggacgtttttctgccccataggtgggaccctttcccctattattatttttcctatgcgactaaactttaatttgttatcccagcttaatgtggaaaatgtttgataatttatatggcctatctcgcctgatggttaatttcatcttgctaggctcgcatcttttgggcagtacagtccatccagtcctaaaactcgcgacgctgcttatcgaaggcttgattcatggtggcgcgcgtttcctcttggtcatggtagaggctattagtgtgcttttggacctgccctagaacctctcgaagattttctatctccacattatcccccaggtcgacacgtgattctcaactgaaggttggccagtccaagctccaacttttccaatgtacgacatgctaatgtttctgaactcctacgcaccaggagtaaatctgtgggtctcaacagtgaccctggccgaggtcctgacctctgtcactttggaaattgggtcaccgacccttgttcccattggggcactgttgcaaggtagcaggcacacattgggattgtctgtgttagtattggtaggcccctggacatttggatcagtggccatcgggtcatgtggttagtgggagaagctctccttgtttgaaccattgtttctgaatcgaagatgattcaaaaattgaggaaatatgaatattttgtgtagagcgaagtgttctttgctctcaatgaaagtactaaaatgttgatcaatggggcaaaaaacattaaatgtgatccaatgaactctcctaatttcaaacataagattagattaggttcccaagtctatagttaactcctcaaaatgggagttcgaatgtgccctctaatctcgacgaccattcccctggtgaggccttggttggttattgggacgttcttctggcccataggtgggaccctttcccctattattattttccctatgtgactgaactttagtttgttacccccagcttgatgtggaaaatgtttgataacttatgtggcctatatcgcatgacggttaatttcatcttgttgggcttgcatctcttgggcggtacgatccatccagtcctaaaactcgcatcgctgcttatcgaaggcttgattcatggtggcgcgcatttcctcctagtcatggtggaggttattggtgtggttttggacctgccctagaacctctcgaagaatttttatctccacattatccctcaggtcaacacgtgattctcaactgaaagttggccagtcccaactccagtttctccagtgtacaacctgctaatgtttctcaactcatacacaccaggagcaaatctgtgggtcttaacagtgacccttgttcccattggggcactattgcgaggtggcaggcacacattgggattgtttatgttagttggtaggcacctggacatttgcatcagtggccattgggtcacgtggttcagtgggcaaagctctccttgtttgaaccattgtttctgaatcgaagatgattcaaaaattgaggaaatatgaatattttgtgcagagcgaagtgttttttgctcttaatgaaaacactaaaatattgatcaacgaggcggaaaacattaaatgtgatctaatgaactctcttaatttcaaacataagattagattaggttcccaagtctaaagtacaacgcctcaaatgggagttcaggtacaccctttgtgtttcaggatacagaaaagttcttttgtctattttctttttgtatgattgtgtacgttatagttatttaagaccacttataaattttcaaaaaactctaaatttttgatacagtagaactgttgggttttatgccc

SEQ ID NO: 238941 - DNA, 3086 bp, Cannabis indica
gtaaaataatttccaacaccgggtccccagttcgtgttcagaacctgggtctaggtttgggtctgggtctatgtctcgggtctaggtccaactcgagtctccaggtccgagtgtctgggtctgagttcgggtcctgcatattagaattcgggcctagggtcgacgtctaggtccggtcccaagtctaggtctggtcctatgtcgggtccaggtttgggtttgggtctaggttcgggttcgggtctcggtctgggttcaagttcaggtcctgggtctgggtttgtgtccaagtccaggtccttggtctagggttcgggttcgggtttgggtcccgggttcaggtctgtcttcggtgtctagctcctaggtcttagaacctaggttcgggttcggggtccgagtccgatcctgggttcgggtccgaggccccacattctggcacccgattttaatatattaaaagaaagaaacttaactcaagactcagacacggacctggactcggactatccccgggttcgggtctgggtctaggtcccaagtccagttctaggttcgagtctagaattaagtttttttttttaatatattaaaacctgattggatcagatccgatctggaaaaaatttaggcggggcgaagtgcatctgatctaaaatccaataagtatccgcatatttcggatcagaagtgatctgtcagatcggagctccgacccgatctaactaaatgaatttttgacatacctatttggagttattgaatcacctctacaattgagaggggatgtgaagaaatgaacctattatatatgcatatttccgttatcgaatgtggcccctctatgaacaggtggctcatttttagtgttatgtcagaattgtggatccttaagacaattttaccgttgctattgtaatgagtgtgtatggaatatttcctttttctgttagcaattactgctagctgtaatccagccataggctcttgttgtatttggcattttggcctttgattataaatggcacctctctggctcaatgttaaatgagctgagattttaaaaatagttaaaacttttctagctatcctgctaactgctacaattgtctcaataaagatggatagagaaaaagtaagttgtttgtgtagtgaatgttgtttaaatgatatagtcaatttttatgttctgcttgctttgtaaagaagtgtggatgtgttatgagggatggatgttctactatcaagatgtaaaagttaaagctttgtttgcgaagtacattctctcactggagatctaagaaaacaagaagcaggaagaggaccaaaacaagtgcactaattttattcttgtcaaatttaatatgtgtgtgtttttcaatatgggtattgaggtgcatgtcactgctgccttagcatatgctccctcccagttgagaaatagtatattaaaagaaaaaaaaaatttatttttgtccatttgtttatatgaaaaatacagtttttcttttcgagggcaatatatgaaaaatactgttgtcaatgttaaattgccatgtcatattccacaagagtaatagttaaaaataaatcttctaaaatatgacttcaccaaccaaaattaattttgtcaaaaataaatttgcaaaataatgtattcgacaacactcaacatgacatgttacgttggtgtcgagttttgtcaggaatattattttgtaaataattctaaaacacgtttgaaaaagtaacacaccatggacataagttattttttgagtaaatttcttgaaagaagaagaaatacacaatatttgatgaggctgatctattctttcatttaacaattacagttgcaaagataactaaagaaagattaaacatctttccactgtggtatatcagccaattatactcacacatttctacttacaattacactaacacatgaaaacatacaaacttagtatggtacagtaagtgccattgattcttggagtaaaataactggcctaatatgactgtttaaaccttagctctatcaaccccttatgagggtgaggccaatagctgtgacaatgattgtggatggaagaccaaacttgagatgagtccagaaagagagtgtgtagttgaaagagggagctcgacgggcttgctcacacacgattagattagcagccgaaccaggtagggacaagtttccagcaactgtgctcacccaccccaagataagccatgattttttcacttcatgtggcgatatggctgctgccatggctgctactcttcctccaagtagaagaactgtaaaaacatgtgaagatatgagatattaaattggagatgtatgcttaatgaaaggcattgtacgtatgagaccataatgtaatggatcaggaagtttatatgaaaacattaaggacctaagaactagtctttgtagtgaactttattagtatttaaaatgaatctagttatttcaaaagattatttgtatatggcctttacaacttcaattatctactcaatttttaactcattttctccaggaataagtacaggctttccatacaaacaaacaaacatataagctgaggaagctgataataaaggaaagattctccaattttgcttcttttgtgcaattgcaaatctaaactgaatttaatatatataatataaattatgtatttgtgtaaaaaaaagagtaggcagcagcttaccagttggtacatttgaagcaagatttgagaggacaagtatggcaagggaaagtactaccattcctgaaacatgatcaatctcagaataaggctttatcatgttccagagagtggttggtattccagttttgttaaatccttcaacagtgatgaacattccacaaaagagtagcaagagagagtaggaaacctgattaattcaataagatattaaaaaaatacttagatatgcttttcaaatttaaaacttgtaactcttgaagagggaaaaaacagtggcaaaagaaagttcaccttttcaaggcacggcccggcatctttgaaatcaatgacaataaggagaagagatgctgtaatcac

SEQ ID NO: 238942 - DNA, 2371 bp, Cannabis indica
atgacacctttataatctcatcctatacaagagttgaaaatactctgttgctgagattgaagctttgcttctcgcttcttagtcgagaatagaaaagtcttataaagaaccatgatctgagtgtgaatcttgctgctgctacagaacctgatccaaatatagatgttactcaacttcttgaagctaatcttgctcacttcaatcataatttcagcagttagagcacttatcgtggtcgctttcataacaattttccttttcacttttattctaattagtctggtttctatgataaataaggctctcatagtaatccttaattatggaaacatgtcacgaggaggattcaatactggaagaggaatctctcaaggtggtagatccacagctcaataagaggattcagccagctttgtcataagcttgaagaggattcagccagctttgtcataagcttagtcacacagttcttgactgtttctatagattcaataagagctttacaggagcttttccaccatctgagtctccctctgttcaagaaaatttggctcaaacaaattcaattggagatagcaactggtatcctgattctggaaccaccaaccattgtactccagatcttcaaaatctaatgaacaactcagattatggtggatctgatagactttatgttggcaatggatcaggtttgtccattcaacatactggcagctcttttcttactcctcgtgcatcaggaaagtccttagttctcaataatcttcttcatgttcctaaaattactaagaatttacttagtgtttcaaagttttctgaggataataatgtctattttgagttttatccccatgtgcgttatgtgaaggatcaggtgaccaaggaaattcttctaactagaagacaccagcatggcctctatacttttgatctccattagtttcaaatgcagccttcccctcaacacaaagattccttggtgactgctgcaaattcttctcagaaagttgttcttacttcctcagcttcatccaataacattgatggcttggactctgccataactgagacaagtagcaataatgaatcttgtcccttttataatgaacattctttttctaagtttgaattgtggaataatagactaggccatccttcaaaaaaagtgatgaattctatattagcatcatataatatttttgtggaaaataaagtgtcttcctttatttgcaaagcttgttgtttaggtaaaattcacaaattacctttcctaaagctgccaataaagtttattctgagcctctacagcttatgtctctgatctttgcggatctgcattcactgtttctcataatggatacaaatattacatgagttttgtagatgcttataccaggttcacttgagtttacttgcttaagaataaatctaaggccttaagaacttttctgaatttcaaaactgagacagctagaattgcaaattgggaaaaagatcaaagtgctacatactgattggagaggagagtttagatctttcactgaacctcttaaataaattggcgtcatacacagacatccttgtcctactacacatgagcataatgggttgtttgaaagaaaacacaaacatattttgtagcatggtctcagccttcttgcacatgcttccatgcccttagaatattggtacgaggcttttaggtctcctgtttatttacacaacaggttaccaacacctgtccttgggcagctttcacccattgaaatgttgtttgagataaagcttgactatacaagtctaaggacttttggttgtcttttctatcgtaatattagaccttattgcaggacattattttaccaggatctagatttactaacatgtatgttgattataatctataatataacaccctaaatatgaatatcccaatacaatgaaataaacacatgtaaagtttagaaaaacttacattgattgcagcagaataatatgactccttccgtttagatctctagctctttgatttcttttttgaagcagagcattatcaagatctgaacttggatcttcactcctttagtttggttaaccacaatctttcacactatgattgagtacaattgacttgttatgagtgggcatggtactctatcactaaaggctcaaatttgattaagaacaatagaaggaattcaaaatcactatagaatgagactctcatttactagttgtctgacaagaatgaaaactagcttaagatagatggatgagaatgagagtcatcttattccttttatagtatttgaactagggtttaagatttaattatttcgattaaaaaagataaaataataggcaaaaatca

SEQ ID NO: 238943 - DNA, 3590 bp, Cannabis indica
cacacagatgctaagcccattaacaattgatcaccaacaacatgggctaacacagcaaagaactatccaatcaacccaagttttaataaaaccaataaaatttaatgtaagcccaaataaaagtctaacatgaaggactccatcaaagctctgaaatcatgtgagaggttaatgcctatggcggaaaatttagggatttcacagaggtgcattaactcaatcgcttctagagcttcatccgctgatcctactctgttcggttggccggtaaatgacggagttggtgccactaacggcggccgagattcttcgaaccagaatttgtggaatgggattgagaccaataggaggagaaaaggactcgctagagcaaccaatgcagattcatggttggaagagcttgctatattgagtttaccattcttcaaacgcttaatctctgccatgaaagatcgagatctaagccctgacatgatcgagagctgtttgattcattacgccaaaaaatgtattcctggaatttcgcgtacgaatcggaagccatcatcgtccacgtcatcgtcttctttgatagtttcagagaacgaacagaaagagcttttggagaccgtaatttcgaatctgccattagagaagagctctagcagatcttccaccgccactaggtttttgttcggcttgctaagaacggcaaatatattaaacatttcagaaactagtaaatcgacattggagaagaagctcggttcgcaactggagcaagccactctcgacgatcttctaatcccaagctactcttatctgaacgagactctttacgacgttgattgcgtcgagagaatattaaatcacttcttggaaggattacaacacagaaatacagatagaattgaagatgaagacgaagctgatgaatgtgacgacatcagatcaccagcgttaatgctcgtcggaaaattaattgatggttatttatcggaaatcgcctcagatgcgaatttgaaacctgaaaggtttttcaatctagctatgtctctaccagatcaggccagacttttccatgacggtctatacagagccgtagatgtttatctcaaggtatatatacatatatatacgtatatacatacaagtatgtatagtcattcaaagctatgcaaattttggtcgaattctgatttattattataattttattttcgttagtctcatccatcgacatcggattccgatcgcgaaaggatcagctcagttttagattgccagaaactcacattggaagcgtgcacgcacgcggctcagaacgaacgactaccacttcgcgcggtggttcaggttctgttcttcgaacagctccagctccgccacgcaatcgcagagaatctaatcgccgtggaagccgcacaaaccgacgccggaaggccatctgttctacgacgagaacaagaagaggctgaagaagtagacgaagacaacgaaaacgaagtcgtcgaagaagatcatcagctaccgcgagcggtggctcacgacggaggaggagtagtgaccaacacgtggagagcggcagtgagagagaatcaggtgcttcgattggacatggatagcatgaggacgcgagtgcaccaactggaaagagagtgttcgacgatgagaaaagtgatcgagaagatcgataagaccgggccggtcggagaagaaagcggcggcggcggtaacggtggttcgttggtgaaagggtggagaggatcgttgacgagaagatttgggtgtaagttcaagactcaggtgtgcgattctcatgaaccttcggttgtggatgttcgtaaaggaaacggaggaagacgactccaccatcatcaatcgtaggccctacctcacacgatcataatctactcgccttgggtcccatttatgtcacacttttatattataaagttcaaaatttataaagcagagctgtaatccataatttcttctttctcatgctgatgatgattcactgttccctacgtctaaattggaaataaaaaaaatttcaaccaaatagtttcactactattacatgattcatccatatccatatatcactaatttatgaactcttctattgtctactaagtgttttgcttcttggctatattggatgtttctatagtcataattctaagcatgttgttcaagaagtgggtatgttttgttgggcaatttggagaatccgaaatgataagaatccggttgttaatgaaggtttcgtgttaacgaactctacttttgatcaatggattaatgctagttatgttttgatcaatggatttattctctaactaaggttcttatggggctggtatggttgcacgagatgtttctggccagcttattgaagctcgacaaatctctaaacagggtggttgaaccagtagtagcaaaggtggattaaagagaaaggtggtgctagagacggatttcctcgcttcgatattggccttacgaagcaagactcgtatgtttttctccatatggattgatcattgctgattgtaacaggtttttatctttgttaaagaatgtgattgttatctttgttaagtaattagcaaataaggttgctcgtgcaattgcttgcaattcttatttatatgttgtggaatagtgctttgttccttgattctagaagttctcgtatacgctctcaaaagcacttatacttaagttgacatggaaatctcgctcatgacacagtttgttaagtcctaactaacttaacaacttaactgcagccaccgactttaaaatcttgattctaagcttataaataccattaatacttattatttcagacacgacgatcacattgagtcgagagagagagaacattgaaagtttgaaaggaagaaagagaaaagtacatagaaaagagagagattggggttgggttctgtatgaataatcttctgtagataaaaaagattcttaggtaagagtgtgagagttgaaacgctttgagagaatcatcaaaaaatcttctcgaatgtattgtacttattcttactcaatcaataaaggagatttggtgctgattttatcattttttgctttgtttccatttctagttttgaatattgttcatccctgtttttctcctctaattgtttgattgtttaaagtttggttaatttgatttcgcaccactagtagtaatttttccacaaatcagagcttggtaatcgatcaagaacgcaaaatcaagattctttccactgtaattcttgaagaaactttaaatgtcatcaatggcgagattcgaattagaaaaattcgattgaccataaggtatccaataagaaacttttggccgagaagaaaccagagaaaaagcatgaatgaaggagatggcctattacacgatcaatttagagcaaattgggagcaagttggaagaattatacttaaaaccatcaattgctagcaaaatcaatttactagaaaggttatatggtttttctttgaataaaaacatatttataacttctccaaaaaaaatttaaatcaaaaaaaaaaaaaaacttagtttaacttttatttgaaaattc

SEQ ID NO: 238944 - DNA, 6204 bp, Cannabis indica
aaaaaaaaaaaaaccatattcttaataataaaaaaaccaattatgaataccaaaactcatacataaatctaacacaataccaacactaaaactagttaggaatttctcttaggtgcaagaagactcaaccatagggttggcccttagatataatgagtcataggaaaaaaaaagtattttgggcccttatttagaaaaaaaatgtggacccttattttaaaaaaatgtggtatttttcaaaatcaataaaaaaaataaaattttaaaagtagattttgggcccgtaggctaggtgaatcctaggcacagacctagaccgcctatgcctagggtcgggcccgctcaaccatcaatccactacaaaaaacattcactatccactaaaacaaaatattagttgcaaaaaaaaggaaaaaataaaaatgagaatatttgtcagagaatattcagtaaaacaaccataactcactcaatattaattcgattgacgtgatttaacttgcattttgaagctattttaatgctctaccaatttatgtctcacactccaatcacaattctaaagttaccatgtcaaaatttgtcttcaagctttcagacttagctatttttcttgtaatcattctcatgagaataaaatctcgaagtagacgtagctctattattgtcgcaacacatggagtgaattaatataaatttttatatgtgctctctattttacgtaattacttttaattttcatctcgtctatacatccgatcgagttgattagatttctctatgaataatgtgtaattactaaaaatttttcattttaaatattaagtactaaaaattattatttttctatataattactatttattttgccaaataaaatattataaattcataaataattactatctcatatctaagtatatcttgttttttaaaatacaatataatcattgctaattatttttttttaaatataatataattactaatatattgtagtaattacaaggacctagtaatccaaacacaagccaaaattttctcaacaattaaaaagtatattttatgacaaaatgtcactagatttgctttttctaatgataaaaccaaaaaatttattcttgttacaatataaatgttaaaaagattgtgtaataatattttttcttaaaaaaatgtgtgataataatacaaaaaatctctaatttatttttgattaatacatttctttcccaaaagaaaaaaaagctacatatatacatttaaaaaacttaaatcataatattttattatatgtcatatatatccctcttgtctcgaccttgcttcctcttcttccttcgctacaacccagaagaagaagaagacgacgacgacgacgaacgaagaagatatcatttgccggcggcggctcacaactgataaccactacggacctcttcgccttcctctctacctctcttttgctctacaacataatttctcaacaaggaacgtaaatttggatcccaaacctcaaccaatttccccctaaaattaacctagggtttcattattttctctctgaacactcatctctagccttctcgatcgtcttcttctgctgtctgaggtgataattgtattttttttccttatttactgtgttactgtgttgtgctgtgaaaatgataaattttgagggtggtaaaatgaaatttgaaggttactacggtgctgtgtttaatcataaagattggttcttgtttgttgaaaaaggtatttcatttcaattttagctgtaatgggtgttgaacggatttcaaatattggttttgttttgtttggatttatgctattgggctttagtttatacaataatcttggtgaactgtgtttggttcttatgatatcttcattaggttgttgttgttttgtatgtgcgtgtgtggttttcagataatattagccaaagggttgttgatattttatttacaaatttttggtctggttggttttctaagagggtagtagtgtgtgcagaaattgatgtgattataatacatgcgaaagcagaatattaggggacaatggctgttcaggctcctgctagaccgagtctttgtgatgaggattctgatgatgaaaagcctttaagttttaagaggagtgtttcaacatccaggcagaaccaattgaatgcagaattaaagagacctgttttacagaggtccgatggacagtcagcaagaccggtttcggaaagaatgggtatgaatggtataaactccagctcccaaaagggtaaggtggttcaatcaagtaagacatcatcagtggtgaagtcccccattggcagtccaaaagcttcaactgtaaggaccacaccagtgaagtctccagtagcaaattcaattacatctaattcgttagttggccagtctaaatctttatccgaaaaaaataagtctagtgttgttaaggaagaaagaagttctgccaaacaacctataaaatcggaggatgactctgaagatatggaagatgatttacctttaagtgtacgagtaaagacaagtcagggcaataagagtcttaaaaatccaaccactggactgccaatgacaaagagtattgtcaaaaaccccaaggacgactcggatgatgagcctttggtcaataggtttccgaaatccaatgcgggaacatcaggtagtaagccttacgatcgtggtgataagaagccactgttgagtacaagtaaacagaatggttccaccatgacagatgggaaaaaacctctaaacactaatatgaagaggcctttggatagggaaaaagatgcttcatcggttaaaaagccaaagctttcagattcacctgcattgttgaaaaataagcagccatcagtgaagacagaagatacttcttcggttaaaaagccaaagctttcagattcacctgcactgttgaaaaataagcaggtatcagtgaagactgaagatacttcttcggttaaaaagccaaagctttcagattcacctgcactggtgaaaaataagcaggtatcagtgaaggctgaatccaaggtagatgatgaggatgatgatgatgatcatgttccaattgcccaaagaattaagaagccacttcctgcctcaaataataaaacatctacctcgaagcaaaaggtcacaaaaacaatttcttcattcaagaaaaatagcaagtttaaaaaggtggtgaaaaattcaaaatattccaagtcaactaagttgtctcctagctctggtgatggccagaaaaaatggacgaccttggaacacaatggtgttattttccctcctccctaccaacctcatggggtaaagatgctttacaacggaaagccagttgtcttaactcctgcacaggaggaggtgggttcttctaagcccgttttttaaaatgtcttttatccacagtttttatattttaatgtcttgaattattgattttgtttgttatttatatcttttattaaacttacctttgaactgtcatctgtgcaggttgctacaatgtttgcagtcatgaaagacacagaatacgcacttaaaaaggtcttcagagagaatttctggaatgattggcgaaagttacttggcaaaggccatataattcaaaaattagacttatgtgattttactccaatatatgactggtaccaaaatgagaaggagaagaagaaacaaatgagttcggatgtaagttttgtaactatgaagctttcacatgttaacttttaaagctgatcggatctcttttcgtataatatcagttctcatcgaggatccaatcaatactttttattggcttccttaattacttgtgcgcctgttatagattttgaaaatgtagaacttttttttgtgacgcaggagaaaaaagccttgaaggaggaaaaactgaaacaagaggaaaaatatatgtgggctattgttgatggtgttaaagagaaggtttaactttttttttctttggtaacaactctggtgggggtaatgggttatgggactctaaccatgtgataaaaaaaaatataggaggttcttgtttgatctccttcatcttttagttcagctgcatgctttaagggttgtaagagaatgtgttttatcttatttgcaatttcaggttggtaatttcagagttgaaccgcctggattattccgaggtcgcggggagcatccaaaggtttgttcttagttctgcatatacaatagtcagtgtaaatttgtattgcatctgcacctttttttaatctatattaatgtttacttccttttgcttttaattctggtttcagtctggaaagctgaaaagacgaattcggccaagtgatgtcactataaatgtaggaaaggatgctccagttccagaatgccccatccctggtgaaaggttttgctcttcattattttgccttttctttcaagaaaagataatagtaattttttttaaaaaatgcctctctccccttgtgtgtgtactggaaaattcacatttaaatttttggcagttggaaagaagtaaggcacgacaacactgtaacatggttagctttctggaacgatcccatcaatccaaaagaattcaaatatgtgtttctggcggctagtagctctttaaaagggcaaagtgacaaggaaaaatatgagaaagcaaggatgttgaaggtacttatgtagaaaattttgcaaaaggtttgggtagtgaacagtacatggggtaattttggatgcgataagatcatagagtgggcatttgtgtaatggtcaaatttcgtgtttcttttgagtgcagggctatatacagaatatacgaactgcgtacacgaaggactttacaagcagagatgtgacgaagagacaaatagcagttgctacctatcttattgataaacttgctctgagggctgggaatgagaaggtcggacaaccagtccaatttttatcatttacacagttagatttgtaattgtttctaattgaacgaaattttctttttttaaattatcaatggtatatgtgtgccacttgttaacagaggaattagatgggacaaagagccacacgtgacagctcttcagtttaacatttttgtcattgtttatttgtgcccttgttaaggaaaaagaaatattaaaggtgtttgatttatatttgttgctcgaatctgctacattgcatcatttaacttgctcaacatgtttctctacatcatctttaagttcccctagctgttaactgaaggcatcactgacattatgatctcatgccttgcaggatgatgatgaagcagatactgttggttgttgtacattgaaagtagagaatgtaaaaccaataccccccaacaagttggaggtattgtggtttaagtttctgttgagttcattattttatttaattttaacacgtgaaactgctcttaattctactaggttaagtggcaatatttagttaattcttatttcttgacacacagtttaacttcctcggtaaagattcaatcagatacgaaaacactgtggaagttgaacttcctgtttataaagcaatcatgcagtttcaatctggtaggtatttttctttttaacaagtgttgctacacctttttcttttttaataattggtaagggagttcagatgactatctttgtttatctgctacttcagggagaaaggggggcgatgatctttttgacttgctggataccagtaaactgaatgctcatcttaaagagctcatgcctggacttacagcaaaagttttccgtacttttaatgcctcgattaccttggatgatatggttagatagttattttctcttattttttattttctttcaatgtgctcctagatttggttcaagtctttgttttccccttactttttacatctgcgttctctgataaatctcatgtagtttctctattgaatttgtctagtgatagtttatctcttgctagtcttattatcaaattttacttctagttttaatcctgacgttttcatcatttttatttatttattattttggtagttgagtcaagaaaccaaagatggagaccttgaaagagaaaaagactgtttataatactgcaaacaagcaggtgaaaataatttctcctcttacgaagtttcactgtttctccattattttaagcaattctcacagga

SEQ ID NO: 238945 - DNA, 1589 bp, Cannabis indica
gtgtaattactaaaaattttctactttaaatactgactactaatttattttttttggtaattactaactattttatgaaagaagatataaagtttttaaatacacattatattttaaaatataatgtaattattaaattatattgttacatcaaacctacccttaaacattttatcctaatttatgggagatgtattcatttagaaactctacttagagcataatagaattttcttaaaacctaaactacaaaataaagattacacataaaagataaaaaatttaatttttcttctaattttttttataatcccttcaatagtaaatacttcatcaaaatctcttcagagactcaatccaattataccattgttatcaatttcaaatgaacacttaaatttgaactttagatcttcaactaattataataaaatggaccaaaactatttattagattaatgaacttaaatggactataaccacaaattagttaagcataccacttacctaaacaaacttattacccaaaatataaagagattcaattactttttagaatttgccaaacacaattaataaaaccaactcacactgaaaaaacttttatgaaaaaatagcatattcattattagtaaaaagaaaagcaaataattgctaaaaaaatattaaaatatagggacttaattgataaaattaagtcaactactcataattttgaaaacaatatcttctttaaagaaataatatacgagagttgttgtgagtgagtgttttctggttcccccttcaaatttgattaccctctccacaagttataaattattattagtgaattgaaaatataaaaattttattatcgaaaaatatctatatgtataaaactagtttaatgatttggcacattaaatagaacatgatggatgtataaaaaatggaaataaatatttgtaatattgatcatcattagaattagaaaagactcttacttatattgggtaacctcattaattattttttctccttagacattaacaatcttataagtgatgtattcaaatataaaattttaattgatgatgaagaatctttatcacttcggtggttattgtttgtccctaaaattctcaccttatatatatctaacaaagttcaaacaaaaatgtcacactaattagtaattacattgataataaagaaaatatgtgacaaaaaaaatgaagacagttatgtaattgattaaagagagagagagtactcctaatgttgggcttctagctgactagctgtaacatatctgtgaaaaattgataatttaaaagagaaatgctaaagggcaccagtggtgcgtagcatccttttatgtgtcaatatcgctattggtccaactaagtatcgggtcctatataatttaatataatagtttttagagagtatcgctaaccaatcgcaacgctacatgtcgagaaggtgctaagcaccactggtgcctaatagcaatgctcaatttaaaaatattctttaaaaaaaatcagtttactactatttcaaaagaaaaaaacaaccggatcaattttttgtttttttttttt

SEQ ID NO: 238946 - DNA, 4041 bp, Cannabis indica
tatatatatatcttcgtgctttgcctccataatggactaacccaactttaatttctcactaattgttgtagatgtggaaggcatatataattatcataatgcgcacgattactttttaaaagaattaatattgcctgaaagtaataaaaaatagtagacatcatcattagtaatatttgagtatataacttcttattatttggtagttaaagtagttgctgcttctccctgaacatattgtctgtcgactgatctctagtgttatacaattttttgttttggtaatatatgaattctattttcagggctcaactgatattttacatgtttttagttttgttttagttttgaatatcactctctttagagatttagaaaattcgtaaccttattttgttttactacctactatctattacattatgatacttgttgttaataatcatgtacaattggcatatagcgtttgttatcaattgccactataaaagttgtgactaattataaattattattcttacccgtggctataaagtattagttataaaaatcacaattatagtataattaaatgtatttttagtcacaataattattgtgactaaaattaaattagtaataatttgtgtctaaataatatatttagtcacaaataacttttttattacgactaaaagtcacatttactcacaaaatattttgttgtgactaaaaaattatcactaaagtggcatttttttgtagtgtaccgccatttttgggaatgatcttccatttcgatagtattacacaatctttgatgtattcttgattaataaaatactgacttaacttctataaaatgaaaataaaaaataattaaaaaagaactttatatttgatacagttagtggttattaaaaattgtatagttagttaatcttttaactaactaatttgtctattgtaacagttaactaattcttcttacttcagctcttgtaatctcatttctataaataaaggacttctcttctttggtctataacttttgcagactattaagattcattgtattcaattgattcagttatagtttgtattgataaattcttacatggtatcaggaagtcgttgacagaagtcatctatggatcctccaatcatcgaaaacatacctcgcaccactactcaacctcactggcaacaacctcaaaatgttccttaacctccttagattgttcctcaacaattatggaatccattccaaaactctctcaactcgtcttttactgtcaaactcgatcgatcaaatttcttggccttgaaatctcaggtcattttgacagtaattggccatggtctggatgatatcttactcactggagtagctccaccaacttaactcatctatggaaatatcaatcaaaaatatgtggcttcgaagcgaaaagacaacctcttattcagttggctcagatcttcaatgtttgaaactgttttgggatcactggctcaatatagcacatcttacacggtatggaagaccttggagcaatgtttcttgactaagtcgaaggcaagaatcttgaaaatcaaatctcaacattcaataatcttgaaaggtgatctttctatctcagattactatgacaaagtgaaagttcttgtagattctttgccaacagtaggacaacctatgaatgagagtgatttgattatgcatcttctcaatgggcttggactagagtatgatcctgttgtagttcatctaacgagccttttcgatagtctctcatataaatccatccaatcgctgctcttaactcatgaaagtcatcttgagaggcactatacaattaatgacacttcttccaaattgactgccaatctctccacaagcactccaagatttggtcctagttcttattcttcttcaagattctctgcctataatggtcgaggctatagccaaggacagatcaatcgatccttaggaagatattctggtcgtggagcagctccctcaaggcccctgtgtcaagtctatttcaagagtgggcacacacctgtagtgtgccattacaaatttgacaagtcattcattactcccaaaattggggaatcacatgcttattgacagagattgatgacgaagatccatccacatacaactctcacatatttcaagatttttctcatgatcccaagcggtatgctgatacaagagctaacaaacatgtggtaataggaatggaacatcttgaatttaaaatcccttatcatggtaatgagtctcttgctatgggtgatggcaagaaactcaacataactcatattagtaaccactccttactcttcgcttctactccagttcatttatattctgctatcaaagttcccaaaataacgaaaaaaaacttgtcagtgtgtcacaacttaccaacaataatcatgtattcttagaatttcactcaacttgttgttttgttaaggacaagataacagggaaagtttttctcaaagggagggttaagaatgggttgtatgtgctgactaagttccttaaatcccttactctagtttatctcgagtgtcatctagcaacaaaggcatctagttcatgtaattcctctatttttatatctgtgattgtaataaaaaaggctactctacaagccttctcctcatgtatcaatcatttcaataataaagatttcttaatttctagtcctcaaagtctttaaatgaggtttttttatgttaatcttaatcaagatgtcaacatttggcactcaaaattaggacaccctactcccaataaccttgtcaatgttttaaaaaaactagaccttagaggctcattaaagaaccttaaattttgtgatgcctccaaacttggtgaaaatcataaacttccatattcattatccaacagaagggcctctgtgccattagaattggtccacacaaatttgtagggaccatctcatgttccttccaaagagggattaggttatacatacactttgtagatgactttaatcattttacatggatctttcatatgacacctaaatcttaagccttccctatatttcttcaattcaagaaattagtggaaaaacaattcaatttttttttataaaaaaaaggttcaatctgattggggtgagtatagaacatttgcctcttttcaagctcctaatagaattcaatttcaatactcttttccacatgatcatgagaaaaatagtagagctgaatgaaagcacagacacaacaatgaaataggaatgacacttttggcacaatctagtttagatctttcttattggtggtatttgttttagcatgccacctatgtcattaacaggctaccaacaccagttattgaattttagaccttatcagcgtttgattcacaaagaaccagattatggctttcttaaaacatttggatgtgcatgtttcccttatctcatgcaatataaccctcataagatgtcaatgaagtctgaaaagtacatcttgattgtctattccatgcaacacaaaggctacttgtgtgagagttcatttggatgaatttatatcacaagaaattttcagttcaatgaagaagagttccctgcacttgctgtccatccatccactcaggcaacatcttcctctcttaactctttttcctcaacttgtttcgccatactagtaataattcagcaaactaattttccatctccaattattattgaggtacaacttgttggtgaaacaattcaacaacctctagttaatgttggtattcatctcccatccgaaaatcctaggaactctaatcaaaaacctgatctgtcatctgcttttcctatgacttcacaagcatctacttcccaagtgcctgcatctaatccctcatccactcccaaatagaacaattatagtcattatcctttcccagtctaccaactccattttctatacctcaaaccatccaatattggaatatattttaccaggacctaaatttactaataagtatgtttatcaacatcctaaata

SEQ ID NO: 238947 - DNA, 5172 bp, Cannabis indica
gacccgtaatgagtcttgcaagtcaacaattgaagaagcgtggtcctcccaggatatggacccaaaaaagaagattaattgtaatctcaaaagaacctatcgagctttgcaattatggaacaagaagagaatctgtgacattgatcttataattagggaattggaaaagcgattatcgaagattcaaagccaacaaatttttgaagagttaatggaggaagaattggttattcaaagacggctgtttgtttcttggatgatgtaagaagacatgtggagacaaaagtctagagatttatggctgaaatgaggagatcggaacttgagattcttccatgtctcaacggttgttaagagacaaagaaaccagatttaggcccttcgagcaaacagtgcagactttgggacgagaggagaatgatttcaaacacaatcaattgctactttgaagacatgtttacatctagcaacctctcttttcctcaagagttgggagacctgttgagttgggaaacctgtttgttaagaaagttagtgaagccaattttgccattgctgctattccttccttcgaagaagttagagatacaattttcaatcttcatcctttaaaagctctaggtccggatgggcttttaagatgttttttccgcaaatactggagtatatcggggggaacttggttgatgttgtgaggaacatatttcaaatcgaagaaatgatacctggactcaactataccttcatttgtctgattcccaaagttgttcaccttgagaaaatcgagcaattcagaccaataagtctgtgcaatttcacatacaaggtggtggcaaagataatctcgaatatattgaggccctatatggatgggctaatttccctagttcaatcggcttttatttatgggcgttggatcgcgtaatcatcaattctcactcaagaactgatccataaaattcattcaaagcggggaaagggggccttatggtcgttaaactagatatgcacaaagcttacgacaagatagaatggagctttatacatagagttttagtggagaatggttttgatagcaaggtttgtcaattaattatgtcctgtgttcgaagtgtttcctactctgtgctggtgaatggaagtcctctcaagaagtttctttccacaaaggggtctccgccaaggggatcccctatcccccttcttatttcttctagtacaggaggtgctttcaaagcttattaacagaagtggaagttcaaatttgatccatggaattcaaattgctatatcaacaccgtctatttctcatctaatgttcgcggatgacaccattttattctcttgagccaatgtgggggaagcaaaagaattgattcagtgtttgaaggtttacgagtcttggtcaggacaagtttgtagcaaagtttagtgttctcttttctaaaaatctagatagtaacaaaaagaaagttttacttgatgctcttaaagtctctgagtcgagcggagatgagagacatctgaggaacttatttgttttcaaagaggaggaaaaaggaaggcaatcttaaattgaaatcaggaatgatgagccaccttgaggaatggaaaatgacgtttctttcttatgcactcatttaactttgattaaatcggtcgcatcttctttacatgtttacagtatgtcaacaaacaaggtatccatttctatttgccgtaacttagatgatctggtaagaaaatactggtggataggttgtgccaataaggatcgttttatggccttcaaagcctgggatcaaatttgtcaaccgaagtcctctggcggcctaggcaccaaaagattcgaagatctgaatcgtgctcttctctccaaattggcttggtcagtagcgaaccaagaggacaagccttcggtgcaatgccttctaagtaagtattgttcttttgacagcttctgggtcgtgaagtcaaagagtaataactcgttcttgtggaaaagtttattggatgttagagatatcattctcaaaggttcaatcattttggcgggagatgaaaggttgatagatgtgtggaaagaaccttagattccgtggttggatttgttaagttttcaacatctaacggatagcttaacaccgaaaggatatactgtgtccttggtgcagacctttctattggtcacgaatggaacaaggagattgtagttcaaatttttggagaggaattaggaaacaaaatattggagattcctagaattcctttccctcgtgaagatcagactatatggaaggttaacaatagcgggaagttctctattaagagtgtctactgcctagatcaagcctatagatttggtcctcaaagagatcattggaagtgggtttggcatgtggatattcatcctagagtgtcagttactctttggagaattctgaatgaagccatccccatcaagagcagattaccgtttgttatcgataaggactgtgttgtgtggtgcaagtgaggaaacatgtttgcatctgtttgaagagtgtagtgtagcaaaagcgttatggtttactggggatttcccaattcttagtgacctgatacctactacttctatcctcaattttgctgagtttttgttttcctctgtccccatcagttacaaaactagaatggttctcttcatggggacccttctctctgaagattggtcattgaggaatagattaaatgtttttggagacactgttaatttgcattgtgtgagaagaaaattgttcgagtcttttgaggaagctttcaacctagtgcggtctgatgcaggtcatgctcctgatcctgattgtgctccgatcttgaaaggttcagggtcctagtgtgagagcagtatgggtgctactgcagtcatagttaacatcgcacaagattcgtgggcctatcacttatctcctgcttctgcatcttcatccttggaagctaaattaaaagcaatttagtttgcattgaaatgggctctacataatgattggctagatatctctattttcttcgattctcaagtggttgttcaagcgcttaagaagagaagccgcatacttagtagttttaaatttaattaagaagtttcatagttgctcttttgcctttgttaatcgtaagtttaactcttttaaggatggtttagcaaaaatagttagattggctaaccaatttgctggttcctatcaagagaagggaatttcccctgtgattcccatctctatttctattccttttaatgaaggcagagttctttcaaaaaaaaaaaaagtctatttctacacaaaataaatgtctttctttatccaagcacaccaattcaccgaacaacccaattattttgatacaagtacaaaaattagtgaacatgcaattcttcattgctactaaatatagaaaagcatgctgagattacactagagaacaaacgtgagtgataatagtgacaatccatcatataaaaaaataaaatgactttaagaagttgacaaaatttgacttacagtaaatgcaaactatcaactcaatagcaagtgtagagacatggaactagcctagtaaaatcatatggtaaaataaatgaaaccaggctaaagttcagataattagtagagtttaccagggaagaaaaatggcaaaaaagaaattagaaatatgccgattacaaatgcccctttcttctctgagacaccccttgatttctaaagctgcaggacctttattggttaaaaaatctctctttcttatcattaacaaaaagaaaacttctccaaaacctttctttaagaaatataagaaaacaagagacgtatcaatctctgtgaaacaaagaattgcctataaaacagcaaaaagtctcaccaatcagcttcacagctccaccgcactgtatacaagggtacacctcaacttattatagctcgaagcagaacgcatattattatctttcacattcaattttgatgcatccattgcataatatccttccgaataactccctcaaacctaccttcgaggtagtttgatcttaatccttcagtgcctttgacacacaagttccggtactgggtcatagtaccaacagggtttgtgactcgcatctgtgtaatacttgcaaagggtttggaccacacatttttgtatgaggaaaacagatgtcgttcagattcttgatttctggatgtttggttgttccctggagttttgacatggtttgactttgagtttgttgcctgttttgtcatggtcatgcttgagctagcacttgaggaggatttttcaaggggaccacggatctgagctgatggtttcatccgatcaagacaccgtaaaatccaattcccaagatttcggcccacttctatgtctcgttgttgtacattgtggtgaaccttaagggccacatcaaatacagcacgggttcgtcttttaagaaacaaagaaagaaagaaattaattatagcctttgcattcaaaatgcaagtccaagtgaaataaaaacgccagctccattcgctcttaatgatgttaatacaaatcacttaaaaatgatgataaattacaatgaaagagtattgtagacattgacgatcattcagactcagacatttgtagcctaagaacacatatagaccaagtaactgagtttatgaatgactagatgtcgtgataaattagttggcacatgcttgaataacaacttaactaagtagtaaaacatgtgatcaatttcatccatcaaaaacaaaatgattactcttacctaaaccatatataaccctagtaaataggttcaggacaatcagaataaattgatacatcaacagcacagtgacaacaagatagtatttcaaatgaaataatcacagcattatccaatactatttgaaacttggataacttaccttagctcaaatgaaataatcacagctatatgcaatcaaacatgattcacaagcaaaaaatcatttcagtacttgtaaaactagatagtatttcaaggatacataattggcttttataagttaagcaaattggtgaactttccattcatttcgattcaacttcccttagactggtaattgctacaagccaaataatgcattagaactctgcaaaaacacaacttgaatt

SEQ ID NO: 238948 - DNA, 3534 bp, Cannabis indica
aaaacaagatgcaccttgttgatatagataatatcaatcaatccatttaagccatcttcaactgtgtagtcccatacctacacagtctcacaatcatcccacttgacctttctcaggcggtgtgggattgcacagcttgcccggtatttatatatatataaaaaataataataaataaaacaaagatgtaatttacatatttcttgtggggataaaataataggttacacattcaggagtgaagaatacagtagaattaaatatcaaaaaaattctaaagccctaactgaaaccagtcctttttttttaactattttaaaaggccccaaatttaaatgttcagcatacaacaacaacatcactctgaatgtactgtgcctccctatttgctttccaatctttgctgattatcacttgtcgagtttggctattgagtcctcagagtcagaaccacaaaaatcagttagtcaagaaacttattataccgatagaaccagatttttctctttgaaatctactctcgcttcaacttcgattatttcccaccccgaatcttgctgtcatttcctatgtaaaacatgctttatagcctcgtgagttctgcataccaaacatgattaaagaaaatattataatcggtagtatttgacacgggcatagtaagaaacaaagagccaagaacattatcatcacaagttgctgctttttgccactaacctttgaattgagtcaagaatcttctatcccgagttgttcgagggaatttggaccaacaaggaatattcgtcttgatttttggtagcggaaaacaactactcctttataagctgttcttggtactccatcctgggaaattgaagaaaaaaaagatcaccaaccattcaaaactcttttatcacacaattggctgaaatgaaagaaagaaaggaatcaccttccactcctcaaaaataccaaactcgcttgcaatacgctcaaaatctcgttgatcttcatactttacgcgcacatccccaccaatattggaagctttcaaaaccaaatctcttccatggagaggtttagctttcttaactatgtcagcaaagtacttcacataattttcctaagaaaagaaataaaagttcagagagcggtaatataattaaggcacatgtcgagtgggataatacacacagtacctccatcaagtagctcaagtcccttgatttccagtcaaccttccaaaagagaaaaccttgtcagcacaaaacatgttaatgtaaattacagaacagcttttttaacttaccaggacatcattaagcttaattggctcaagatactgcttgaaaaattgtcccatactagatccctgtatctcgaaaaaaaacttttattagcgtgtttgcatttataggaggaatacaagcatctaaaaacattacaatttaaatttatttggtgatcatgcttcccggttaaattaaacatcgaaatacaagtcactatatcattgttggttaagtaggaaaaattaacagcagaaggatttataaggactaagatagatgtttagtggtggagcaggcaaaaaagaaaacagtaaagcaaacattcgaaataggattatgggctaaggccactatgtccattagtcacagatacatataattcagtggagggctgcatttgcaaatttgaagcatttctaataatgaacaaatatatacggatacgtacatgctctccaaagttataggttctacacacttcggggcgaataaattgtcgacctttgtgattctcttttaacctcaaccagtcatcccagtaagtgaagtgttgtcaaagaaaacttttcagtagataaataacaaaattaaaatgcacagaaatgtaaatgacgataattagacagtaatttagactctaataataaggatatgcctttggccacttcggtgacagctcatcccatgtatttctagcaagcatccatccaagcccaggaaagaaatccgagcgataaagtgcatctacagattatataaggtagcagatgaaaaatgaaatgattaattttctccaatatagaatatgaataatgtgataattggtaattcatttgtattacaggatggccaaaacaaaatagcagatagagaagcaaatattagttcagagaatgttgtaatgcggaagctgtatactgagtgtgataacagaaactagtgatgctaagataaactaattcctgcctaaagaataaattcaaactctttaagagagctcaaagataccaccgaataatctgatgcaaaaaaaaaaaaaatagctggtgctaacagtctctgagtctacaacagtgaaagctacaccaaaaataaagttttgttttccacactcacgagattagtacatgaattaattttaattgaagcaatattcagctttaattttatcctataatatttactgagacagggtaaagtttaaagggcactcacaaggatcatgcacaaactgcttttgtccattatcattccatgaggaaacagccatgatggacctgcaaaagttttgtaccacaggcatcagcaggaaatgaactatttatttcaacaatacaaaaataagaatctgatttcattataacgcatacctatctttatcgaggagatctgcagcagcctcaaagtaactaaaaaaatcaggagcgatttccatgtcatctgcgttcagtacaaatcaaattaccacacatttcttctatatactgaccgactatcaggagagaagaaaacattcgtagtggaaatagaatataaaggaagattcttttcaccttcgagtatgattactcggctgaaattatgcttgtagaacaattcgtccaatgcccatttgtaatgacctaaaaataataagaaaatgcttataatattaataccataactaaattaaaaggcttataataagcaaatcttacgtgcaatcttgtaatatgctatcaactctccaggcctttcagtctccactcgttcataatccaaatgctgcaattaattaaatccaagggtttaaggcagcctggattagatctagaaagttgttcataacaacacacatccaaaagacaagaataattacattgaaaatacactaccctcattataaaaatatggtcctgtggccttgaaacagatggaggcagagataaagaaaaaatcctgctttcagaatgttttttaagggaacaagatggtataaaatgtaacagtaatttcacaaaaaaaaagctagaacggagttgcttttttgttatttgcccctttatttccatcacttttaagaatcttaagatacttaaatctccatgtcatcagttgattgcttaatgatgaaaagcttcaaaaagaaaactactgtatactacagttaaccaataaggcactttgcaaacaaacaactgatagggaagacaaatgtactgaaccttttgctcaacatacaagactctacacatgttcacattcacacaaatttatcatc

SEQ ID NO: 238949 - DNA, 1637 bp, Cannabis indica
aaccatgcaacattaaatgttatttcggatctatattaataagtaaatctgattatattgaaatgagttttatttggggcataaaacccaacaattccaccccatatgaagcctgtaaaaggaggcttcacctttcattctaatgacaccaacaaaaagagtcactcactaaaaatctctcttctcttctttttctttatctttttcataagtctttaggtgatatagagtggaggtattaattcgagttcgttggagtacgtactgaaattagtgtatttttctacttgttagtcattgtatcgtgggaagtggttgctcacatcatctaacaccaatcaagtagagggggcaaatatactttaaggaaagcgtgattcaagtgcctcgatttttctttcaattactggtttttgcatcttatcatttgtatttatatttctgttcttcaattaattaataatatattgttatatttgtttatcttctctatttttatatttttatctaacaaaatttacgaaatatttatggagtgatgatatgatttatagtctatgtatgactttgttacatttgtatatgactatttaatcgtagtgcatgttcttcaatattttagtatcgtattgagtgttaatgttgctcaatatttttttaaaggtgacgttctacgattagttagtgatatttcttaaaagttatcacattaaattatatgtgatttgatatacttaattgcactaatagcaaaataatacctataaaaaagtacaagataccattaatatattttagcatttttcgcatatatgtatataaatatatttatatttattaacatttttttataacaaatggatattaacattgttgttatttttttttaattatattttgttcaaaaatgaacaaatatatattaacattgttggtaccaactcactcatgttatggttggtctcaaatctcaattttggtatcttacacgttttgcttaaaataaaatataacataccacattgttttcccatttataaaatatgtaccaaaaaagttaacaaaagttttgatacttcaatataaacaaccgaaaatccaccagctacataacttttatgatctcacacaccaaacctcatggattgagtttgaatttcataaacaacaaatcatcaacttaatacatataattccattggattgatttgttttcagatcaatctgttctttaaatttgtacgaatcaatttagtgcaattgaaattatatataattcggtgcacgtataattcttttttaaaaactgcattgatttgaaaaggtcacctaaattaaactaaactaaaccttattgccttattggttgcgtttctttctatattaattaattaaacaccataatgtgtttggtatgatttttgtatttattatttacttcagtaatggataatgttatatatccaataccagaacaaattgtattagattatattatatatataatttttaacaatacattaatacgttcgatattgtacaatactaactctcatctctcatcatttcctttgttcttttctcttttataatattttagtaagtggtggatcatttaaaaaaacaaaatgtaaaat

SEQ ID NO: 238950 - DNA, 3503 bp, Cannabis indica
atatttttttttacataactagcaacaaaataaaacaaactacaaaaaaaaaattgtatctataaaaaatatttaattttattttaaattgtatgtagaaaaaaaatatatcagaatagaatatacattttatctattaagttttgcaatataattgtattatatgtattagacttttaaattactatttttttttacattaaaatgttatttgtatatataattttttaattttgttataaatatgtgtggattggattggatcggttacttttacatgtcaatcaacatccaatctacacaagtgcggattttgaattttccaatccaatttaatccgaacaagtgcggatatccgcactttgcggattggatcgactattttatgaacaccctggagttgtataaatataatttagatattatattattaccgctaaaaattaaatttaaatatttatttgtaatcgagaattaaaattaaatatttatatagtaatttatcttttgtaagaataagtaaccatttacctattaaaagataaaaaaaaagaaattgcaaaagagcaagtaaaatcttccactctcgttttcttctctcaacacccgattcaactcacatttccacctcgccgactcttcccctggacttcaccggccgccgacttcgtctcttcttcaccgacgatcttccgtgcgtgcgttcctcaggtaccgtggtttatttttatcttaataattcttttctagatctgatctgattttcgtgtatgtgattattaggtatttttgttgcacaaattaatttgatgttttcttgagaaaatttaagtgaaatgtagaatttttttgtcgaattatctggacaaagcaatcgaattcggtaatttgaagcatatcaacatgcataacagggcaattgtgtattgaatttgaaacgtaccgataggatccgcttttgtatatttcgcctcgttgatttctttagaattctttttgtgtttttcttcatttcgtcgattagacagtttcattctctttttcttcttttttttttttttttttatgtatattcttgtgatgacagtttcatattttagtttatttgaaagatcattgttcttgctgtgtgttggtaatatattatattatagtgtttttctttttccttttggttgtgaaaaattggaaaagagagacaatagagatggaagatcaaagtgttactagttgcagtggcagcaaagctgttgctgaatcaaattcaattaccatagagaaatatcaaacatgtgtgtttctatttgactttgatcttgtttgctgaattgtctggttgtactttaatgttgatctttgatctatgcatgcatgcgtgttagtgttagtgtatgtaatattggaattttgtattttttgtgtgttggtgaatttttttctcattttcactgcttagccacactgcccccacccctaattttagggcttttgattctttggtcttgtaaactcatccattctttaaccatgtttatctttgggcatgttgcttttctttccctctcaatagcttagggttccattcacttcgaaagttaatggtctgaagccatagaattgttgtattagtatgcctgattttgaaagggcttttactaacaggatagagcaaaatccaaacatctgttattctttctagcccaatcacctcatgggagtcattacatcatagtacatgctatattgccatgtgcttcttgtttagtcctgaaatcaaagtttttgggtcattttgaggctcttagaaaagttgttgattgttgtcattcctcttcacaggacagacttcaaatttccctataacattcctgacccaaatatatgtatattataatgtaatacatacttggatttgtgttatttacttattatacttttccttttttaatcttaatctcacaagaaaaagaaaaatgcgggtttcaaaagtctgacgaactctaatttcttagaggtttctgccttgttttgcttacactgtttggctgaatgaatgaaataatccacacagaaggaatactggatatgtatatacacaccgaatattttttagcttagttcctgaaaggctgaaactgacaaaatgattgcaactaagttaacgtctgtttttctaattaaaatctcgatggtgataactgatctatggtttggttgtttgcttcggttaggatggattggcaagggcaaaagctagcagagcaactgatgcagattttactattagcatcagcagtggtgggatttggagctggttatgtgatgggctcgttccagatgatgattctcatttatgcaggcggtgtggttctcaccacattggtcactatcccaaattggcccttcttcaatcgccaccctttgaagtggttagaccctagtgaaagcgaaaagcaccccaagccacaaaggcagcaacctgtgatttcgaagaagaaatctaagaaataaatgggagctaggtcagtttgactgatcataataaactcgaacaatgatttttaggcgcttttttttttatcctcgagttgttatttgactgttctagcaatgtcaatggattttgttttaccaagacttcaggttcagtatatcaatagattttatcacttatcatctgccaattagtgggtaaatcttcagttgattttatttctatttgggaaatttgactaaatatgcttacataaccttaaaatttttcccctaaacttataattactaatatttgtaatctaggccaactttaaagttatcttcaaattacctttcccatttacatcagatcaaaaataaataatacacaaaagcaattggattcttcattggatcccacatcggacctcccattggatctatgcctcctacctcgcaaccttacagattcattgaacccatcagaccccatcggacttacatcggatgttatcggactttgccccacaatcacaggtttgacattctaaacctaaatctatacctaaatttaacaaaatctatctttaatagtaaatcacaaacaaaattaataaaaaactaaaaatacaaaatacgaactcacctttgacattgtgtccgatttgtccgaggaatctccgtgcaccataggttatgggttgggtcttactttggttatacgtgcgtcgagggtcgtggatagggtcgattggggttcgtcgtgggtctattgaggtgcaccatgagtatgagtgagagggaaagagagaaggcaaccctaatttgttttttgaaatgtgaggggtattagtgggaaaaataaaaatgttgacatatatggccaattttaatacatataggtttaggaaaataattttaaggtaatatatacataaaaaaatcaaatttttcttctattttctgttttttccaagcaaattaggtatgtcttttttacatgtagtacaactttttttttttttttt

SEQ ID NO: 238951 - DNA, 2084 bp, Cannabis indica
gtaagtttttattgtttttttttttgactcttaaattttggattttggttgaaagttccacgtgtgtacatataagtcatatgattgttgaattattttgattgacaataattttagttctaaagttggaatagaaaatgtttaggtaaagatgtttaatggtattataagaacaattactgatgtaagacattttcaacattaaggatgagctaatttattatttgggagctttagatacttgtgggctgtggctttgattattctgcaaaagatagtgaaataactatcaagaaaaatggcttggtactaggtagtcgtgaaggataaaaaaaaatagaatttctaataattagtgggaaaaactatttcaagtgagttgtgaaggtgaaatcaaatcacaaaaatattcaattaaagtgaaagagtgcaacaaagtggggaagactctaatttcatatagaagtacttgaaaaaagaaagcatcattgaaagattgaaaaatgtaaaaataagtgctcagttaaagtttaataagagagaaggaaatatatctttttcttgtgagtttaataattttaccggaccaagtaaatttctttctttcgttctttatttttctgagcttgaagtttattttttttccaatgctttgcgacttggcccacttcctttgaaattttacgtttttatgatttatagattggagaaagaaagaaatttgaatgatcgagaaatagcactattgtgaaaaatatgttgacttattctaaagagtaaagaggactgcaacaatgttaaaagatttataatttgtttattttgttgttggaaaagtgtttattttatgtagtatagtgtattttgctaaattagacataaataaaagtagtgaatctattgagccaaatcgttgagctcctgctctgcctggtacattttatggctttaatacccacctcttggttgtttagttttcaattgacaatgtgtgtgataatgtaacttgtttggatttagcttcttacgctttatactccaaatacagattaacccttccatcccgctaattgtcactggcggctctctgggagggtcaatcgcctcgctcttcaccttactgctgttagaaagcggtatctttacaaagaatgggaacaaggacaagtgcaaactactttgtatcacttttggttcacccctcattggggacagttgcctgcaaaacactctggctaaattttcatggaattcttatttcctgcacttggtctcagacaaagatcccgtgcctaggatttttgaagacctgaaaccgtttggtacatttcttttgtgttctgaatcagggtgttcatgttttgaggattccgaaaccatatcggatttgttggtggaaactgcaccctcacaggaggctgcaaatcaaaatcctattcaaggaatgcagcagttgttcgactatcaacaaattttagaccgcctctggggtaaggccttgtgcaaactcaactctaatgctgactcagcctcaagtcctttcaaggcaagcattatcacacagctctctgccatagggattacaactacacaaccccaggtagctaaattagtccaatcatgttttctttagtagacaaaccagatgtatgatgttattgataaactaatctcgtttcataattcttgtttctgaactgttttctgttttggcagcatgaaaatcagctgaacatagctgatctggttgagaagatggaaaaacagcaaagaaagttcttgatgggaaggaacaagtctttgattatgttgaagaaattgtctgtcataaaaatatttatggcatatattgaatggtacaaatattgggctaatgataaagaaattggatactatgatagctacaagaaaaaacttttcaaaactgatatggatgttgatgagttttgcaaaaaacttacaaactattggatagacatggttgacgaagaggagaagaaaccccataaaggattgttttcttctaagatattccttttggctgctacaaattacagaaggatggtggaaccacttcatatcgc

SEQ ID NO: 238952 - DNA, 1810 bp, Cannabis indica
atagtttttttagggtttaaatttttggtataataataaaaatttttaattttgtaagtatataaaatcaaaattccctctgaaaatcatttataccaagctatatcttgcaaagtatactaagaatgtggattcacatgaaaaagaatgttcagatagtaacctgatgaaacatccccaagccacagtcagagagatgagggttgagttcagcgtcaagcaaaatgttagatgacttgatatttttgtgtattactggtggagaacaaacctcgtggagatacctgaatacaaaaacgggacagttattgacgataccaaagtaaccaacttggaagattaccgtaatcatgcaatggacacaaaaatataaacttagggtgactctaagactaacctctcaaacacatcatgcagaaagtacaaaaaactaataaatacgaaaggaacctatcaacccatctttgagccttttcttatgcaaactagtacaataaagttaaacagaaatgactattaaagagcaagaggaacctaagaaagacaatagatttcctttttaaaataggaaatgaaaatatatatgatgatgatattattaaaagaatactaagaaagagacaacaataactagcagttgtgcttgtgagttgtaagattttttttcttggcagcatgaagatggacaatcaggtgcagaccaactaattatggaaacattactaaacagacacacaagatcctttaattccatatattcttgatgaaatatataccagctattatcaaagtttactagtaacaaagttaaaaacttaggatacttactcaacagctcgggcggttcccatggcaattctgactctggtattccaagttagtggtttgctgtactcatcagacatatgcaagaattcatgaagggagtcatttctgaaatactcgtaaatcaacatattatgcccttgctctgaacaataaccaacaagttcagcaatgtttggatggtgaagcttggagatgttgctaacaatttcagaaaactcgtctgattttccgcctttaaaaagcgaggaatcaatctttttaaccgccaaaacctaataattagacagaattagttttctctcactacttttaacaaacaccactttcttgagcaaatgttatcaaagtatatggttcatcaaatggctgaaaaaagattggccacacctctaccataatgaactcataaagaaacggtacggtaccaaaacaaaatgtgaaccttggtaaacctatattaggtacagactttgtacgcatctagtaactagtgggtaaacctaatgaggaaagaatgcacaacattaaacaatattataagtagaaatcaccaaaatataaaagcaaaagaaaccttgccatcagcatatttagctctatagacacgtccaatggatccatgcccaagaaggcgacctgatgcaaaattagcagtagcattctgcaaatctcctagtgggtgagctgtagcacgaagagaaatgcttcttctagcattcaaccgattagcaaattcagcctcagtaaatgatttctttcctgaagtatgtgcagttctaccgccgtttgaaggagacttttgaaaggaggcaatctcaattgaagtagatgatgacctaagatcttcgacaaacaattcattcagttagttggaactatgacgccaggaagtaagtataagataatttcatagaagcaatttctaatcattacagtattatgacagaattaaagtttatttctttagttatagaacattact

SEQ ID NO: 238953 - DNA, 2928 bp, Cannabis indica
taactacaatacataaagaaaaaaaaaaacttattaaattaatatatatgtataatggttggttttgacttttttagtcagtttaattacttaaaaaaacttaccgttcaatagtaattttaaccgttagcaattttttaagtttttgatttcgtcagtttcaattcggtaggtcggtttgaacaattttttttaatttcatgctcagtcttactggcaacaaattgcttgttcaatgggtatactatattatgtctaagacatatattaaaaatagtaccaaattcaatacaaaatatcgacatttagcacaaaatatagaactttatcaaattgacacaacaataaatacatatttttagatatagttttatcattatcattaataataaattttaatacatatttttaaattaaaatattgtcgttaattttttttttaaataattattaacaacttattactttttgtacatatttgaatattaaaatgctatatattgtgtattggatcaaaataacaattattgtatatataatatttatttatttgtactatatctacaatttacaatagagagatgatcttgaaagacaacgtgtggtagggttccccactaactacttataatcaccatatgtattatatttaaataaattaatataacaaatttaaattattctcttctctttttatttccaaaaacaaaataaaaagaagaaaataaaaaaaattagtagttatcttatcataagtgtggggtggctttctttttggaagagacttgcaaaagggtttaatttagaaaaagtaggagaaaaagagacctcatatttgatggatcctcatcttgttatcaaatgtgcattaattatatgatatagttttgagattgacctctatttttttttttccaaagttggggtcgaagtcgagacctagggtttgagctcaggttggatctttgtccagtcgtggtatggtcgagggtccacatcatattagggttggggccaaagtttgggctttggggttcaagttcaaaacgggattaggggcaggggcaaagttgacggtgagggtgagagctaggctagtgttagggtcttgagccatgggtctggggttcatgtcggaccaaggtccaaagttttagtgagtcgaggtgtagagtttgagttttagtactgtaatgtttaggaaatgagaggtggggtggaatcaatgttattatcacatatgatatgattgaaaatatatattttattatttcaaacaaaaattatacaatacattattattgaatatcaaacataatataatttaacccaacttattaatacaaatgaatatctaacataatattatattaaaataatattatacaaaacacactatactcaccctaagatattatccattttaaagataaactcagtatctgtaactaaaatatagggactgaaatagtatttttcttcatatattttatatattggtgtgtaaaattaaattattacaatcataaatgaaaagaaaatttgaggcataaatccttaattttttaatttgttactaataattaatcaaaattttaaaataacggtaaaaatactccaattattaatttcagagattctgttagtactcactttaagagctcagttaattatttctaaagatgtcacatgtcaattttctattagtcaaactctcatttttattataataatcatttaaataatatttaaatattaataaaaactaataaaaaaaatttaaataatataaaaattaaaatcaaattaataaaacaattataaaaatatatgttaaaaaatattaaaaagaataattttctttttcattttcattttctttccaacgtttctttctccaacgttgagttcctacccagcttcaaaagattcggtccctctcccatggcggtgccgccctccgatttgtcattcgaagatctgctccagatctaccatggcgatttgaacctaactgggtcttcttctttcgcaagtgccgatgcaccatcaatgttttggtggggactatggtcggtgatgatgagtttggtgtgtggaatagtgagttggggttttggtatatggttataactttttgtgaaaatgtattttttttagttttttataatctagttttaattaggggtgtacgtcggttggtttggtcggtttatggtacattttattcaacctaatgcaaagatcgggttacgaaaatctatgtccaacccatccaattaagaaaaaagaaaatagtaacctgcctaatgaaattggtcagtttggtcgggttaacccgtccaaacctaatatttttttatttttaaattcaattgttatattttagttaattgtaataatgagacaaatatatatagattgaatttaaagtttaaattaaccacaatataaaaaatacattagtttcaactttatattttttaaatagtcatgtaaattatatgatacgtaaatatatataataaaaaattataaatatatacaaaaaatcctcttaatcgagttggtcgggttagttcgggttaattgggcgggttggtattattttcaacccgcccaattcgtcaggtttttcggtttgtatttttcatcgggttatctcggtttggtttggactagttattcagtttgggcagtttacaaaagtttatgtacagtcctagttttaatattagttttattattaattatatttaaattattatttgaagtataatcttaattaatattttattattctcaatttttttatattttcaaatatatttaaatggttattaatatataataaaaataattatattgttaattaattttttattattttaaaaatatttaaatgattattaataaaaaaaattaatt

SEQ ID NO: 238954 - DNA, 2542 bp, Cannabis indica
tgcagttttaaccgccagcaacgggtggaagctacgaacatgggaaattccgtcaagtaggtgttggtaaagtgatcattcttgcaaaattatacacacccaaatccaccttttcccaatatttgacccctaagcccaaaatggaagagaatgtacactctttctagctctactccattgtattttgccatttttaaaactcttaattttctcttatttatatatatataaaaaaaaaaagggtgccaataaaattgtgagatatatttgtaaaatgactccaaaaataaataattttactccctttttaactcgaatgatataataatattaataataaataaaaaaaagttatgttcaaataaattctaatcctaatagaatttgaaatattttttttgaacgattatatttaagtaatatcggcctttattattattatttttaactttatattacatcttttattatctttttttattcatatttatcttttaaagtccatatacatcacgtaattaattttagtcgaatttaaaatttactgagatattcttaataacctactataatattcttattaaatttttagattttaatttgtaatgcattttgtatttttaaattttatttatttattgtatgtattaatatttttcttaaaaaaatttactgcaaaaatttgtgtcattattagagatttctattcgtctaatttttttttttaaatcaatttcaaaatatcgtcctcataatattgatataaataatggaaaataatctttttaaattaattaagttttacagtaaatgttattaggaataataacaatagataattatttataatgctttagtgacgccaccaaaccggacaaaattttgggccctcatttatggcccattacaaatcaaatgggctcaaaaactatagattgtgtacaatttgggcccgaaaatgacctattattattatatttcctttaaatgtttgttattactaaaagagttgcatttacattatggtattttcaaaatatatatttattctgtataaaatatgattatgtaaaagaatttttagtttaacagtatttataagagataaattcgctcaattggatatgcacgattcaccatgatatctcacttgaattttattgtacatataaaatacatatatataatcggtataccaatgtagccaaatagctagaaagaagatttcaaagattaaaatctcaaactctatttcaaaaattaaaaaaatacagtatttaactaaaaaaaattaaacatacatatattacacttaatattacttaattgaacctaattaaaataaaaaatttattacatgcaatatcaatctagtatatatatattgataggtttaaaagcagatgtatcactttcacaaaattttaattatatacatttaatagtttaatgaaaaaaaagaacacttgtaaacaaaacaatgccctttagtcaaggtttttgccctaaaattgtttaaaaatcaagagaaaattcaagagtaattatttatacatgagtatggaattactatataagtaaccttatattgatcaatttctattggattagtatgttattttcggttgttttaatttgattttcttacgttatttctgatgaaaattgatacaaaattgatgaagtctcgatactatttgaattgaattggatggcgaatcaaattattttctttcaaatagtcttaaactactttacattttcacaaaattaaataatcattgaatctaccttaatggctattgatgttttatcaaaatcatcaagtattaacacaattatttttctcacataagtatctcgatggccttcgagactttattaaaaaccatctaagctctcttacttatttatatgagtactcgatgattggaaggttttcttgcaagtcggcttatcttgtacaagctatggatagagctccccagtgtgacgtggccccgaatctttggaacaagctctggaatagcaaaattctggaaagacataagctcatgtggtggtgtattctgtctaatgcgctccctacaagggctgtgatcaataaaagattccacattgaagatacttgttgccctctttgtggaaacagggaagaaaccatggaacaccttttcctcacttgtgatgtggccatgcatctctggcgttcttctccatggggtttttatcccatttgtgagacgggtatccgggtttgggattgggtaaagttcatctgggacctaaacagtagaggcgtgcttgtgaaggatgcattcttgtatgcctccataaccgtggacacaatttggagggtacggaatgacaaagttcacaataatcgccttgttgatgtgaaaaaatgtattgatgatatttattttgtctatgctgatttaaaagatactttgttttctagtcctacttctcatctagaggaaacttggtcccctcccccacgggattggattaagctgaattgtgatgtaaaagtggggtt

SEQ ID NO: 238955 - DNA, 6508 bp, Cannabis indica
aacttgatactaaactttattaaaaggttctgagcacgacaatttaataaaaaaaagttactaatttaattaaattacttgctgcatttttccacaaacacaagattttctcactattgaatacaaataaataactcattccaatagaagaggaagaagaatataaataaaaattaaatttttggtttgtcgctccaaatttattttgtttttagtaaatgtaacatgtatacttgagttgtttaatctaatacagattccatttcaaaaaaaaaaaaaactaaatacagattaagaactacaaaaaaaaaaaaaaaaaaaaaagaaactcaaattcaacgttaaaatttgagtagatcttctaatgaatatgactagtattatctaaatcaaatttaacataggtactagcaagatctacttaataaaattggttttctctatgaatgaattaaaaacaaaacctttattcaacctttccttgtggccaatactgcatataaactatcaattacgttctagaagaaattattcaaagtttgagactcaattttccaagcaacttcaatttttcaaggtagaatcacatacacaggaataatgaataatgatagatctttttgactaccctgaccaaagctacaccacattatcaacacggcagaaaagccaaccaattgaaagccattttagcctacacatttttttcaataatcaaagattgaattattttgttgcattggaaaaattactcatcatcatttaatacagtcacattatttttaactactctagtttctttgtagctccgcaaatatttctgagcctcgttaactagaaagatactctcattggactttatttgttgaaactaggaattttcaactctatagaaaaagaaaattcaacaaagggacaaggaataaaccacaaaaaatcagcataattcaaaataagtatattttacggtgatgcttttaagctgaataacttgcaaactttttcctttttttcatcacaaaatatttctaataaaacttgacgaagacaagtgtaagaaaaatagcaagaatgagacatttacttgctccttcccatcaaagacggcaattgacttaaggccctatattaaaacatattgtccaataaacgacataaactaagtccctcttccatatatactccattgctcacacaccataatatcacaaacaaactataacctttctcaacaaagcatgcttattcaccaacaaaaattccatgaagctcacctttgttcttctgttctaaccttgaagatgcacgccagaccaagcagcaccagtgagcaagaattcgcattctggggtgatgagcatcctgatcattttagcagtggtggcagagaaccagagtttcaaggtaacgccaattctgaagaagaagaagaagaaggctttagagtttactcacctccattatggaagactaaccgttctagtagtaaaaaagaatctttacctttgcttccacataaccatcattacagtaatctctcttcaaattcaaggagacaagcaataatagatggtagaaaagagcttatggagatggttcaacacttacctgaatcttgctacgagctctccctgaaagatattgttgcagaggaacatagtttgcaggagggtgaagaagattcaagtactgttgccaaagatgagacttttgatgaattcaaggccaaagcaccacttataaagctgaatagaaagaaagacattaaaaaaggtcagataacaaggacagtaagtttggaaagtgaaacttttcttataaagtcattccttccttcatctctaggcttaaagaagaaagcaaaaagcgcgagagatccttcgatcaagtcatccgaggaaactgagagcgatatatataaagtggggtcaataaagagaatttttgttgcagggagaaggaataagatttgcagaaatagtactaatgggagcactagtagtagccacagtagcagcagcagtagcagcagcaccagcaccagcatcaccaggtatttggtttacaatttctgtggttaatcaaacataacatggtacaaatgctaattaaatcattttgagtgagaattagagaatatttggaagatatggagttgctagtccacaaaccagttatcacaaatagtattatttattgaaaattgttgtttaaatttagggactctgattgaactttatgagacaaatctaatggttagattctgttcttcctatatataatacagattagctagtgagatcgatttcataccgggttgctggtccttgttctctacaaggaaaagcaaaagcatgagagaaaaaggatgcacctactgaatgaggaagccctccaccaatccttccaccagatactaaccaacagtagaaacagaatatttagtttaaagaaattactgtaaccaacgtttgcatgtaaataatcaaaccatacttttttgttgatacatattgcacttgcaatgtaatagaatcaagtgaaaactaggatgattgagaacagtgaaagaaagaggattcccatgaactgttattgttattggttttttatttattttgtgtccatgttgcgaagttacaataagtgaaaagctaatatactaggaaatgaagcgtagctattacaaataataataaaataataaatcttggttcgaaaagtaaaatgaggtaccttacagcatcttcccagacaaaacctaacagaaaacaaatatcactgctgccttaacatctacaattggatttgagacagagtaagcatgactatggcaatttccagaaatcaacttatcttgaacatttttataagcgaaataaacacctctaagtatgtgagaactcaggagtaaagggtatttttgcaacatgcattacaagtaaacatgacacaagcttggtggaagctttgaaaaaaaaaaagaaaaaaaaagaactggttcatagctcaggcataaaactgagtagtacagtagtggcacataccaaaaaaaaactatttaggcttataaatatatcaagatgatggatcttttgatcctcttggtcccattacatatagacatgttcctttacagaaaaaatacgcctacagaatcatttcttcagaacttcagatgaaactacatctacctacaatgttttcttccataatttagtgttttttcgtaagtatatttcaacttcttttttcctattatattgctataacctgaaccttttgttttgtaaaaaaatagtgtcctaatgtcggatatcattgcttcttctcatcttcagtatcttcaatatcctgtagaaggacgccccggactctagccctgtccaattattgtaccattattcaggtaagaagaacttagaaaatgctgaaggataccagataataactcaccttcgatgtgcaggcacaacacgattggtaacctttgttgatactgtatctcgagctgcttgtttctctacattttaaaagtaggtgtattagcactaaaagcacacatgattcaagaaacaccaataaaaagacggtaatagacatctttatccacaaaggcaacatgagaacatcgcggaaagggaataaccctccataagaatacactgaaagattataattgttatttagacaaatttgaaagtttagacaaatttgttagttcattgcaaaatcagtttggtcatacatttaaagttaaaaaaaccttacaaacagtagtataatagtgaatacagagtgtgtttgtgataggatcatttgtaagacaatgaggatttaaaatgaaatgttgatcagtgtgctacttttggcaacccaaaaacaactcacccggagtaacagctttgtcagtggagttactcctctgtaactttggcctcttggactggtctaattgctttagaatgctttcattcttttcctgacaattgaagagaacgttttaacaatgacacttctgcaacgggctaaaataaagagagatcaacaagtacatagataatatttcacatatgatggtaaacagtaaatcttctttatgcagtctacaattaaatcctcagcaatatatttcatcaatgacatgttaccccagtcaacatatagcttctgcaatatatttccaatttttcacaggttgctaaaccctggaaaattaatttaactaatgacactgcttaagcatgtaaaaaaatagtgaaataatatatacattattgattgttgcagaaaaagcttgagaagatatccctgcaaaggtaaaaggaaactaaaaacatgatagacccaagtccaactcacctaaatcaggtacaaaaagaggtattggctggacatgaaataaattgcccagtgtggctttaatttgtcaagctaaatgatttagtcatttagagatagttgtgtggaaaagctgatttttaattttaggagagcccttatgtacatttaagtagctcttagttggggaaatggttatctgattgttgtgttgagtgagaaagtaaatacattctgtggatttaccaaactggcttgagtactttgggttttctgtattcttttctatgtaggaaataactaattagaatattatgagtaattttcttacgttattttagttttttttttttttttttgaaaaagggatagaggtcaaatgtcttggctgaccaccgtcctcatttgttgatagggccctcatataaggctgaggaaaaccatgttacaagacttaaagtttctttataaaaccaggagcataagtcctaagttacaattgaaaccatttaagcgtaaattgaaatgatggcatagctctaatgcagtaggtttccccactctctacaaagatctaagaaggaaagattctcaaaatactgacttaaaaatccatgaggctgcccagaatttaattttctcccacacaatctctgcagaagactctttacctaaaaaattcttgcatttctctcaccccaaactgcccacataatggctagcactgatgccttccatagagttgtcatgtacctgctcccttataccttactctcgatcatttgggagccaaaacgaggcaatgcccaaagaatcccaaatcccaagtctggagcataatgaccgacaaaaattacactccatgataagatgctgatctcccagctagctttacaacaaacacagcagcatggggataacactgggaaaggtcttctctgctgcaatttgtcgtggacgttcagttttaaccacccgaagactttcaccatggacaagacttttcaccttggacaaagcacaactcttccataaaaccttagcccaacccacctcgaccctgatgatgataagagataagaatgaaaaggcagactcgcaaaaaaacacaccattagactctggacgccaaactttgctatcctgcaccgcatcaatcagcaaaaaatattccagcatttgtgacattgcaagcatacttggcatctctccctccaatgaacacctcctaaatttgaaattccaacttgttaccagactggattccctgccctccctggccatcatatccttaatgtacacattttgagcttgagatattactgctaagttcggaaaagattccttcaaaggcgcatccccatcgaacatcttcccaaaattggattcgatcccccttccctaccctaaagtctaccaacaacaggaattcatatataataaattgtcaccttttttggaatcccacttattgtcagcttttccataatgaattttaataactctgtgccataaagaatttccttcaagcaaaaatctccacaaccatttcataagcagtcctttgtttgtcatatttaacctcccaaatgcccaaaccaccttcaaatataggttttacaaaccatctcccatgctaccaaacgatcacctcttgaaagatcttcgccttcccataaaaggtttcgcattaactttttccaattgattggtaactgcctttggggttttgaacactaaaagataattaattggtaatgacaataacacagattgtatgagtcttagtctaccacaccacttgataaaaatgcactcttctacccgtcgagacattttgcacacatagctagaattggttcttaaaattcccccttttcctaggggatcggcctaaaagcataccaagatacttcataagtaaacttcctactccacacccaataaaggcagcacacgctatcactaccttttctaccatgcctagtcccaacaactatcttttgggtacattaatttttagcactgaaatagcagaaaatacattaactatatccattaatactataagtgagctttgatcattgacaaagaacattgtatcatcagtgaactgcaagtgactaacttgaatcttttctctcctcaccattaaaacctctaaggt

SEQ ID NO: 238956 - DNA, 4661 bp, Cannabis indica
gataactaatcagattgtaaagagttttatttagggcataaaacccaacaggaagtacaatgaattcctagaaaagatacttgagtgaattagatggagaaggggaaatgtgtgcactggtgcaatcaccaacccaacatcctcagaccataaacttgcccattacgttcacggaggatgatgacaaacatgtatatttccccctataatgacccttcagtccttcaagcccaccttgccaacaaaagagtttccaaagtcttgggagacaatggaaacgcagtgaacattctatttaagtttgcattccaagcgattgggctcatagaggctgacttatcaccctatcccattcaattgcaagggtttaatggagattctcttatgtccatgagaaaaatatataagcttccaatcacactcaagggagaaaacaatgtatgcgccttcaagcgctgcaccttcatagtggtagattaccttacaacctgcaacgccatattagaacaaccagttctagtcaactttggggttgtgaattctataaggaacttatgcatgaagttctcttgtgataatggaagcattagagtagttagaggtgatcagaagagtgtgaggagttgttacaatgtttctgttcgaactgtgtttatggtttaggaagaagtaatttttgctaccaaaatggatattcaggtggaagctgaagtcgttcaagagaagtatgaagatgagttggattccaagattgggatagaaagagtaattgagccactggaggatgtaaaagaagttagaatctacgaagtggatcccaccaagatcatcaaagtgggaagaaacttgcatctatcggtgaaggaaaagattgtgaatacagttagggcaaatcaaaatgtgttagcatggagccattttgacatgaaggggatcaattctaacaccattttccaagccttgaacatcaaagaagacgccaagcctattcgtcagaaatggagaccactagattcggtaagggcaaaggcagtgaaggcaaatgtggataagctaactgcaaatgacttcctccaagtatcattgtatccgatgtggttggaaaacctagtttttatcccaaagtccaatggcatgtggagaatatgcattgacttcacaaaccttaacaaagctagccccaaatatttatttccctttctgtgaatagaccaaatggtggatgtcccttctagatacaagctactgagcttcatggacgactactctggctataaccaaattaaaatgcacgtcccgcatcaagagcacaccagtttctagatggataagaaggtgtattgttacaaaattaatgtcttttattttaaggaatgctagagccacgtatcaacgactggttaataagatgttcaagaaccaattgaggagaaatatggaagtatatgtggatgatatgctggtaaaatgtaaaacttccaccgagcacatcattaatctagaggaggcctttttcagtcccctaaaattatgggatgaaactcaacacaaaatattgcacatttggagtctcctccatgaaattcttgggttttattgtcaactcctaggaaattgaaggaaacctagagaagatcaaagaattcatcgacatgccttctcccaagaagcacaaggacatggaaagtgtcactggaagaattccagtcctcagtcgattcattttgaagtccatggataaatgcatcccattttgcaatgtgttgtggagaaataaaaaatttgaatggattgaggaatgtgaagaagccttctagaagttgaaggagcacttgactaaggctccaatcttattgaagctagtggaaggagaatttttgtacctgttgttatcctaaagtttgcacaaatgacatgacacttacatgtggcatgatccaaccaacctttttacctggcagacaacctccaggcaaaaatatgcttagcaggtccatacaagggtgatagccataaactgcaaatgtcccatgaagcatctggccagatcatctacctgccaactatataagatgagagaaacaccttgcaagggtgattctacaagccaaactcataaagaagacaagtatcgagatatctgactggatgaccaacatgccaaccaaatatagcactgccaagaatactggacaaagatacacgattcctggtttcgtcttcaccaagcttctataaatatccacaactgaatcctacaaactcgtattcagaaaatttatcagagaataaaggagatttaacagattataactccttttacgaactttaatgtaacaactctccccatataaatagggaaggcattcacaaggggagggagccaaaaaacctaagagcactttgctgaaagataatttctgtaaacactttaagagtcgtagctagaaataactttgtcttcctcaatgatctccctagtattatctcacaaaagtaatacaactaaaatgagagtaggtcattatccatatataagggggtcgaacctctttaatatgtgtgttcttttttatttattaatgattctaacctccaccttggtgattaatcgacatttatttgacttcgagttagttggctatttttctagccgatattttggtgttttcattgagagttttaatattccgcaaagatctaatcacctgctaatcactatggctctaacaaggaggaacaggtccacagagcctcaatatcaaatagttgtggatcctaatgtctaggttccaccaactggtgataacccgaccaaccttgcatggccacctaaggcagttccatctacaatgactagactcaacactctaattaatgctatgcaagatccaacaggtggcgggcaagtctcgaccaatattggacaacctgcccagagtaccatgggggttcccctgaccaagcctacccccaggtgtatgctagagaaaatgggctaggggttggccaacctggcagcaacgatctccatgtagacttacgggatgattctgaactggccaggttgagagaggtcgtaggacaggttcagggtcacaccaacatcctccaccatgaacaagaagaaacacctgctgttgtgagcgatgctttcacccagtacagatgcaaattccaagagtggatggactggcaggctgtgatcctccaagcccatcaggcagagctaaaccgctggaatagagaagcgaatgaactgatcaaactgtttaatgaatgggtcggcttctgattggaagaactaccactcagtagggatcccgttcaggaaaaaagtctctatgtcccagagggaactcaacgctctagggatcacgggaaagccttacgaccaatggggcccactgcatcccaaataagaccgactcaccattgacataatgatgatgaaatcctgcccgagagggcatatggcaggaatgaaaaattttaagccctacccagagattaagagaggaaggaagacatcccaccaaggcatggccaaaataggtctcgtagtggggaatcttaccccaattttaatgacgatggtgctactagtcacccttgtggtgagcacgctaatcggagaactcataataatatcgggcgcaataataatgttcctccccaaaatgctcaaacacgactattgttatactttctctgacacaagattagatcttgtcccatgcgccaaaacatgttagtgcgcgcatcccatacacctttttaccagacaattattttatgcatttacttttcaaggtgaaacttttggtgacacacgtcctgcacgaatggtgatcccccattgtccaggtacttcaacgtacgagcataatactatacaatgggtcaaatagtcagctctttttgcatgtaatttatgtaatttaccctattagtgggcattttctaaaaaccctaggcgggatattggcatatccatgatttccctttagcctataaatacttttctatttccatataaaagagggatcacaataatgatagtcaaatctctgctaaaattgctttaattgctctaagcactactacaaaaagcacatttcttgtcaatttttaattggcattaattaaaagttttgtcttcggttcccccaaccaatgtggatactgtagacgcaaaaaatatttgtatttgcgtcagttatcaatcgtcatttcaaagtattttcgccagttttcaacacttgcaaacaaaaataaaaaataatttttacacttatctcgctagtttataacggacacactaaatagacgcagtaaaaaaaaattcagatttgagcccataccaaccaaatttaagcacaatcaaaaataaaaataaatacaaatcaaaaatcagatctcaaatattacacaatataattacaaatattacacaatatattttacatgaaaattatcagatttatattgtgtaatgcacaaatcaaatgcttgtagagaagctgtcaccaaccatcgtcgctcaaactgtgagccaccaaccacctgccaaaattgagaggtggtgagagagtgctagcaacaaaggtaagaagagagagagagagagagagagagagagagagagagagagagagaga

SEQ ID NO: 238957 - DNA, 10273 bp, Cannabis indica
atttaatcaagttctccctttcctaattttaataatgtaagtaaacaaatgtaagggaatgattaccttactattgattcccattacttattagtaaacatgccattaaagtattggaatagcattccaatagaatgctctttccactattttggtggaattactattccattttaaaaagaaaagaatgaccattccaatgtaacaagaaaaaaaatttaatgattttttatcaatttttttaatgcatttaatgtgtttatttctgttctgatgtaatcttgagacttttggcaaatgtgaaacaaattgtgattgatttgaatctattaatgtattttttaggcaataactattagttgctgctctaaatttagagtaaaatatgattgctagatcaagcacataatttgagtatcgagctctctccttcgctacttcagaactcatgtggatccaatttttcctcactgaaatatcggttgctcttcatcaatgtcgcattttgtggtgtgacaatcttgaagctggttctctagccttgaatccagtctaccatacgcgcacgaagcacattaaaatagacttatactttgttcgtgacaggatgattgcaaatcaactagatgcgttatgttgaaccacataccagatagcaaatattcttactaagcctccatctctctaaaattatctacttcaggaataaattaacactttgctgaccagtgtaacttgaggggatgttaggatatgttagtttgttagttagcaaattagttatttcaatttgtaactgattgtactcttgctgagcttattgccagctgttgtaactatcctattggatcttgttctatataaaagaggctgagctcatctctaataaaaaagccattttcattttcatttcactcatctctttcttctccatctccaaatctcaaatttgtgttgttttgattttgtttttgtttattttcacttttatacacaaaactcatgggcataatatcttcctgcttgattttggtgagaacagaagtgtagcttgtagctagagtgctagacaccgaactgctcatgcaaatggttcacagaacaagaagtactccttgggacatataaataggacttttaccaagatcatgcacccaagatcctaaatgagtgctcgagagtcgagaggcaagcgatttggaatatatctaaggggcaccttacaatcatattttgatattatatatgtgtaattgaatcttgagttaaattatacaatgtcgttgaaatctttatatatatattcggcttctttacagtcatttgacatttctcataagaacgagtcagccatttttttttttttatgattaaactaaactaatagttgaaaattaattactctataataaccacaaattaggataagacaatccaaaaagcaaaagtttaagtaaccaataaatccctggaaagctaagtcaaactcgttagttgaaagcgagtttcctatctaattaatcgttctaactgtttttgtcttaatcctgtttttaacacatttttttataaccttgctgacaaatataaattgcgtactgggtacatatcaccttctattatatgtgttatttgtacactttttttaactcttagctatattaatagttttgtaggaaaaatgttaaaaagtaatactgattgtgctgcaattaagtattttatttcatataacttaataaaataattttttaaatatatcaactaaccaataaagaaaaaaaaaattatctataattttataacttgttatttagatatttttttttttttttgaatagactgttattagattttaaaatatttaatattttaatttttaaaattaaaaaataactaaatatttgtcaattaaattattaaaaataagattgagtgtaaaattacctctaattagaggtcattcttactattttttattaattaaaattatgtgtataataattttaaattataaatagttttgttacaaatattttaataattaagtacaaataaaattactaaaagacccttacttagtaacaaattgtaaaaaattaattaataattattagtaatttaattttaattaatattttataagaaaataaagtatcaagatcctatcaggttaattattatttatgtatttttaatctctaaactaatcacaatcatttaatagtaatccaataattaaaaataaatatattcatagtggttacatatataatataaccatttaaatattttccataaaataacaacttttttgtattttaccacaaaataaatactatttgaaactattttatactctaaatattctttttttttatctttccatcatattcctttgaaaaatatagggttaatttcacaaatgcacaaaaacaacaaaaaaaaaaataacaaaaatacggttttacagaattttaaatatttttacgatttttttgattttatttacataaaatacggtatttttatgttgaaattttgttcatttgttgttaattttttgttatatgtatgttattttttgttatatcatttaaacaaaaaatacatgaataatagttttctttcaacctatgaaaatatggttctaaaaaaagtaaaagatcacacccattaactaagccaccattaaccaagtcattcaagaaataagataaaatataagaaaaattcacccacactccattatttctataatccaaattggcttctctcggtcacctttctaataattttttattacttaaaatcaaaattttaattgttcatacattgcatgtaatattgaccaagaaagtttcagaaaagcatccgttgaatatggctatattactccatggaaacaagttaattgatttgtcatcaaccttgtatcataggcctccccaacaaaataacatcaataatggctctcttcaaccaaagttcataccttctcccagcacaaaatttcaaggcttttctcatcaaaactggcttcttcttcttgctacttataacaaaaggcaactcagttgtcttcaacttcagctcttttcagccaaacatgcctcaaatatcatttcaaggtgaagcattcgcaaatggtgttttacagctcacaaggaacgatgctattgcttctcttaatagcagtgttggccgagcctcatatggccagccagtccagctttgggatgccaaaactggaaggctcacagacttcaccacccatttctccttcacaatccaagcactcaatgaatcattgtatggagatggcatgtccttcttcatagcacctttcgattctgaaatccccaacaactcgtctggtggacgcctcgcgcttttcagtcctcaaacagctttcaacaagtctgccaacagtattgttgcggttgagtttgatagttttcgagatgaatgggatcccagctctgatcatgttggaatcaatgtcaattccattgtttcagatgcaaatgtcacatggagtagcagtatcaaagatggaagacgagcaaatgcttgggtgagttatgactcagcttctcacaatttgagtgtctttcttacatatgctaataatcccatcttcagtggaaactctagtctttcctttatagtggatttcaccaaagtcttgcctgaaaaagttagagttggcttctctgcagccactgggcaatgggttgaattacataatgttcactcttggtcttttaactcttctttggaggctacagatgagaaagaaggaaacagagctggacttataattggtttagtggtaggtttctctgtattgggttgtggcttacttctactttggttcatcattcggaggagaagggcagctggggaaatagaagtggagatatatgatgagtctattgatggtgaatttggagaaactgggccaaaaaggtatacataccgcgaactaagccttgcaacaaacaacttttcagaggaaggaaagcttgggcagggaggatttggaggtgtatataaaggtttgttaagtgaatccaatacagaagtggcagttaagagagtatccaaaggatcacagcaagggaaaaaggagtatgtttccgaggtaaaaatcatcagccgtttgaggcataggaatttggttcaactcattggatggtgtcacacacaaggcgagttccttcttgtgtatgaatttttgccaaacggaagccttgatcaccatctctttggagggaaaccaacactaacatggatagtaagatatagaatagcccttggattggcatcttctctgctgtatcttcatgaagaatgggaacagtgtgtggtgcatagagatatcaagtcaagcaacgtaatgcttgattcaaacttcaacaccaagctaggagatttcggtctagcccggcttgcagaccacgaattgggtttacaaacaactgttgtggcaggcaccatgggctatatggctccagagtgtatcactactgggaaagctagtaaagaatctgatgtctatagctttggggtggttgcacttgaaatatgttgtggaagaagaccagttgaacgaaacacagagccaagcaaagtgagtctcgttgaatgggtgtgggagttgtatggaaaaggtcaagttcttgaagctgctgacaagagattaagcatggaattcaatgagaggcagatggagagcttgatggtagctgggttatggtgttgtcaatctgatccttctttcaggccttctatcaaacaagtggtgaacattctcaattttgaagctccgctgcctaatctccgacccaaactaccaaaaccaatgtattttgctcattctttaaacatggattctacctcttatacaacatctactgacactacaacaacaagagatcaattccagtatacatcatcaagtagttacacagattcatctacatccgctggtctttctagacctacacataaaagttcaattgtagcaagcatccctcattttgtaattgtaatatgttatttatttatatatttcatcttttctgtatagaatatcaaaaaaaaaaaaaaatccaaaaaatatcaaaactcggtgtagcttcaccagttttctctaatattgttttaatatttttcaagactaatttgcttctccttgcactttctttttcttcttctttttttttttaaaaaaatctaagtttcattttcttcgaactttgaacataagtgataactctgatattaaaaaaaaatattattgactgtgaatctataatgtgatcgtattatatatattttggtaaattggtatattgtggttctacgccattagttatgtgatatctagtcctaacgaattatataaaatacaaatctaatatctatctgtttcacgcagcggttggaattatatcccttacttattaatcatggatgagaagcttgagatccttctgaaatgggcggcagaggttggaatttcagactcagaaacttaccaaactcaatcccatcccccactgacctgtttaggtcactctctgtacgtttcgcattttcccgaagccggaggaaggggtttggcggcgctgcgtgacattagcaaaggagagttgattctcagagttcccagatcagcattaatgacaagagaaactgtactcaaagatgagagactatctaacgctctcaacgcccattcttctctctcttctactcagatattaagtatttgcttattgtatgaaatgaataaaggaaggagctcgtggtggtatccttacttgatgaatcttccaattagttatgacgttttagcaacttttggtgaatttgagaagcaagctttgcaagtggaggatgcaatttgggctacacaaaaggccgtgttgaaggctgaattggaatggaaagaagctaatgtggtgatgaaagaactcaaccttaagcctagacttcttacctttaaggcatggctttgggcgtctgctactgtatcttcgcggactttgcatgtaccatgggatgtagctgggtgtttatgccctgtgggagacttatttaattatgctgcaccgggagaagacttaaatttcaagatgcaatcttcttcatttgggaattacccttgtgtaaatggggatgacccaattgatgtgttagactcagaacaacttgattttcattcagaaagattgaccgatggtggttttgaggaagatgttgctgcatattgcttctatgccaggagacattataaaaaaggagagcaggtcttattgtgctatggttcgtatacaaatatagagcttcttgaacactatggctttatcttgaatgaaaatccaggagaaaagatcttcattcctttggaatctgaattgtgcacctcaaacacatggcctatggagtcaatgtatatccagcaaaatggagaaccttcttttgctctactttcggctttgcggttatgggcaacgcggccagaccaacgaagatctgttgctcatcttgtttattcaggatcccaactttcagttgaaaatgaggcacttgtaatgaaccggattttgaagatttgcaattttgtcttgaagaatttgcaaacatcatatgaagaggacagtttgcttctaagagacattgagaaactacaagattctttaagttctttgcagctgaagaatgttttggcatcatcaacaggtcagattcgctcattcttggaggccaattgtttagagagaggggaaagtagtagtgttgagatgctatcatcatctaggaacattatacaggccgttggtaggtggagattagccatccaatggaggctcagctacaaggaaactctgataaattgcaggtcttattgttgtaaagttattcagacaattcctattcaaaatgactagaattgacctttgtgcaatgtagatttaatttgtatggattcaataattccagcaaaatacttctgttggggaagtggatcgcagacttagaataaaaaatcacttacttatttaaccaatactcaacattattattaaaatgaaattcacaactatacatttcctaaactgactacactattaaaaaaacagaggtggttagtgatatggctggtcggtcataaattttctaaaaacaattaggatatccaattatcatcttctacgtatgaactttcttattgcaaaaagaaattacacacaattgaccaagaacagttcagcaatgtctctttaaattgaatggagctataaaatatatatataagtgacaaaacaaagaccaagtcatgaattaggtgagctaacaacagggttaagattttctacataataacttaaatctcttccatgcttccatgtaacctctcttatgtctatacacaataactgcctccattgtaatccactaatcttcattacaataatgatagtttccaagattcaccctcacccatgttcacacttgatccttaagaccactttcttgttgcttcttttgagtctggcaaacaatgcagagtcacttcattttaactttactaagtttcaaactaaggaactgaaagatattcacttccaaggtgatgctactccttttaatgattccctgagtctcactaaagttgatggtcaaggcttttcccttcctaatagtgttggtcgggcctcatattcaaaaccagtgcagctttggaataaggactcaggcgaagtcacagattttactgcaggcttctctttcgtgatcaaagcaaatgacaccaagaggaagtttggggatggaatctccttcttcattgcgccttttgagtccgacatccctgctaattcaacaggtggatatctagctcttttcagtcctgaaaatgcaaatgactccagccaaaccaatcctattgttgcagttgagtttgatagttatgacaatccatgggatccaagctctaatcacatagggatcaatgtaaactccattatatcaataagtaatgttacatggaatagtagcattaaagatggaagagtagcaaatgcttgggtaagttttaaccccattactactatgttaggtgtctttctaacttataatggaactccctacacagggcaatctactcaaaaccagcttcaatatccggtggatatgaagaacgtcttgccagaaaaggtccgagttggtttctctgcagccactggtgtctcatttgaaacacataacattctttcttggtcctttacctcaaggttggagattaaagaaaaaggcaacacaggtttgtggattggtttatgtgttggtttcggtattttgatatgtggactactagcgatttggtttatcttaaagagaagagctgcaaagagaatggaagaggaagagtatgatgattccattgatggggaatttggagaaactggaccaaagaggttcacttaccgagaactaaactatgcaacaaacaatttttcagaggaagggaagcttggacagggaggatttggaggtgtttacagaggtctgttaacagaatctaaaacagaagtggcagttaagaggatatctaaaggatcaacacagggaaaaaaggagtatgtttctgaggtgaaaatcattagtcgtctgagacacagaaatttggttcaacttattggttggtgccatacaaaaggtgagttccttcttgtgtatgaatttttgcccaatggtagccttgataatcatctctttggagggagaccaactctaacatgggcagtaagatataggatagctcttggcttagcttcatccttgttgtaccttcatgaagaatgggaacaatgtgttgtgcatagagatatcaagtcaagcaatgtaatgttagattcaaacttcaatgccaagctaggagatttcggcctagcccggcttgcagaccatgaatcaggtttacaaacaacaatgttagcaggcactatgggttacatggccccagaatgtgtcactactgggagggctagtaaagaatctgatgtatatagctttgggatggtggcccttgaaatctgctgtggaagaaaaccagtaataagaaacgcaataccaagccaagtaagccttgtggagtgggtgtgggacttgtacggtaaagggcaaatatttgaagcagctgacatgaaattaagtgaggaatttgatgagaggcagatggagagcttgatggtaactggattatggtgttgtcatcctgatcccatattcaggcctaatatcaaacaagtggtgagcgttctaaattttgaagctccattgcctaccctgccatccaagttgcctaggccaatgtattttgctccttcattcaatatcaactctaccaattatacatcatctaccaccacaaggtccactcaagatcaatttcagtattcttcaagcaattatgtctcagattcatcaacatcaccaagacctttcatattctcagaaagttaatgtgtagtttctctttgttgtgtagctctttattataatatttctagaaactgatagtgagttcttacgtaagtgtttgaatattatgtctgattcttattaggataacgttttcgttgctgacaaagtattgtgtatacataaatatttgtgtgtgtgtgtgtgttaggtatttggatgagattattgttttatgagagtcttggtcaattatgtttggcaaaatgaaatttttttgttagagtttatgaatcatttgactgttgacacctggaacttggtaatgttttagttattagtctattaaatattacttgtaaattgtaatcactgtactgtgatttcataatttaacttgtttatgtttttacgtgcatttcaatattatgctagttggtttcaaactcaaaaattatataagtaaatggttagatttttccctcctcacgagttatttattagttaacaccttttgttaaattgttaaaattaaatgtggatgctactatttattgtgaaaatagtataattagttttggagctttggttcgtgattctaatggctttccattggaatgttttgttaaatctttgattggtttttttttccttagaaaagctgaagcattgacaacttcatatgctttaaaatggtggggaaatttgaatttctatgcttacattaccttaaatttttttttcctaaacttatacttaccaatatttttaatat

SEQ ID NO: 238958 - DNA, 7774 bp, Cannabis indica
cagaattttttcccgaagttcaccaataaattggctacgtctccgtttgagctgctcctcaaagatgagagctcgattccactagatcttgttgtttagaagtacatcagaggagattccaagtcacaggtaactttttgactggtaatctctatttttaatacaagtttaagtgtttaatctctctccctaacaaagtctaactctctgtttgtttttcttgtacatgcgaggtcttttccttcttctccttcaagttcagagcatctggatcttgaagtgaattctcaaccatatagatctaagcttgagtgcaggtatatatagatctagggtttctggttttatttctgcatgtgatagatagttagttacaaaaattagttaggtgtggatttaaccaaatccattctaactaatttctattagggatattagagaccgaaggtcaacttagggcttgtcctttgtatttattgtattgagtctaatatcagtgtaagtggaggttcactccaacactattgatttggttggtatttgtaagtagctattagctactgccccaataaacaatgatgatggagtttgctactaaaatttttcctttcttcttttttagaatgctttcatatcaacaaatcatgtgtatacatttcaaatgtattattctcagatctttcaaagtcaattaataaataaaatccgttattgacttccaccaaacttcctctcaaataatttttgataacacttgaacattaagttatgtttctttctttttagtcttcaatggtaactttcattttgtttttctttctataagtattttatgattgtaaatattatggtggctatataaaagctttaaatgggtatattattgaggtatccactaaatagtgaagaaattacaatgtattggtataatattaatagcttcattgactatttttcatatattaagagagactcgtacttcaggacaataattatactttatatatgggtatagccaaagggaatgtttgattagaaaatataactaaaacaaaatcaataagggtgtcttacggttatgatggtagaataataacgattaggagaataaaataggatagttaaaataattaattagttgttttattggaatttttacatatattttttgatagaaaatagagatagagatattggaatcaaagtgagaaaattaaagtaattatacatctaataaaatataatgcatgtggggtatgaggagggggaaagatagttaaaggattacaaatgaatattgacaatacttttataaagttatgtaattttacaatattaaaaaattctcatatgcaacttgacactactcttataattttaccaaaaatgatgcataatatacattagttaaaacctttgaccaaacaaaacaatgttttttagattcccttttccaatcaaacaagtcgagtgtgaatttacacttgtgtttagcactaaacagtacaagttgatgactttacaagtagtgattatattgattacacacttgaagttgaagtaatcttccatatccaccacccaaagaaagagagctaaaggcaaagagagtaataatagcttatgagttatgacagcataaagaagataatgggattgctgaactagctagtatctaaggtcccagcctccatgtgatgccaaatacaatccaatccaatctataaatggactggttaagaaatggaccccagaaattaaacattatataaatgaaattattaaatcagtgattatattgaaaagaatcctcagagtgtgtagaagtagaattaaacccaccccactacatgatcatatatattatagtccttgttaatggccccatgggatgggaagcactattgtttttctctccaggttcaaaagagcattggatggcctcagaactttatcaattgagaagacaaaatataattcattgtcaaaactatcaagtaacagctgacaaaagctgccattcaatgacatgtgaggttctatatccaactatatgtatatgccaataaaattacaaaacctattgtgtttgcatcagatggcaagtgtaaacttgtgaattatttcaacgatgtgctgctgtatgaataaaaaaacttttagtgtatttcctgaaaaggcagagcagcctagccagaattgaaactgcaaaaactgcttatgtgtgaaactgtaaaaagcctaaaaacaatgatgatggtttcatcagttgagtgaaatagcagctgtgctcttcttctcattccataacccaaatgtgtttctcaccacacagttagatccagaaaagtggaaaaagaatagaacaaaggaaactcctgagacagagcatagagagaagtacctatcaaacttctaagcaatgtcactcagcttaaagaaagaaactttcaccaaagaagcataagtttttaaatcaacaaaacaaagatgacatttgatcatggaaaataaagttacatttttattatatatgatgttgagtcaaagcagcaagtgtcctacaaatgtaatgaaatagaaagttacagatatctcatgatttgacatatggcctgaggaaatttacaagaagggtattcaggataagctaacagaaatggctgcaaaccatttttcttattttcaggttaagccaacatggcagcccaagatcttgctttcatttttcagatcccagctccaacaggatttacaagattcagataaagacactaacccagaatgtatttgatctattcttcaatgaaatctggtctaaaagttgtagcataaagcaagagatactttttcagaatgaacataaagttttgcacaaactccttcaaagaaaggctttcccattttttattttcatttctaatcaagaagtagaggaaccaaattaaagaattgaaaaatcaagagtaccttcctcctcaaaattgatatcctctgctttgtaaacaagtaaaatgtagttacccaactaatcatatttttctctccatgagtaaacaagtaggaaaatccatgaaaaggctagtgcaatatctccaaaaacttgcctgggccaatcacgagcgaggtcttcaagttttctctcaaagtaaactctccaaatggccatggcgatgtgaagcaagacacaccctttagcaaagaaactttgaaactctctgtctttaacaaaagccgccattaacagtatgaaaccaatagcaaatagaagcaaacccgaaaatgaatcagaggtttggatcaaaagctgatcttgtggcgttgacccttgaagcttgatagcagtttctcttccatggccaaacacagcgaactcgttcgcatagaacatcatcagaactccacaagtcaaagctattgaagagtggagaacacataggagaaaaaacccagataaacccattaagaaaataaccaaaaataagctttccttcctaagaaaatttgagctttgtttgattcaattcatctttctattactactgtgaaatcatttgtttgaagcaaagccggaacttctacagaaaaatgacttatttattgaaaaaatagaactcctccaataactatttgggacccatgttgtactataggtagatttaaaacgactaataacagtaagattcaattcactgaaaaaccctaaaccctgattaggctcaagacccagaacaaacaaaagggcagggaccaaattacaagaatttcagtaaaactgaatatcttcttgaattcttcaccttcagcaccccttcaaatgattttactttgtttcagtgttaaataaaagacaaggaatcaaatcaaatagaaggccttgacaatcctatggctgaggaattgtaggtaatcaaaactctggttgggttttgcaatgagagagaaagataaaagctttgaaaaatgagaactgacatacatgggatgggagtgtgatctcaacaactcaatgcttttgttggacaaactgttttacttatatgaatttgggttggagattttagccccctactaccaaatttagaaaagaaaaaaattaaaggaaactttgggtttggagaaaatggtaagggagattgatatttgagaaataataataataatagacaaaagggttttaaatagcatagagagtgcttcccctatacaatacatactcccaccacaaccatgcagaaaatgccattcttttttcaggttaattacttgcttcttctgcaacccaattataagtttgtgggtcattacaccaatgggttaccattcctttttctttggttacaacatactattttgggaacatgtagggctgcccttcactatccaaaaatcagtttttaagtcgttctaaaggggtcagtttgattatagtctttgataattgattttggttcttcctcattcacttttcaacccaaaaagctttttcatgtcttcaattagtagctttatggccattaattcatttacatttacatttaccacgactcaccagactcaccagccactgaccaatttgcaattttttaacaaataggagagagctttcctttctgttttctaataatttttgttattttaaattatcattatattactttattactaagaaaatacttgcttttgttttctttcttgaggttaaatcatttttagttcaataataagataacaaaaagaaaaaggggttacgtacattgtagagagagggtgagttgatacataattggaagtattaaataaggacttaaacacagagggtcttttgagtgagacagggatgtcatatcttttgaataaaataaaataaaaagaatatttcaattgaatatgcaaatcagatacgtaatatattcatgaatgaagataaaaaaaaaacgaatctaataggattcatacaagatggtaccttaccggggttaattaagtttcataaggttaaatttacagatctcattttcttagcaaataaaagtagaaacattgctccacaattttctctaaattcaaactagccttttttaatttttcaaaatcctttattgaagtttaagaacgtgggtccaatatgtaactccaatggaaaataataatgataaagcaataatataggggaaactttagtatataacaagctgtattagctttggtatgtgaaacaaaaaaaaaaattaaaataaaattttatattgaataataatataataaggtaagttgagggtttcaaagaggaaaggaaggaaggcatcatcataacaaatgcaaggtcaccactaacaccaccgcacttacagcctgttttgagagtcccatcccaaatcttgagcttctgttggatcgttgccttgaattcatcaagcacacatctcacattttcacacaataactaatcacatgcactcatgcacgtttcaagtttctttcaaaacaagaagaatatcaactttattttatcataatttcacatctgttggcaaaactcaccaccccacttgtgaagcttgttggtgtaaaatatcatttaattgagagagagaggctgagctttctatgatgtaatctttacttggtgcctaaacactaaacattctaatgtctcaccaaaagaaccgctactgtttcactgttttagctgaatataccatctcattatttacttactttgacgtatttatggcattaattacgaatggtttatgtagatgtatatgctttccaaacaaaagatgacaaaggagaaacatgaggaaaaattgcagaagctcgaattgaaattattaagaatcagggtatttacagcaaaattgaatatatatatatatatccacaattcccgaaacaaaaattagaaccgtatttttacatcccttctgcacagattttaacctggtgttcctaccagggaggtttaaatgaaataaagtggagaaagaaaatataaaaacatattctttgggtcaaataaggggagtgggaaccaataaatggaaacaattaaaatgagttgttgtatctaccaccggcattcacctttcgatgacgctttgatccagatttcctttctcttccacgtcgagtagaagctttctttcctatcggtgtcctaactatattttctctcatggaaactggtttaaaaagcctcactgctggaggaggaggaggcatttgctccaggacgtctctgtggtatgtctgcagaagagaaaaagataaattcacttaaaacatttagtgatatgaaatacatcttattagccataaggatcccactctggcaaggattcaggcatatcttgtaatgcatgcaatttcaaatgtaatttagcaaaaggagccaatttcaccattttctaagttcaaggaaaaatggaaaaaacttatatgcacagtggcaatggttaaatggagcgatgtaacagagccttacaacccgttcaaaagaacaagtctacaaagaaaaattgaaggaaaagcatacaaaatatttggagcaaatgcccacctaataaataaacaatttataacaactcacacctgtattacgaaatttcgcctttcacaatcctcaaacatattaatgttccaatccgcttttgccattattttgtccctcaccatggagaagcttaactgatccctagaagtgaaacgatcaacttcgttgaaccatagacatgtaaacaaattggtgataggaatgtgctctcttataattgcacaaccttcaggaacatctacagaatgtcaaagacagcaaggaaagataatcacattaggaaaaaaacataatacatgcagacacttacatacattcatatgcctagtcttaatagcaacacatgaatataagaaacacaaacctaccactagttataggaagtttagccttggaatagggttttaaaccctcttttctataaaactcaatctgcttatcaatcgaagcattagtatactttccagcagctttattggcttctgcctcctcaaaaacatcatagcgcctataatgccttgatattgcaaaagtcgcattttcccgccacaagaacctgaatcaaatcaggtttagacaagaatgttagcctaccacacatgtttccagaaggtataaacatatcgttgttcaagagtatgattttgcaatgaaataattgtttctgataaaataatacattatggaaaatgtctttaaatatcattataaaaagagaggaaagatgaaagattcaaaaggtcaggaatcaggatattaagaaaaaggaatgcagaagaaaaagaaaaagatatgtgcaactagagaccaattcaaatctcactctatatggagccaatcattgatcagatacttagttaaaaaaaaatcattgatcagatgcagtaacattacaataatttagcataacttctcaaaatttcaattataatgatacaaatttccttaaacactaaaataattacaataaaatattaaccaaaaactaggaaagctaatagaaaaaaaataaaggagtattatagtatttcatttttaattgaaaaataagttaagcttcatgctcagcatcagtgtcaagcaatttagtcaaacccatctacataagctctaaacaatagcttgactctagtgcagcaacaacaaccctttgtcagttgctaggaaaacgattacaatgcaaatttaaagaataaagatcctttattgaacctc

SEQ ID NO: 238959 - DNA, 1511 bp, Cannabis indica
gtactataaactttgtttgtttgatatacttaaattctatgaatccagacaaatcatacacaaacaaacagaacaaaatctactgagataataattatttatgtatataagagtttgagagaaatggaagggcagccccaaaaacaaaatgaggaaaagaaagaaaggccaatgaattactctgtaataattggtccaaaaaggttttacaattgggaagggattcaatacaaaattttgaatcaatacctaactgtgataataattatttatgtaatgtaatcactctgaatcaaatgttgtattgtaatttatataaaatgaagatgaatttttgtttaagtagtaggaggattttggctcaaatttcttcttctaatgacttgtggttgatttgaatcgtcttcttcttcatcactactctcatcatcactgctttcatcgttactgtcatcatcatcatcatcatcactgcttccatcttcatcatcattatcatcatcttcactttcatcttcttcatcactatcatcagaatcatctgagttaggttcttcatcagaatcaacctcattgtcttcatcttcttcactatcatcatcatcctcatcgctagagtaataatcattttcaatagcatccttgttttcaggaacaataacttgtttctccttactaacttcagccattggagacctgcaaacttactcaattagttcatatacattaatttcttaatcatcaataaagaaaaattatttcttttctttattatatgatcacttggaagtgacccactatacccaaaaacaattagtataaaaacaaattaagagaaaattaaatcatgaaaccataaaaaccatggttaaataagaaggaaaaaccctaaaccaaataaaaatcgagggcattatcaaaaatttaaaccaaatacaaaacgctacttgtatatacatattcccaatgccataattacaaaatcccagatggatgatccctcaactgggaagaacaagtataattttaaaaaataaattgaaagcaataatagaaacccaaatacatcaatcaatttaaacctaaaacaaaaggatagaagagatttcttaggaaatgtaccttcaaagatttgattttttttttctttctttttgctgtgaattgaattgagacaggaagtgaatgatggagtagggttgagaagtttggctcagagaatgtttgactttttcttatggttttgattttgtataggtatctctccgtgggtgggtcagtatgtgggccgggcgcccgatgatgttactgaaagttcgtggcccatccaaaataaagatgggctgagacgaattgggccgcgacccatcttaatttttttaaaaaaatgttaccacattcataaatgtgtaattactaattattagggtgataattatataatttagtaattacattatcttttaaagtattagggtgcatttagaaaaccacaatgtaattggatttgt

SEQ ID NO: 238960 - DNA, 5083 bp, Cannabis indica
gtatctctctctctctctctctctctctctctctctctctcttaataaaaaaagtgaaaacagacgagtgtggtgggtttacctgaaaactttcttttattcttatttagggcctatttttttttacgcctttccatttttttgcttgaaaaccttatttaacatgtctttactggtaatgttctcttcggtcattttgtatattatacaccctgtgaaactatttttgatgggaattgtttgttaatctttctccattgaagagcttaaacttgatcaattacttctaatgctctttgggattcagactccatcattatgttgctgttgtttgctctaaatgaatgctttttttaacaacttgcgcgaatcataacttaagttttgatttggtagactttggttaaaggtgataagtgggctcctgctgtcgaacaagcccttggaaggttgctcagtgctttcatagtaacagatcataaagactgtcttcttttgaggtcatgtgcaaaggaagcaaactataactatgttcagattataatatatgatttttcacgaccaaggtatcttgattattcttatttatttactctttttcagttcatctaaggttattgaacttataattataactgatggtgtgtattattttttgttgcaggctggatattcctcagcacatgcttcctcgaacaagtcacccaaccactctttcatgtcttcattctgaaagtcatactgttttaaatgttttagttgatgtggtaattttactagttttatgtggcttatggattggtacataatttatccatttacattttgatgttattcactactatttttttcttcttctttcaaacgtgcatttatttatataaagaacgagcaaatcatgctcttgttattcacctctgtgaagtttggtggatatattttttcctgcttctttcttttgttctttggaattttcccctgcctgctacaaaagaacataaaattgtttgcgattttcacttcataattatgtttccagggtaatgcggagcggcaagtattggttcaagattatgacattggaaaagttgttgcttttgattcaaggaactcaaatttgaaggaggtctacacattagatggctataaaatgttagcagcgacttctttttcttctctatcaaatggaaagttcattcttttaacactattctgttggtgcttcatcgttgccaagttgggcacaaatacatttatttatttgtctaatttgatttgctttgcatccgcaactgatgaaacgtagtgtggcccttgagtagtattacagcaccactaagctttttgttttaactgtttgggtgtttattttttgattgcttagatttctttcatatttgcttactttgaaaaattctctttttctaggttttctcgtgcttctgttgagacaattcttcctcccaacaagtcaactagacctccacgtctttgtagttcctatgatgagcagattaaaaattttcaaagcaatgcattagatgtacaaaaaatagctcaggaatgcatggggaggaaaaggcaggcagaaagggaagttgaagatcttcatgaaagcattcgaaacataaaggtactttttgttttggtagaagttgataagccctcatatcacaattcaatagcaagaaattgaagtaacagtagaacaatgaagaattgagataatatccctgttgagtgttattgaattaaaagacaatggttacaagcttagagccctataggacccctgttgtaaagagaagtcctcaatacatgcacaaaccccataaacctctcaaacaacaatataatatcttgcactctcactcgacaattacaataatactctcctaaagtaaaagaaaacacactatccttgagcagtagcattcgtacctctcctagcataagtaaaacggaccttggtcctaacattaccccccttatagctcgaaccttgtcctcaaggttgaaagtaggaaattggttacggacggtctcgaatttctcccaagatgcttcaaacagtgtttccactgaattaagacttcaacttcatcacctggaccgttgggaccatggcacacattcagcacagtctctggctccacttgaagctccaattcaggggtgagttgaggagggaaagtaggagatgaagaggcaacacccaccagagcttagagttgagagacatggaagacgggatgaactgcaacagtaggaggtaaatcaagtttgtaagccacaaccccaacacgactcaagacccgaaatggcccataaaaacgaggagccaatgttttttgttggtaaggacagagtttgacaaaaactaagtcaccaacctcgaaatgaacctcccgacggtgtaggtcagcagctgtcttcatcttgtgttgagcacggaggagatgcatttttagatcatcaaggaaggcatctcgttcttccaacaactggtccactgccgtgatcaccgacccgcccaaacggtgacgctctaaggttggagggtctcgtccatacaggaccttgaatggtgtgcaacccaaagatgagtggaagttggtgttatactaatattccacccaaaagagccatttagctcacactcgtggcttttcaaaagtaaaacaacgtaaataagtctcaaggcagcgattaacgacctcagtttgtctatccgtttgatggtgaaatgctgtactatgcttcagtaaagtcccttgttctcgaaacaattcagcccagaagtggctaaggaaaactcgagctctgtcgaaaacgatggagcaagggataccatggagcttaacaacatgtgtaataaatgcttcagccactgtcttggcagaaaacggatggagaggaatgaaatggccatacttactcaaacggtccaccaccacaagcatagtgtccaccccttccgagcaaggcaatccttcaataaaatccatggtgatatcgtcctaagcttgctcgggcggcggtaaaggctgcagtaaatcgacgggagacatagccatggttttattgcgttgacaatcctcacaactccttataaaattcaccacctgctgcttcatttcagtccaaaacacatcaacgtgtagccactggtaagtgcgagactctccagaatgcccccaactggggtcacgtgatattccttcaaaaaatagggcaagagagatgaattggcagtaagaaccacccttctgttatacctgagttgcccatgctcgagggagaactcggatactttcttaagttgttttaaatccgtgcacatcttggccaagaaaggatcagccttgacttcacattggacgaagtcccaatccagccaagaagaagtggtaagcatagcagatactgctggtaggacgcgcgacaatgcagcagtcgccttattagctatcctgggttgataatggatttcaaagtcataacccaacaactttactagccatttatgatgcaatgtggatactaaacgctactccaaaagaaatttcaagctctgttggtcggttcgaaccaaaaatttttgacccaacaagtatgtctgctatttaaggataccgagcactatggccatgagctctttctcgtagatagacttcaattgggcgcgagattttagcacttggctgaagtaggcgagtggcctaccttcttgcattagaacaacccctagaccgtagccggaagcattcgcttcgatcacgaacgacttagaaaaattaggaagagccaataacggaacggtaaccaaagctcgtttgagggcttcaaaggcagttgtagcttcgtcattccaactgaatagatctttctttaattgcttcgtaagggggcgagcaatggacccatacccttgcacgaacttcctgtaatatcctgtgagacccaaaaagccccaaagctccttcaaagttttcggcaggggccaagttagcattgcttgtatcttgctggagtcaacacacacccctttgcctgaaataatgtgacccaagtactctaaccaccgttaagcaaaacaacacttctttgtattggcataaaattggtgttgttctaaagtctccaagaccacttgcagatgagatagatgggcttccatagtggggctgtaacctagtacgttgtcaaagaaaacgggcacaaaacgacgaaaattaggcttaaagatctcattcatgttggcttataaggttgcttgcacattggtgagtccaaacggcataaccacaaacccatagtgtccttcgtgagttcgaaaggctgtcttaggtacatcctcaggtcacactcgaatttggtggtatcccgacttcaagtcaagcttcgtaaatacttgtgccccatataactcatcaagaagttcatcaattactggtatggggaacttatcagctatggtttcctcgttgagagcccgataatccacacaaaagcgccaacttccatcttttttatttacctatagcactaggcttgagaatggactcacacttggctggcaaattcccaccttcaacatttaacacaccaatctctcaatttcatcttcttgaatatgtgggtatcggtaagggtgaatactaatcggagtcgttccgagacgaaggcgaatagcatgatcatgaggttgtggaggtggcagtgtgttaggcatttcaaaaactctagaaaattggtgaagcaacccagccatagctgttggaacccggtcatcactttcatcggcacttgtatgactcaactccaccacaagccttcctgagccacttgtatcgttttaactaggggtgttcatccaatccaattcgcactattttgctcatggtgcatccgatctactttaagtgcgtttcaatttttggattcaatccaatccgcaaaagtgcagattggatcagttattatggattagttacttttcaatatttatgattaatatatttttttttttcacataactagcaacaaaataaaacaaattataattattttatgtctccaa

SEQ ID NO: 238961 - DNA, 6613 bp, Cannabis indica
cagagagctttgaagatgacagcgaggaacttggtacccgagatccagctgtaagttcttcttttgatttggattttgatagttatggtaaaacaaaggctagaatagttgaacccaagttcaaaataagcttagctgagcttttggatgagagtaaggttgtacctatatctgtttacggtgatttagaggttgagattaccggaattcaacatgattctcggttggtttgctcaggtgacttgtttgtttgctgtgttgggagaaaaactgatggtcatttgtatttgagtgaggctgataagagaggagcagtagctgtggtggccagtaaggagatagatatagaggataccttggcctgtaaggcattggtgattgtggaagatactagtgcggttcttgctgctttggcagcctctttttataggtatccgtctaagaatatggcggttattggggtaactgggactaatgggaaaacgacttctacatatttgataaaaagcatgtatgaagcaatggggttgaggactggaatgttgactactgtgggatattacgttcatggggacaacaagctagaggctccaaatacgactcctgatgctgttttgattcaaaacttgatggcaaagatgctacataatggttctgaagctgttgtcatggaagcttcttctcatggattagctttaggaaggtgcgatgaagttgatttcgatatagctgttttcactaacttgacaagagaccatatggattttcatggaactgaagaggagtatagggatgctaaggctttgttattttcgagaatggtggacccagaacggcataggaaaattgttaacattgatgatccgaattcttctttcttcatttcaaaagggaatcctgatgtccctgttgtaacctttgcaatggagaataaaaatgcggatgtccattctcttaagtttgaactctctctctttgagacacaggttttagtaagcactcctcatggtatattggagatatcgtcaggtttgcttggaaggcataacatttacaacattttggctgctgtagctgttggaattgcagttggggcacctttggaggacattgttagaggaattgaagaggttgatgcggttccaggaaggtgtgagttaatagatgaggaacaggcatttggggtgattgtggactatgctcacacacctgatgccttgtctagattactggattctgtgagggagcttggagcaaagagggttattactggtatgcttctttggcttcttgtatttagttttgagcatttttgcgctagacatttacatagtggcttccttttcgaagctacaattactgttttattattacttggtggcttaaacagcaaactatttcatggaatagaaatctttctaaccttcaacttttcttgtttcatatccagttgtgggttgcggtggggagagggatagaggcaaaagacccattatgacaaagatagcaactgataagagtgatattacaattcttacgtcggacaacccaaggaacgaggacccatgtaagcacagcatttgtccaaaatttatcatcaaaaactgtcatttaatttggcacttaacaataaattatatctgtatagatcatcatgtgggagattcccctgaataatatttttgtgaatctgcatgaattcatgtgtgccagttcttaggatgagtggcttgcacctcattggtagaaattaaaagctaagatcatatattgacattcgtgcactacatattaatcaaacagtggatatcttggatgatatgttggctggagtaggattgacaatgcaagactatttgaaacaaggagagaacgattactaccctcctcttccaaatggtcacagacttttccttcatgatatcagaagagttgcagtacgctgtgctgttgctatgggcgaggaaggtgatgtagttgtaagtccttgaagtcccaaactcattttatgcttaaacatcttctggcaatgctttctagttcaccacaacgatttctcttcttgacttggattttgctggctatacataaactacaggtggttgctggaaaaggtcatgagacatatcagatagaaggcgataaaactgagttctttgatgaccgagaggaatgcagagaggcattgcagtatgttgatgagcttcaccaggctggaattgatactagtgaatttccatggcggtaaaacttcataatttagtacagctatttattataggagcagataggagatgtattcacacctttttcctgttcattataatgcagattaccagagagccattaaaatcttccaaaaggggtctcatgttcattctaaagcagattaccagagagccattgaaatcttccaaatggggtatagaagattggagctaccctgacaaagaaatactgatgccttaaggcgattgcatcatcagcatggaagaatggcgttctttcataattttgggaaattgtctgaactatgcatgtgatttcaacagtttgtttcatgcatagaaatttttgtaatttttgtcagtcatttttgtaatttttgtcagtcaaatagtgttgtaatttttgtcagtcaaatagggtaaatttagtttttttttaagcccttttctgtatacttgaggaagaatgcaggttggcccatcttttttgccttcaaaatcaaaggcatttgcgttgtgaaaaaagctgaagcagcattggaaggtacaattttgtaagcaggcatgtttagatttaggatttaataactatataaaagatcttaatcatatccacttatgatttaatgtaaatatttatatactacaaaggaactgaaatacaaatgcataataacacaggatatcaaaaatgatcatttctcccaccaaggtcagaaattacacccaacaatggtacaaagtcaaggcacgcacccttcgtgcatgagtacgaagtagcaaacttagaaatgatggttaaaatttgatataattaagaaaaaaaaagattgataaaaaagattaggaaaaagaagcttcaaataatattttatagtactcgcagagaacatttttgtttttctaagacctcacaaaattatcagcaaaatccaagttccaacaaacaagaaaaccaattggcagtgggtgatgttgcaacaatcaaaaaacagtgggaattagccaatgatttacagagtccagcagaatcaagtacaacaatctggaaagaaaattaagcccttttctgtatacttgaggaagaatgcaggttggccctcttttaagtatggttctatcgagctttcatgctcttctacaaaatttaatgtcatgatatgatattaaagaaaaaagtcatcacaaagaactttaatcactgattgtgcagatatcttgtgaatatatctttttctgctcactgttaaatattactccacaaatcagacgctaactaaattcagttcacctctgtcaaataatggaatctagttcaaggtctgctgccttaaattctaggcatcacattcttcccaaaatctggaatcctcaatggttctggctacttgtaatgcgacaaaactaaaagctctggtaatacgaacagtccagttatatatgcatagacgataatgataaaccctgcaaggaagagcacgaatgcggaagtgcattctttgctgagactagagattcaacaatatcttctatttggcatcttggcatgaaaacttcaccggctaaatcattttttatctgatcttccattgtcctgcaaaagtttctcctatcagccatgataatattggaagactagaagagcaaataactacgatcatgatatgggaatcaataaaatagaataagcagacaaatactaagtgaattaactacccgaccttatttcagattctgtatacttgctgcattctgagaacagcaccttaatgacaggttgtagatcaagcttcggtgctggttccatgcaactcgttgtgctcgaacaataaccagtacaggaccatgaatttgaatttgttagaacaacttgcaatctaggaactcgggttttcagatctctagccacagttcggaatgacaattcatcctttgcacaatcaagtagctgagttgaaaacagtttttccaatgtgtaccccctgtcatagaattaagcatccaaatttagatagacggccatcattttggtactagaaatgaacttcagtacaaaatgataaaaagcaatcacaaaaggatgttattaagaaataacaaaggaacgtgattaagtgagcaagagataagaaattctttcatgtttcttcataaagtcaagactgtaaatattggcttactaagttaaagaggtcaatgcattcattttagattatttatgctgacctgaagaaatctttggaacctccagctggcaagctggtagataaatagcatttaaaaaaccgaaccccaccatctacaggggcagagccattagcacaaggataagctccaaggagagttgaacattgagggcaaaaatactcaacccactcaacctcttttgagagattagatgatctaatcataaaaatgttaccaaggaacccattaagaaacgacttctgattttctgatatcttcgtactttcaataagtttctcattattcaacaatttttcggatacatgatgtgtgcaacatccctgttctagttcctcatttccagccaaatttgattctaaacacaaatgagataatcgttcaaggttactttcttcagcagtatctttgcaaacaatactggcaccaaactcttcatccttaatattcttatccttagattcctcatcaataacaggatcactgactgaggttgcagtagattcatcaaatccaatgtcaccaattaaatctgattcaactccatgaaattcatccccaccgaggtcagagagattacacccaacaagatcctcattacaaacaacaatggtagcaaagttaacaaggcacatgcccttcatgcatgagtacgaattagtaaacttagtgaccaacttctcacttattcctccaaatgaacagcagcaagctccaaaccagttgtcagccacctcacgccagttaaccgatggcatttccgaaaaatttctacaagtgtgttgacaaataacttcaaattagaacccacaaatgaaaccggacttcatagtagactgaaacatcattagacatgcaccaacatgggatgagccaaaaagagaaaaaccttagagggcttcttgttaatttaaattcacaattttggcagtaaaaatgaactccttcactagatgacagattccttatatctgagaaagcagcacaaaagaaacaaatcaatcatacagaatgtaagaatgtgagcaaaaaagactagtaaaatagtaagatcaaagcaaaataacttcaaatcctcgactcacccgagtcaacagaaagaggggttgaagcatccaagttcagattctcatcatcgccagaaaaattcagtatcgagtcgaagccggaaacaatagcatgacccacagggagaagaagaacaagcttgacttctatgtggtcatcaaatactgtaaacctcacgggagattcatcatcgatcaaaaccctaggaataggaaccctaagtgagacttctttatcatcaaaccaagtgaccataaccagtgactgtgaaagactgacgttgaccttgagattcctgcattgtactaagggtctagtctgaggatcgaataggaaaagccttaaagttgggatgtgagactgagcttcccaagtgaaccgccattgtctgggactttcaaaatcgcaaagatcgcctgtcattctttctttctactggtttccaatttcttatcttactgggcgctcatgctagagtgttgcaaatataattttatatagaattcaagtaagaaagcatgaacacacaagattgtttgatcaataaacacccatgtttacactttggcatatcttcaaactcagtatagccaagcaacaaaaatggtcctgcttgctcggaatggataaaataagtcaagagttattaaatcttcagaaaacaacatactgacaggggttcaagataacaagaggcattattaaatctttaacgaaattaaagtttacaaatttctgcaacattagatcagatgacaactccctcctaataaaattatggataagacaacatgcaataattatacaaaattgttcacaaggtctatcatacatgcaacataatgatatcagtgaacgcatttgcaaattttaacatgcagagcacatcgtcataaaagtattgctcacaaggtaaatacatattgttatttgttatgaactaataacaaccagaagcacatcaacaagtagattaaaccagcaaagaagggccagataacagagtaaaagaaatacagcataactcaatgaaataagcagtaaaaatggcagtatacgcagaacaaaaatggcagtaaaaattgcataaatttatttcctgtcccttaaaa

SEQ ID NO: 238962 - DNA, 3457 bp, Cannabis indica
caattctccctttgtaaaatagtggaggatcatgtccatccaacttgatacttattcattctttgcaatctcaaccttggacgcaatacttggggctacaagatactcgatagggggtactcccaatttttccatttcctgatctgatgctaacttagctaagcagttttcatgagcattcttttcttggggaatttattcaattttgtagctcttgtattcttagagcaactcaatcgtagctaagacacaaaaatattttctccttgggttcgatattctcccaacacttagttaataaccagtggagagtcactaaagacttttatcttgtgggctcccatggctttggctagtctcaaccttacgaataaggcttcatactcgtcttcattattagaaactagaaatttaaaccttcaagctatttggagccttaacccctctagaaatatcagtggtattcctgccacggattcgttctggtttgatgcaccatcaacgtatacccttcaagtgggaataacagggtctggtaagtcatccatcacttctgtttcattgcattcaaacatgaaggctacgagggcttgccctttaatcacattgtggagaatatactatatatcaaactgactaggatccatcactcatttgaggagcctcttagaggcttctggtttctgaaggacttgccatagcagatggtttgtgaatactttaattgtacgtgcctaaaattacaactacaacttccctgatgcaatcaaaaggaaaatatctaacttctcaattaaagggtatcagattttagcctctattacctgcttattgacgtaatttatcgggtgctgaacttctccatcctcttagactagggctgcactgactacattctcaaagatggctaggtataagtacagatcttcctcatgaactagtttggacaagactcgcgattgcacatatgttctttcaatttcttgaatacttctttgcattctttggtccatttgaacttttgactcttctttaggatgttaaaaaatgggatacatttattggtagattgagagatgaattagctcaaagtagttatctttcctgttgagctttgcacatacttttgtttcttagggggagccatgtcgagcaagaccagtattttttctgagtttgtttctatcccttgttggcttactatgaatccaagaaattttctaaacttgacaccaaaagtacatttcttgggattgagcttcatctcttacttcctccctactttaaaacactttttgagatcatctaattgacctttacttgttttagatttggctagcgtgtcatctacacatacctccatattttttcctaagaaattcttgaacattcggttcaccatgtgctgatatatggctcctacaatttttagtccaaagggcatgaatagatagtaatatacctctttatcggtttggaaattggtacattcttgatctgctacatgtattttgatctagttatacctagtgtatgcatctataaaggaaaataactcaaaattggaggtggcatccatcatttgatcaattttgggtaacaagaagcaatcttttaggtaggccttgttcagatctgtgaagtcaatgcatattcacaatgttttgttcagtttgggtactagaacaaggtagccagccattttggatagtacacatctctgatgaaggtgttcgatatcatcttacccacctttttctaaggcttttaactttcccagatctagaggatgccttttttactgtatatgaggcatgtctttgttaacgtttcaaacatgagtgatcacatgcgggcttattttgatcatatctccatgacaccatacaaatacatccactgactctttgatggtgcttaaaatttcattcatatcatcaggaccccaagcctttccctaagcaaatgactttagttcggtcttgatcacgaattccaacttcctcgatcttttccataggccctgaaatggtcttagagccaatgcagggatccaactcatctttcccttttaacaagattgtgtttccagtcccctaagccatgaaaatggcttgatgggtagccacattataaaactttctcatctccctttgatttttgtgaagagttccaaccctcactatttgagtgggaaatttgaggcacaggtgtttgatcgcagtaatggctccaaaatccaccatggtcggatgtcccaaaatcacattgtaagttgtagggcagtctactacaacaaaagtgcaataataaaacatgctttgggaggtacttggacacaaggttactgggagtcttacctttttcatgggtacaagggtagtcccattgaaccctatgagttgtgaaccactcagggagagatcttagtcattgagtctgatggcaacaaaagcgtctttaaatagaaggtttactgaacaaccattgtttatcataattctggcgacaattttattggaaatgggagtttcaattaccaatgggtcatgatgagggaaacacactgtcttggcatcttcttctataaaggtgataagttggtccatgagcggagcctttgtgccaggagctggttgacttcccatacttctccatcatgatcaaagtccttaattaacataacgattcagcttatttcatgtagttcctccattatgtggccctcctaaaaccattgctacccttccattttgtctaggaggatgtcttggcactagatggtgttagggaaggactctcaagggaactttcttttctagaacttaagctctaggagcattggtgctttaacttgtcctctattcatgtgcaacaatttgtcctttatccatttgtacaagtgacctagccttattaggctctcaatctcatcattcaagtttttgcattcattggtagtatggccaatatcgttgtgatatttgcatcttttgttgggatccctgcgtgaactatccaggtacagaggaggcagtctccggtagtgggtgtttttccttgtggccaagtatacacattcttgggtgtccactaaatcgatataatgggtatattgggagatgtagcctttcttttgcctcttgttctaagtgaacgtgcttcctttcaacgacctcctacttttgaaggtctaaagagcttccgctgcacttgctacagatggtgctaattgagcgagatattgcgagctcactccgagagccaggttacccctagcactctaacactagactaagtcagggtaagagcaaggttgtgggtatatcatggtgttgctaaaaactatatgatgggcgttccacttgcctgtggcgtgataggtggggtaattcctagaaactgcatttcagaaacataccatgggcaaccgatagggtaatatcctccaaaagca

SEQ ID NO: 238963 - DNA, 2977 bp, Cannabis indica
tttattaaaataaaataagtaaacttgaaattaaattgtaccaataataatattacattttataagaatgctagaggcaccatgaataattttttaccatttctcatatactcatatagaacttcatacaaagaaaaaaaaaaaaaaaaaggaatggatttttaggaataaataaaagtcaataatgtgtttagtacacgaggggggagggtgactgctaattattaaataattaagttactgaaaagagaggctgctaatgatgatttgtgtaagcttcattatcctcatacgtctttttttcttttttgtgaaacctagttctccaagaagtttgtctcactactttctaatcttaatttaataatcactcatcattcttacccatatggcccctcacatcatttctatcttctcattcattattcaataaatctttgtttgccctctatgaatgaccacttgtttctaaatggtcccactaaactttaacttctgaatagtgacctttttctcttttctccttttttttttcttcgttaaaacggctcctttagccagatcatgtacgtatatatatatgcatacattgttgtacatgtatacgaatacgaatataaagtaataaatgattaccctttgagctttcgattgtaaagaagtatttttatgattattattaaaattaaaacgtagtatttatgtgaaccaacatggcagaaatcttcttttattcatgaatttactacaaaggtgaagcccgatatcgattgttgcattaagtgattatttatatacaagacataaacatttaataaactgttctcacattccagcaaccaagccttactgatcatttaaaaccaacttgaactactacaactaatgatctcccatttttatatatatccagaagaaatatattcaagattcgaacctttaataccatactccagccctgtctgccttcttaaaggaaatatctcctacgaactcgtttcttggtcaaaggtgaaggagtttctccattaccggggaattcccatttgacgacatcaccgtcccaagaagagcttaccagcatagggtaataagggtgccaactacaatctcggacgggagatttgtgatgcttgagcgtcgcaactagtgcaccacttacctgtaagaaaataagaaagtaagtaatccgtgaggacagatcactatggatgtagaggcaaggcatcaacattcatcacataataaaactttaggttggcacaagctatacttggccattattgtgcattgaaatcaggctaccaggttagttgggaacatttactaacactgacacatgtgaattgaaattttcttccaataaaagattggttactcacttgacatattttaggtaacaatattatttacctattgactgtcaagagtataatattgtagcaaatctttaaataagctagaagcaaatgacccttcatgagccaatttttatgagaagtacaggaataataaagaaaaaaatatggcatccccagacttttccctctcatcatcattactgtttggcagtaaaacaagaaaaatacttcagaataacgagaaaacagtgtaaactgtaactacgtaccaaatcgtatatataaacgcaggaattgtgagatcctgtgtagatgtacttctgaccagtgctgcaatttttaaagaaccagaaatatttcaatcaaaataataaatattcatcaccaatagcaaattgtgacagtgttagtttaaatgtatccaacctattgagaattcagcattttcttttctatttcaaacaaaataaacaataataacaatattaattattatgattattgcttacctgtatgctggtgagaagtagcagcggataagtgtacgcaggactgaatgacccctatatgtaaagattgattgatcacacggatgttttaaatcctttgcttgggttggatagtccatccatctgtagtcccattcatagtttctatacgctggagtgctgaaaatacaaaaatgggaaggaaaaataggttggactttaaaggattctgatcaaatggaaaaaaaattgtgaaatgtgagttatatattatcaagataatgttttccgagctatatgatatgtcataaatcattgcataacaatataagaggacagagttgagttcagtgaaacggattaacaacgctcaaattattatatcattgcatagcaatatcttctcacaattccctgttcctatatccccagctagtttgtgctataactccctttgcagatggtaacatatggctatgagacttgcatccaaattctattaattcctttatgaagttacaaattatacaatcaagatcaaagatagtatctatcagaagtttcttaaaccaaatgaagatttcagaagataagcatacctaatagtagtattagaggatattcccctgatatcccaaagtttaatagcctgatctttaccatttgaaatgagataacgaccatctcccctagtgtcgatgaaggtaataccttccaggtgtccagtcaagacccctgctggtttcccgttagcattgaagcaacgcctgtcccagacctacacaaagctataacattatcctcaatattacaccgcctctgctcattgtgggcctgacatgtacccagcatgcaaacccagtactacacttgggtataggaacgaattgcagaaatagacattgatataagtgatgctgattctcataagttaacaatatccattcaatacaagtaaaatgtaaaacaatattaattccttcaaaaaaaaataactacagtttaagtggtattagaattggtaatggccttctctaccaggccaaaccacaacatagattggatgccacatttcttggtgcaacatgcattttcttttttcaagggaaaactaataaataaacatat

SEQ ID NO: 238964 - DNA, 1659 bp, Cannabis indica
tttttcctttgttcttctttctttttcttttgaaaaccctaatctttccctttctctttctctctctaaactctacctctccttctctattagccgcacgcagcgccaacctcgactccgatgagccaccatcatcgagatcgaagaacccccacctaatacccagactacccaaagacccaaaactcctaccttgattctctctctatttcttgacttatctccttctctattcatcgttgttttcgatatgtctctaatgagccaccatcgttgaccaagggttctaaccatctccgcgtctctctcagaccctctctttctctccttcatcacttctctcacttcgtggtggaccttgctagagccggagctccatgtccccgattgagccatctcttggtcctgatgagccaatcgaagctcaattttaggttaaggtggatgttgtgatctaggtttacgttaagctcaatagtggatgttgtgatttgggtttagattaaggtggtggtggttgttgtggtttttggtagtggtggctgcggtggtgtggtggtggttctggcggtggctttggtggtagtaactatggtggcggtgataatggagaagaaggaagaaggagactagggtggagaggattagggttataagggagaaaagaaaaaaataaaaaggaaatgaaaaattaaagaaaaataatatatatatatattttttataattatttttcttttaattttgaaaagtttaaaattatttttaatatcaatattgcatggaacgctaaaaattttttacgtggtcagtccaccatgacacttaattgaattttttggacagaggtataataagcaaaacagaagtaggtttgtgaacttaaatgtaactaaatgtataattttagtagtattgcagctaatatccttaattaatattaattacgagtataatatatatttatttctggaaaattataggtagacgggaaatatttgattgtggcttagaaagatcaatcgaaaaggagaattttcacattttctatcgctctttgtttttttttcttattattttaaaactaatttggatttttgccccttgaacattgacatgtaccaaatcatgtcccctaaacttttcaagtcgtaaaaaattttccttgaactattgagattgttgaatttaagaatttttgtctaattttattaaataaaaagtcaaacatggatgaaaatttagggagtacaattctgtacatgttaaagttcaggggacatgattttgtaaatatcaaagtttgggggcacaatttagtatatggaaaatctatatattagcaaaattgaatgaaattagaaaatagtccttaaatccaacaatctcaatagtttaaggagaatttttaacgacctcaaaaaaacttaaggggcatgatttggtacatgtcaaaattcagagggtaaaaaattcaaattactcttattttaatttcctttataatttcttttgagactatgtttttggtgtgaaaaattgacgaattcaaagtgatcaaatcaataaggacatgtgaggaaggataaggaaaattcacatgaggggtcggccatgagagcaataaaaaggttggaaaatagatgaaaaatagtaata

SEQ ID NO: 238965 - DNA, 1592 bp, Cannabis indica
agtcgtatgttagttaggtacgtaatgtcgatatatactaacagagtctcccttgctcttcgagccattaatttggtagtggccagtgggggaagctgaaatttcttctctatagaatttaatgctgcttattaacaatatcgatctttccaccttgaatccaagacaagtgggtatttgtttttatggtctaccaatggttgttattttagtatctaccaatgagaaatttacttaattttgttatttcttttccccataaactttgcttaagaacatttaggtgaattttttattttgttatttctttttcataaatacctctcgtctttcctacggtttgttaatgctaattaagcttataatacaaatagaatgaaagttgttaatacaagggaatctctagaccataatcatcagccttttgttattagttttttttttaaactttattatactattgaataatgactagtgaagtcgttagattactgctcgttgccgctgaagtaaataagttaacgtgagaaggcgttcttacttaccagaaaatttgtagagcagtacttaaaaaaaaaagtgaaaaggtcacacatgaagtacacgaaatatggaaaaactgttaccaaaccactcttgttatacagcaaatttatgttaacaggtttttgtattaactgcccttaactatgccattatttcctaccaactgccaataaattctctaacccaacctctacttgggttagctcaacaatggtgcacaaatatgttaaaaaacacataataacataaaagttaaaagtctcaaaagtcagggaagcagatagaatccaacactcgaaagttatcagcaagacattattcagtggtgcaatgagaaggtttctgaacactaatactaaccattttgttgagaatggtgggacgttcaaggattaacctccaaaggttgtctttcagatccaagccagatcacgagaagaggagtatcatcgttggcttgaagtctgataattacagtagagagatattacttcggttactaactgtggttgttaagccagaggatagtgttttggccattcatgttcaagactcagatgattcttttgatccaaacacttttcacatccatgaagatctatgcaagaccaagcaggtagattgctttcaatcctctgatcagtgaaaaaataatattgtttctgaggtctaaatcattggtgtatcattgcaggttgacttccaagtcaaggtttgcataggcgattcatacatttctgtattaacccaccaagtaaggctcacttacgccacaattcttgcccttggatccagcatttcagggtaatgaaactagttctaactcctattctctcttagtctctttctcaagaatatgtaatctgtttttgacattgtgatggtggtatgaaacgtttatttcatacttgttctacaggcctaatgtttcagctctaaactattgcctgaaagcattgccaccaacatgtactctcttggtaataaacaatgtaggaagaatcctactccagagacctggaacatcccaacaaggctctcgaagg

SEQ ID NO: 238966 - DNA, 9144 bp, Cannabis indica
aaaaacagtatatggagtaattttttttttttattgatatgtagttatttaattatgattagagagttgataactttttgataatgaaatatggtaacaggcaattatctgtgtctaatttaatttatagattattttagtaacatataaaattatttatattacatagtaggaaaaaatgaggtgagatattgtaggagttcttcaggtccatccctcaataacttcaataacttatcgtagcaaacatttatttatcattccccttcataaaaggaaacacatttatttatcatagccacagagtaaatttacctactaattattattcttggctcttgtgttttatctttattctaaaaagttttataacaataagaatgagtatgttattaaatattagtaatgcctagtattatttaaaagtagcaatttttttgattaattagtaatattatttaaaaataaacacccatatttaattaaacaaatagaaattaagacacctaaaatagtgttgcacactactaatttctttcaaagccttaaaagaggatagacattgtgttaaggaaaaatggatccggatttaagtttggattcgggttcgggtcaaaccaaaaccgtgcatttgttaacgagccataataaaagcaaaacatttgtaatattacacagccttactttttgtcgatttcttctcggccttcacgattcccatgcacaaattctgtctaaaatgtatgtatgtatgtatatacactacaaccccttctttacacgtataatactttggtatgtatgagtatgtatgaccaattacatcaatgatgcttatgttatgtatgatgatgatgatgatgcaaatggtccacaccataagtcctcctctccatactatgtgcatcaatacaaaataatacttactattactgttgtaaccattatggagtgagaagctgtacagtagtacactctcttgtctattatttttctatttatttatttatatatatatatgtgtgatgaaagaaagagaaaaattaaaaaacaaaagaagaattgaatcgtcaaaaaacgtctcctctgatatgtctgtctaacagagtggctcatatcagcagcaacagtagcccagtaacacagcagcagcagcctcttcctatttattactccttttcctttaattctttctctttcatttttcacatcacacagttatataaacagagacagaatattatattatattatattatatcatatcatatcagtatgtgtatcccttgtgctatttatataaaagtgcaaactttttcagattaatctttgggaaaaagaaaagcccagaaaaaaaaaaggcaagacaagggtaggagaggagtaatggattagcattggccacctggcttttttcattttctatttttcttttttttttgatttctttatttctttctctgtcacaatatacaaagccacaaacaaagaaacatatatttacacaagcattctttctttctttgtttgtttctctttctttctctttctgtgggttggtgttatagaaaaattctcgagattggcgtctgagataaagaccatcaactagagagactttacataaaacccttctccccctctttcactgtttcaaaaacttacaactttgctcctttcattcatttttcacttgggttttaagagagaaaagccagatatttagagagagagcttttgtgtgtgtgcttcagagagagagaaaacttgaatcaagagcaagctgatgaaggagtgtggaggctctcttggtgaagagagcctaccccgtgagaatatattgaagaacaatacaaacgaagaagaagaacagttgataactcaaactttctaaagtaaaaaaaaaaaatctctctttattttttatttaatttgtctagaaagacttaaactttactgggttttttttttgttgtttttactgattctgtttcttttttcctttgggggttgtagtttagctctggttttgtaaaaggggtggtattgtatcgttagatggctcttgtgatgcacaaggattcaccaacaaataattgttataagcaaatggataatagtaagtacgtgaggtatacaccggagcaggttgaggccttggagagggtctactcggaatgtccaaagcctagctctttaagaagacagcaactcattagggagtgtcctattctctctaatattgaaccaaaacagattaaagtttggtttcagaatcgcaggtaatttcatacacatacatatatgtttgtatataaaagagttcttcaaacacaagatcagttctttctatctttctttcctgttatttatatgaactcttcattttaaatcataaaaactgttgcttgtacagctattttgttaattgtcattttctgtggcttcttgttttacacttgcctacattctaattgatttttgggtttcattttctggtgtccttttctgaagttttgagttcattattctgatacatacatatatgtatatataatataccataatatttttgtcaactgtgattgcctaaagtgtcatcatttcgtcttatttttgatcttattttgaaagcaatgtgagtaatcaactcctggatctatctcttctattgggtacatcaaagatgtgtagatgtgtgtgaaaagcattagttttttttttcttttcatttactatttttcctgtgaagtttctttggaatgtgtttttttgtctcccacgctcctttcttttcataaaagtagtcatctttctttctttttttcttcccattttttatactctagtatcgatttaatgctaagaattttatgtaataatatattattctctagatttctttgtaagtttcaagagattttctttttatgcgtgagttttgcactctttttatgcttgcagcctgttatgtgtggtttttagctcaatgaaaaaggatttttgtccatttcttgtggacaacattgattttttattcttctcccttttctcactttacctactttttttttctttaataatagttaaatctctttctaccttctttctctcctcatttatggatttctagggaaaagcttttgtttttaaatgtctgacaatttcaactgaaaaagggtttttgttgccatgatcttttttctagtctaaatgaaggattatgatttatgacagcgaatttagtgggctttagcatgccttcacttgttgctttctctcctatttcaattaggtttttaatgaataaaataatgcatctgtagatctcagttttccatttaatggcagtagtaatgtgtaagctttggagaaagaaataataattataataataacaataataaaacaaaaacagtgatgattatgatgtgtgaggtctcccagaacatggtttggcttgttaattacttaaactcattttcttgggatgatacgttcttgcctcttaatttgtcactttgtttaatgaattctaaaaactttggtagccaaagactaaaaagttcagtttctttttcctaatttcaatcatggtcagctgtatttttgtcgttttctgcttctttattcttcttttctttatattataaaaatgggggcattagtcagtgcaacctatttttgcccattcagtgatatgatagcatagtagtaattttgggaccccttattgttttaacttgatttttattaaatcattataatataattcaaaattaaacaagttaacaactttgttaatgcatatgtactctttaacaacattgcttatgacagtattttaagttaactttcaataaatgactgtcttttttagctttcaagtgatgagtgattctctaaattcttatgtttttgtatgctctttcggtagatgtcgcgaaaagcagaggaaagaagcctctcgacttcagacagttaatcgaaaactgtctgctctgaacaagttgttgatggaagagaacgatcgtttacaaaaacaggtctcacatttggtgtatgagaacggatttatgcgaaatcaactgcacactgtaagaagttacacaaaattcagtctttgcttgatgaggtttatgcttgtgacataactttctaataatagtaatgttttatcattcttaataggcatctgggacgaccacagacaatagttgtgagtctgtggtcatgaatggtcaaaaccaacaacaacaaaacccaacacctcagcagccccagagggatgctaacaacccagctgggtgagtaatttgtcatgttaaagtttattgctttattacactatttgagtattttggtttaagtaatttctgaactttttttacttaccagcctcctagctatagcagaggagaccctggcagagttcctgtctaaggcaactggaactgctgtcgactgggtccagatgattgggatgaaggtatatactcgaagcctacaccgtaccgtctcttacttaaatgaactcaaatttcatgccatgtttttaatttgtaatgtgtgattttgtagcctggtccggattctattggtatcgttgctgtttcccgcaactgtagtggggtagcagcacgagcttgcggtcttgtgagcttggagcccacgaaggtacttttatctgttgctaattgtgatctcttctactgaatagtacaaataattacccttttctttctctggtctaacacgattttaaaaattgactataggtcgctgagattctcaaagatcgtacatcatggtatcgcgactgccgttgcgctgatgtattgagtgtaattcctacaggaaatggtggaaccattgagcttgtatatatgcaggtattaacataagctattcttacaaaaatgtacaagtttatctttttatgaaggttctattctatgattaaatgtcatattttactaacgaaagtttcttcccaccagacgtatgcacctacaacattagcagcagctcgtgatttttggacactgagatatacaactagcttggaagacaacagtattgtggtaaatatttttactaagtttgaattttgttgtgttgtatgtacatatttcttacaacgtaaaacttctatattgcagatatgcgagaggtcattgactacttcaactggtggtccgactggccctccatcttcatgtttcgtaagggcagaggtgcttcctagtggatacctaatccgaccctgtgagggtggtggctccagtattcacattgttgatcatgtcgatttagacgtgagttccaaacgaatccgaactttcttaattgttccattatttttacttagaaaactcaactgtttttctttttcaggcttggagcgttcctgaagttctcaggccactctacgaatcatcgaaaatccttgctcagaaaatgactattgctgtaagaccaataaattttgtttgtttattgatagttgtggtctttgtaatttatgtttgacttttgtttcttctgttaggctttgcgccatatacgacaaatcgctcaagaagctagtggagaaatacagtatggtggaggccgccaacctgctgtcttaaggacatttagtcagagactctgcaggtaaaatctttcatctgtaaaagcagtaagaattatatatattttgatttaacttgctttgtttactttgtattgttcttcattggttggtacttctttatgcatggttataggggtttcaacgatgcagtcaacgggtttacagatgatgggtggtcgcttttaggtagtgacggggttgaggatgtaaccattgttgtcaactcatcttcaaacaagtttctcggttcccaatacaacgcatcaatgtttccaacttttggaggggtgctgtgtgccaaggcatcgatgctacttcaggtatgttcaacttactgctttaaagtctttgtctctgctgtggattggttttgactcgatgttcatgtctctgttgtgaatcagaatgttcctccagctttacttgttcaatttctgagggagcatcgatctgaatgggctgactacggtgttgatgcttattctgcttcatgtcttaaacccagtccttatgcaattccttgtgcaagatctggtggattccctagtagccaagtcaacttacatctcgcccatactgtggaaaacgaagaggtaagatcttagccactcgaaagaaactttgcctcgcctattcttgttataatattttgtttggtatcttaagtttactttctgtaactaaatgcagtttcttgaggtggttcggttggagggccaggctttctctcccgaagaggttgctttggcacgggatatgtacttactacaggtttgcatcacttcacaacttcttattttgttgtagttttttattttcattttaattttttaacacatccccgaacatgttttggacagctttgcagtggtgttgatgcaaatgcagttggttcctgtgctcagcttgtttttgcacccatcgatgaatcctttgctgatgaagctccattgttaccatctggttttcgtgtcattccattggatccaaaggcggttagtaaaattgttcaccttaattcattaattttcatctgaaaggacttccctgttggtcttaatgtcttatgaactattttctttttttgcaggatacacctggtgccacccgaacactggatttggcctctactcttgaagtaggatcaggtagtgcccgtccagctagtgaagccgacgcaagttacaatctcaggtcagtcctgactattgccttccaattcactttcgagaaccatacacgagacaatgtggctgctatggctcgccagtacgtgcgcagtgttgttgggtccgttcagcgggtcgcaatggcaattgctccctctcagcttggctcacagataggaccaaaagccctacctcaatctcccgaagcgctaaccttgacacagtggatttgccgaagctacaggttttactcactatataagttaacaaaatgaagccttttcttatagaatattctcatttcggttttaattgctttaggatacacactggaggagagctttttcaaatggattcgccgccatctggtgatgccattttaaagcgactctggaaccattccgacgcaataatgtgctgctctgtgaaaaccaatgtactaacccgagcctgactccaaactcgtcttttcttgatatcgaatttccagctgaacttatcaaacttgaaaatacaattgcaggcgtctcccattttcacctttgcaaaccaggctggacttgacatgcttgaaacaactctagttgccctccaagatataatgctcgacaagatccttgacgaaggcggtcggaagaatctgtgctctgagttttccaaaatcatgcagcaggtaattcagattcgtggggctgtagccaactgaactgagtacatcttgtgcataatctaatacccttttttgtgacaattgcagggttttgcttatctaccagccggtatatgcgtgtcgagcatgggaaggccggtgtcgtacgagcaggctgtcgcgtggaaagttctgaacgatgaggactctaatcattgcttggcattcatgttcatgaattggtcttttgtgtaatgattgaagaacaacaccttggcttattatatatttatctattataagttatatattatatagcctactacttctactactacaaatatatagttatgacttatgaactggatttatttctatgaaactcctccttcccattccatttcctgtatgtaactttatattttggttaagtggggtatcagtttaatataatatggatatttctttctactgtttgagaaacaaaatgttaattagaacatatgaaaatgaatgaatcttttggaccaaactcaagtctaaataacttttttcaaacaaaaactctttattgtctaattttgtcgtggcattttgaaattttggaccatgtttactatgagtgaaacaaacttaaaacagtaattcacaaaaacttaaaaataataaaattaaattagaaatgtttaatgggaacgttattcttttgtaatactatattcatttttttcaaagaacacaatacattttaataacatgttttttccttcatgattagtgaaaatataaaccaagaaagtatgtaacagtttcaaccgaaaaaaaaaatacagtattaattgagtgaaactaataaaattaatggtgagtttacttatatataaatacacaattgacatcttcgattgggggcaacatttgtagttgttaaaatacacaaatcatgttaaagtattagggtgattttacaatacactcccttaaaagggatcaactgatacacccttgacttgtttcggcatctaaaaataattttagtctaatttttttttcatattcatgtacgttataactatttaagataacttacaaaattttaagaaattccgaataatttataatatagaaaataatgttcaaataacttattttacacgcgtataaaataaaataatcacgcgtgcaatacactatttgaacgtagttttcggcatattaaacttttctaaatttcttaaaattttacaggttgtcttaaataactataacatacatgaccatgagaaaacttttgactaaaaaattatttcgggtactaaagcaaatcgggatgcatcaatatatccattttaaggaagtgcattgtagaatttcccaaaatattatattttttacttttctctcattcacctaatctatatattaatataaaggaaagcacaaatgagatgaagtggcattctataattattttttggctatttatctattttattaggattttagtaaatttgtgttttcttaattttgtgcatgttgaatcatatgacttcttaataattttgttttggtaaagtcccacatggattacaaactatatatagtggttatactataggttataaataacatattcttcatttactttaatatgtccaaaaatgtttttctttttatttgtatgggtg

SEQ ID NO: 238967 - DNA, 4452 bp, Cannabis indica
atttgtaaaataatccctatttttttgagtattgtaagtgtaggcctttggtgtgaccattttttttttctttaataaagtttgtttattcctcaaaataataaataataataaataagtgaaacttaagtctcaacgaactcaacatgccaatctagtggtcttcattcctttgttgacttagtcatactatatcctctttgtcttattacctttagctttcatcccttatagtttctaacacttggaattaaagagaagagagtgtgtaacacgaccacttcacctaatggtgccgtgcccagcattttaagaactcacatatcgtttattactttcaaatcaatattaaattttatataatttaatttaataaataacataaaacccctaatcaatcacaacgtgccatggatatgttattaagcactatataatacataataataataataataataataataataataataagagtattgttagctcaaaactactgtattatatatatttatatagccggttgacattgacccttttgatacctttctttcataaccatccaaaagccaaaagccgaaaaaaaaatccaatcttttctctctttcttgttcttctttttgtttttatcttatgtttatgtaaacaaactttctcttaattcttcttcttcttcatgtaatctgccaaagacccttttgacatttctctgcatattttctattttcttctctgtacaatggaaaataaagagcataacagattttcagaggtgttaacagagctaatatcatcagcccatgaagtcacttcacttgctcaaacctttgacactgaaataaaaaggcgagtcttttttgaattttcaatcttggttgatagatttgttccaattctcaattatttaaaacaccatgttaagatcatggcacatccaccagttcaaaaagcagttgaatcacttggtaaagagtttgttactctttctaaagctataataactaacccgaattcgaaaactatggttaaacaagttgaagacatgcttcatggcttaggtagatcattaggccttgttgtctttgctagtcttgaagtttgtactgatttcaaggaacaaattgggacactgcataaggatttggtgagtattaagtttgatatgagctcggttgcgagttcaacaccaagttctagccactattcggagattcttagcgaaattgaagaagaagaagaagataaaattcaagaggaggagaagattagtgttggtattgatgatgttgtggtgacacttaagtatggtgatggtgaaaagcttagattggctcttatgttgttaagtgatttgattatagagaagaaagttggtaatgattggattgaagatggtggtgtcattcttgctttgtttaaccggttaggctctagtaaacccgaacaccgattgatcatcattcgtttgctgcgaaatcttgcattggacaatgtcgaaaacaaggtaaacaagcatgtcttttttcacttttgatactaaatttgatgtgaaattaactaaggttgtgtctggttagaggtaatgaaatggaaatgaatcaaagttcagtctattcctttgtttggttgcatttaaagtatttggaatgactaatctatttcgattagtaattcttttatcaattccttttatgcatgcattttaaattttatttcattcctattcctgttctgattctgtgttttcattccttccaaccaaacgtaccctaaggttcttgactattagttgtaatagctaacaatgtggaatagtgtgcaggagaagatggcagatgtggggtttttgtcaacattggtgaaatctttgattcgcgaagaggaggaaaggagggaagcagtcggcctcttgttgaatctgtctgaactctcatccgttcgaagacagattggtcgaattcaaggctgtatcgttatgttagttgcattgctaaatggtgatgatcctattgcttcaattgatgcaggaaagctgttaaatttattgtcaagtaacactcaaaatgcacttcatatggctgaagcaggctatttcaagccactagttaagcacttaaaagaaggtactaatttcggtttcaactgaaaatttcaattctattggccttgttgtgataatcaattgatgtcatacctttttgtaggctctgacatgagtaaaattctcatggcaacagcactttcgaggatagagctcaccgatcaaagtagagcctccctcggggaagatggggcgatcgaaccccttgtaagaatgtttacaactggaaaacttgaagccaagttatctgcactaaatgcattgcagaacttgtcaagcttagctgaaaatgtccaacgattaatccattcgagcattttatcgcctttacttcagcttctcttttctgttacctcagttctcatgacacttagagagcctgcatcagcaattctagctaagattgctgaatccgaatctattcttgttaatcaagatgtagctcagcaaatgctctcactcctaaacctttcgagtcctgtaatacagtttcacttgttacaagctctcaatagcattgcctctcaccaaaatgcatctaaagttcgaatcaaaatgaaagaaaatcgagctatgcaacttctcttgccctttttgacagaaaccaacttcaaaattagaagcaatgccttgaatttgcttcatactctttctaaagatttgtcacaagaattatcagaacatataggagaagcctacatcattataatcatcaacatcatctcatcctcatcaaccgagctcgaaaaagcttctgcattaggaatactaagcaattttccccttagtgataagaagtttacagagttgctcaagagacaatgcttagtaccactcattatctccacaatgacttcaaaccctgcaactaaaacacttgacacacaacacttggaagaaagtgtttcgagcttattagttcggtttactaatccttttgataagaaactacagctctattcagcacaacatggggtgatccctttacttgtgaagttgctttcgagtgaatcgtcaattgctaaacacaatgctgcaacttcactagctcaattgtcacaaaactcactctcattacgaaaacctaaagccccaagatggttttgcactcctccttccgcgagtgcatactgtgaagttcacgaaggattctgcgttgtaaaaaccacattgtgtttggtaaaagccggtgctatatcgcctttgcttaaagtattggaaggtaaagatagggaagcggacgaagctgtgctcggtgccttggcaactctacttcaagatgaaatttgggaaaatggaagcaattacatagcgaaaacattacaagttgaagccattgttagagttttggaatcgggtaacaataaggctaaagagaaagtgttatggatacttgaaaggatttttaggattgatgaacataaattacaatatggtgagtttgctcaagttttacttattgatttggctcaacaaggtgattctagattgaaaccggctattgctaaggtgttagcacaacttgagctattgcaggatcagtctagttacttttgatttgaacataaaatcattacatgtgtgtatagatattcattgaaaatatgataaaactttgtaaaggttttttttgacattagtacatatttcaattccaaattccttttactcaaaaatagtaacatgtatgaacttcttaaagaaaataaaccaggctaataatgctacaacatgatacattacaatatgattattcaaaccaaaacacagaaaattaggtagtaactacatggttttttcactctcaaagaagcatcaaaccaccagatttttcgcaacctttatccggcgacgacagtgacatcaaagcaagcatcacataaccaacagcagcatagagcaaagagactgcaaaaagaaaaaagaaaaggttaatctgtttgtgtcctaggaaaagtaaatgcatttggatcctaattcaagtaaaatatgataattttgaaaaacaccaacaaaaattgtatatttttgtaaatagcttttttttgagtgggccttaagtgtaagcttgctctgccttagcctagccttgcaccagtgtttacacgctgcgaaaatatattattatattatggcaacatgaaaacaatacttttttctctctaaataaccacaaatccatgtaaaaaaaaatccatgtaatataattttaagtgttttatgtaaatttttcaagaaattgtacatttttgtaaaaaaatttattttgtgggccttaagtgcagacatgctctaccttaatctacgatcggccctgatgtcacgtaacaaaaaaaaaaaaaggaaaa

SEQ ID NO: 238968 - DNA, 3246 bp, Cannabis indica
ccgctggagccgcggaccccgactgggaaggatcttatcggcgttttacagaatcatccgcagctgtttcaccttgctgttgccgatgaactcaagcagttgtctgatgatcgaggtcacgctcttaatcggatgaacctcaccgctggatcccctgatgcctgccttcacaggtgaagaaaatacttaaaatcccttaaatatatgtttttctctaattgaatactcataattatttggtaagtgaaattcaagtttagtgtttggaattcatatccgattactgtgattttgattgagtttgggcatgatttagagaactttttgatttttcctttctgttgtggtaggaatctgactcattattcatgatactacgattcagtgaatcttcaacagctttaactatttccaagtacaatgaaaggcttttcaactaattgaaattcaagtcttgacccttaattttattaaattattaaaaactcgagatggtattattgttttcatatttatttataaacttttcatataatacacgttagaagaataatatattagtaaaattggatcccaaagtccaaagttggcttttggggtctccaaatgccactctataaactacaagagaaggatggtgaactttgtagtttgcagcctcaaatggctttggttttttatccagttttctagatgaatagtggcatggtgcataatctgcaaaatatttttttcggagtagtacaatatcttactttaaaattgacaggacacggtagcaaatgtcttcagcttctgggaataaagtgggaaaaagtattttactttggggctgatgatagacttttacatggcatattgctattaagggacgtcagaccatcttacatggcatgttttaattttaaaatggaatatgtgggactcccaagtcccaaatcaatctcaatgggcaccaaacaaaatatggtgttgggtactttgggtgctatatataacaatgctttttatagtttcaaccatgttccgacgcttcttatcatgaatatttttgtaaaattacaaatctacccttcatgctgctggttaattagtagagttttctttacttcggtttgacttttcactggtctgatcattatcctttcttcaatggcgagcgactactttaatgactcccttgagttcggacaatcagtaaaaaagaatagccccagatgcttctttggcgactattgcatttttattactaactaccaagaagagaacactcagttgcaaatcctttacccataagatcccgttgactagtcaaaatggccagtcctggggcagctcacccctttggacaagtagtcctgtagggctgtggacatctatcacttcacagtgtaggccccttgtaaccttgtcctgcagggtctggccctagtgtagctgtggtggctttctaaaacaaaacgtctactttttttattaacacccaattcattatgattaatagaatttcttttaacgttattacctcacctcagtcttgactccatcattgatcagctccgtctgtgtacaatgcatggtctggggcacctgatatctctatgtgccgtatttacagatgtttgctatattgaaagaagataaggttttgttctatgtgatactgtggttttcattcttcatgtccttaatagtttgacgagtgcataacataatggtgatcttcagcagggtttaacgcttaagccatgctgactaacgtttttgtgcacagtcaaatctctaacaaggatattgtcaaggaatgtgaagtgttgcgtaatgatgctttagtatcgtaagcaggtttgaggcggatgagtcaatgatggaattcgttggtgggctgagtaattgtatgtttcaacttacaatgtagacatgtaatgtatatttttattctgacaatacttgtaaataaattccaggaggattgcacaaatgaaggagaaggagtgccagcttgcagttgaagatatcatgtatctactggtgttttacaaattttccgagatcaaagttcctttggttccaaagctttcccattctatatataatggacgactggagataaggccttcaaaagactgggagctcgaatcaatctatagctttgatgttttgcagatcataagggatcatgttgctgcagtcattggattgagagcaaactcaagtgtcactgacaactgggcaatcacaacaattggcagatctgcacttcgtcgaaagtatgtgtcctccatcttatatggatactttttgaagtctgctctgttgagactccaattagagcaatgcgtggctttggacagccaagatcttcccccaaggcagagggcatctattcagcaccatggaattaaaagtcttctgtttgaccgcattagcagcatgagatccgagtcacagaacctaggactaaacagtcaggaaaagcagcctgttgaagatttgaaatgttatgtgatgggttttgatcccgagacattacagagatgtgcaacattgaaatctaaggaagccacgaatttgattgaaaatcacagtcgtgctctttttggggacgaggaaacttgttcactcgaggctgaagaggttatcttgacctcattttcgagcctgaaaaggttaatattagaggctgttgcttttggatcgtttctttgggacacagaggaatgcgtcaacactgtctataagctaaacgagaactgactggctgaaagaagagttttttctattgtacaaaacacgagcagtgaccgtgagatgatgctttgaggagcttacttctgtaaatagaacgatccttgccgcgcttggactctgcgatgaaagagagctctctcagatttaccattgtacatagtattttagtatatagttttggaagagtaagaagcaccacctcagtgtgtgttgttctaaactcaaatatcctgccagtgtaagattttatgccactattcttacttagtggtagttggttatgtttaattaagatccttgagtgaggattggtttaaactgttttctcctaattaataagagatatcagatcttaatatatgttttctcctaatcaataagagaagttagatgatctcagtataatcggttttttcttttatttgatgactaaaatttgtataaattgttttttccttcttcttttgctctacttccctgatattatgtataatc

SEQ ID NO: 238969 - DNA, 1779 bp, Cannabis indica
tacataaaattcaatgtctttgcacttaggatcagaataacttttggttggatgaacagccaaatgtactctgggtgtacaggaccacgccctactccaccacatgtgagactactttctccctggcatatgagtgtgaagttttactccccatcaagatgaagctaaactcgttttgagtgaagaatttcattgaagaagaaaatgaaaaagttatggaaaaaaatttggatctcttggaggagagaagagatgcggcccaaatgaaattggcagtgtatcaataaagggtggcacgatactataattcaagagttgccttcaaggtcggagctttggtgctaaggaaagtcctcccaaacatcagggatctaggggcaggagtgtagggaatcaactgggaaggcccctatcagattgccaaggtcatcccaccaggaacctgcaagttggcccgcatgaatgatacagtaataccaagagcgtggaacgcagcacgcttgaagaagtacaattgttgaaaaggtgagtcagaagtactctttagttatttgagtttttgaaatcaaggagacggcatgtgaggcagcactacaagtttaatgaaacaaacaaattcttccttagaatatataaatattgcattgagatcagtcaatcataccttatcataggtagtcaaagtaatatctttcctccttcaaaaaataataataagggaggaaaatataagaaatgagctatgcacaaaactcaagtgtacatcaccattagttatgttgcatacttgggaggcaatggagagaaagtaaaaaaaaaaatctaagtcgacaaggactagctacccttgtttaacaaaagaaatacgtttttccaagtgaaagtcgcccaaccaaaagaggtcttgaaggatgctcatggcccaatgctgaaacgagatggacgcctctcaaacgttagcaaacactcacaagtgaagaggggatgcagtcaactacaataagcccctcacatctgagtaaaaggatgaataaataataagaggatgagatcactcaaagagtaatactctctcaaatgaaaacttgcttaccacagtggagaaagtcacttggccaaagagtaagtctcagagtcactcggccaacatcagttaaaaatttcactcaaccgcatggtgtctaaggtcactaggtcgtaaaaaatatatagaaaaaaagggttaaaccaggtgaggagaatttgccactacactaaggtgttgttatgaagtgaaattcaagcaagggaagccccctatatacaatgggcacatcctcaaagaatgcaaagaagataagactcacaccgcagtaaggaaaattccccaattcactcagtcgataagaacacttaaaagaattcttgaagactgggagataagtgtcaaccccaaaaattagctctgataactttcaagattagtcacctcatcatccaaggattaatgagggcgaattcgattcacctacttacttgacgtgcatttctcaaagtcaccagcagtacttgcggacctcaagatatgtccaagtggatctaggccaatctcgtgagttatgtttgcatgtgtgtgtgcgggtcgggggctcgcatgcgagccttgcatgaattgtttgcgagtgcgtcgaggtgtgtgttgtgtgtgtgttggggctcatatgcgagtcctgcatacatgcaggtgtgtgtgtgattcatgcatgtgttttttgtgtgtgtgtgtgtgttggggctcgt

SEQ ID NO: 238970 - DNA, 2120 bp, Cannabis indica
aaaaatattaaaaaaaaatgtaatgtcgcagtataaaagtaaaaaaaaaaatagtacaccatataaaaatcctatctttttttagggtaaggaggttgctacttcaaagttcaaaagaatgaaagaactaaagaaacagtgtaagcctcatcactaatccagtaggtatcttcatcaagtcgaagtgcgccttttttggcaaaacgtggactggtgtgtttactgtcctatcgatgcagctaaccttaaaacttgggcactgaaagagaagtgtcctcagctgggaaataagatcaataaaaatactacaacaattatggtgttcaaagcatcaattattaacttgtaatctgtctctttgatgtgaatgaggaagtcttcacgaaaaaaactacttcaggaagatgacgagagttttgacttcttggatatgaggttccccaatttcaaaataggggatggaaaggccatcgattgtttctccgttgctgttacgtacgtagaacgcctgcgaatcctggcttatttatgtgggtatcaatggttgcacagtggatagcttggcaagtctaggagggggagcccaaatagcaggagcctttaggagaataagatggtctgcttgaagagctcgatctgcctctttagcttgagatgcctctttagcttgagaatagtcactaagcaatgatcttgtagagtctagcagatggtggtgttgaactgccaaaccttttttttttttggtagctgagttcctatcatgacaaataagccaagacaaacaaacaaataatccaaacaaggtgatgtatatgaaataaatagaatatattaaaatatgaaaaaagtaaagttttcgtattatattttaaatgatatagtagagaagctaatgtactcttaatggcttggaaggaatgaaaccataagaataagaataggaatgagaatatgaataggactggaatggaataaaatttaaaatacataaaaaaaattgataaaaaattattaagttttttctcatcatgcattagaagaatctttccttttattatttttaccgtattaaattatctaatatttaagtttcttttatttttttaaattttttttggtacaacatatatacttcaacaataattaatagatttgcaacaatgtatttaagaaaaaacaaatttcgttaaaacatgtctttttcgtagtgttatactaactttataaatattttttcttttcaactttatactttcatatattattatttgaaaatgaatgtgtataaattagtcagagaatatatgtttttgacaaattgcgcgtatacctttgacaagtaatggactcttgtagtatttattttgacttttatttcaagtaatcaaatatttatataattaaagagatgttataaattgtagacatgaacacatattaaacaaagcaaatgttatgtagtaaatttttttaaacgtagaaaattattaggattacaaaatataggaaacttaatataatttattgattgaagagtattacacttgcaagaagtcactaggaagacattggattgaacagaaaattataaagttgtagagccttgagaaataagttagctccatcgtgcatgcacacatgcatgcaagatgagcaattagttaagtgcggcgcgacggccacgcacgaagcattggcataacaaagaacttcatgcgtccgacatcgcaatggaaaccattgctctcgccacaggcaaagtagtagggctgccacttgtccaacaccacctcaaatccattccccacaccttgtgttgcgtttgcgagcttcttagcattgctcagatcacacttgatgaaactcctcaagtccgggagctggtacacactgtgtgggtgtgagtccttgcccactggtggatcatatttaaaaactgcatgtacaccaaaatacattaaaggttttgaattttatgatgggtttcatacaatatattttctgcgaatttattatataataaaaggtttaccaagaacgtcattgagatagaatgggccgtgcttgaaagcccaatcagtgtaggtaaagttgaagcgccagtgttgagaaccacc

SEQ ID NO: 238971 - DNA, 5979 bp, Cannabis indica
ttaggaaagggaaaaaaaaaggtaagtgatattgaaagctcaacaaccaatcatatagtgacaagtaatcactacttgtgagggacaatattgtaaaaaatattgttattgggcactagtggtatttaatactacctaaaagtgacgtcctataattagtttgtgatataatctaaaaattattaatttgagttatataggactcgatacttaattatctactaataatatatatgatactgaaaaaagtattagacactactgataataactaacatttttttattgtaaatattaatttttgattcacacacttaatttaacttattcaatgctcatttaactacaaattgagagattaacccatgttttggcttgtattcttcgtttttttttttttttcttaagttgaatttggattcaactccgattctcccataatttgattgagtgaatagtttttaattattagaacctaaagtaaattaaaatagaaatgtattttgtcatttttttcaagaaaaagagataaaatttaattattgcatatatatacatatatatacaaaataaaaaatgaaaatctttagaaaaaaaattggaaataattaaaaaaaaattaggtgagtaatttttagtaaaagagtgaagaaatggtgaaacaagcggccacatttattttttgacacgttttgctaggatttttttgattattattatttattgaaaaagagtatcaaccgcgaaacatcaagaacaagcactctattaaaataggagtgaagatttattcaactacatcatccactattattaagttcggaatacaagtaggattccctaaatccctgaccaccaattatattttttaaaataatcgacaacaccattacaagatctattacaatacacaaaactaacatcttggagcctattattacaaagaccaataatgtcatcaaaattaaatcccaaataattagtaatattagttttatttttcagtttaatcacaatactcaagcagacaaactcaataataatatgttatactcgaaggagatgcactaaaaaaacgtgttgcgaatagttaacgcttcagccacttcagaaacaaaacaaccatccaaatgctaacttgtcgaaactataggatttgctttgcatttcattactctttttctcttcaaaattaattaagaccatcttcaaatattattttagtgtacatttttttattgtatattacttttggtacaacaaatttaatgatttaatatcaaatatcattccaaatatgatatcaaataaaaatattttgctttaaagatttcatattttatattattcatattgataataaataataactaatttatgatgtaattatataggcaatcactcaacaaatagtttaatattatttttaaaataaattaaaagaggggctaaaatgaaaaaaaaaaaattaatccaccaatttagtgtacatttaaaatctaacatcatttatatatagtgtagaacttgggacatagtatacacaactttagagtgaaatgatttgaaaatttcgaatcgatttattataataatgtactattgaagatgctctaatacactaacatcttcatcccacatctcaaattttaaataaaaattaaataaaaaaattatttatgtagaaagataattgttgaccgaggttttcgacaaccaatataataataatatttaagaaagctgtaagaagttaatacgcaagatttttacgtggttggggcattaatgagccttagtccacgagtctttgttatttacgagagtatttattacagagaatgttcttggtggtttttctctctagttcttatgaaacccagaattctcaacccctgccttaatgagtttgggggtatttatagtgtttttgtggggtgatccccagaactgaggtacatgtctttctgtattattcagtaaaggcacacattcccaacgagtatatcataggaaatgcatggtctaatccctaggctttttaggggttagatggatgtaatccattatcctttcttgactgatgtgatttctcataaagtagccgtcactaggctcattaatcatagcgtagtagctgcaaaaggggggttacgccgtcagactttaatacttatggcagtttcaatacgccttctcccatgcggtattaaatgcgaagtgactgttcagataggatttgatacctcccggaggtgcttcgttatagccttgctctccgggagtatgtgaaaccctcatgccttctccgagaggcatgttaaatgctgatccttttgattaaggagacttggtcgaattatctcaaagtcttgcttcttcaatctacgtgttacagtaagattggtccacgtatttttgacaaaataaagggcaacaataataattgtggcttaacttcatgtaaaattttgttaattataacatttctatagattttatagtaactatttatgtaaaaaataaaaactaaacggtaaaacttgattagtatataattttgttgttaattacttttaaattatattttacatatgtaatcaacgatcaaaaaaattaaaactttcctatttttgttattaaatattttttttttaatttaaacggtttaattagttaatttatcttgtgttgattatgctcgatgtagagtatttccatttaattttcaaaaaaataaaaatatatattttttttttctatgattcatgattattttgagtttttattttcactttcaatatggttcattgcattgcattgatggtgttttattacatcaatctaatagaaatctttctttaaaaattcaataaatgctgaataattaaaataactaaataaaaaatatataaaaaaaatcaatttaattattaaactatagtaagtattaatctttttcttgtaaaatttatcatatacatactatacttatggttatggtcatatttaatgtacaacaccgccacaacataaattactttttcctttttttggttagagcaaacataaattacttggaaaaaataattttccatgtgatattaaataattttcaattattaatgagtgtttattttcatttatacttactgacaattttttttaactaaataaatagataccttttctattccacactcaaacactagcagaagaagactcaggtgactagtcattaacagtaggaatagaaattggtgggtaatatgcagtaaatgttgtattttaccgtctcaatctcgttatactgatgttggtctaattaagtatcaaatcttatataacttaaaaaaatagttttttataaaatatcactaaccaatcgtgaagtactacctatagaaagtattagacactactgatactcaataataatgctcttaaacatcctcgtttccattcccatatattcttcatttaagacgggattgaagatccccgttgagctggtaatacacatagaagacccatttatttttaaaataaaaatttgaataaaaaacgtaaattgtataaaatttgaaatattatataagctaatattttaaaaatacttaaaaatttactaataataaattacaaaatagtataataattaaaaataatattataaaataaataaaaaaattaaatgggtctgcatcggggcggaagacattatcttcattcttgcttgtttaacattcggtgatagaaagttgtctctgtccgatcgtctccacttcattcgccatttaagtatgaaatctttgctccaacaggggtgggtacctacgggcccatatcaatatgggtgcgatttccctccctaacactcttcaaaatgataacaatactaatttttttataatttttgagagaatttgttttacaattttggctttggttaaacactgaaaatgcatgcatttagtagtaatggagtgattgcctatcttactacatagacaataaggacaaaaaagtaatttcaagtgtacaagttaattacggggttgtagaagaagaagaaagaagtagacaaatatcattagtacggcgccgttttagcgatttctactccaaaaggcatctctagattctctactactctgcctattttttgcttttgaatttaagtgaaaatgacaattcttcttatatatatatttattataatcacctaaatttcccatacgctataaaaacaatatcacatgcccaaaccagttttgtactcttgatttcataataataacattaattgcactatattttttttaattatttttgggttaatttcttcattttcttttgtatttttcctgtctttctattttattttattttctcttctatatatattgaccttagtacttggtaacttctgatttaaatgtctcatatatatatatttatatacaaaagagttacacaccaatgataataatgatgagtagtagtagtagtaatgttattaattagtagccattattactatatggcacaataaaaatttaatttttaacagagaataagatccaaccaaacaaacagcataaattgctttaacacgtttatatattattatagacatatattatgtagagtaaaaataaaataaaaacataaaagaattaaaaaaataaataaataaaataaacatattttattattccaagtttggcttatgataaggacactactcttttatagtacattaattataccaacattaaggtttaaataattttgtccctaagtgtagtaattattattattaagaaacgtacaagctggagttaaaaagtaattaaataaaatcccaagttgataacagaggctaataattatcaacttgccgaaattcactgaccccccaaaaaaaaaacaactgtaaatggtaagattacaaaatgttgactaattatctattttttttaatctattttatttatgattgtatatattgtgtctatttaagattatttgtgaatttttaaaaatttctaattaatttgttgaaaataaaattcaaatatttatttaccataagaaaaataagtcacacatacaatacaatatataaattttatttaggatatttacggcgaaactcttttaatatttacaattgttacatatatgactcctaataaaaaaagtggttgtaagtaatttatgttatgattttgttacatttgtattatttcttggtcgttaagtgtcaattaagttcattaagtgccagctcaaaattacatgtgacaacttatttctttagcttatttaatgcatagtcaaataatatgtcgtaatgtgtttttaagttgacacttaatgaccaataaaagtacggctgtaaaaaaaatcgtaagataatgtacttttgccctcattttttttattagggtcatatgtgtaacaatggtaaattttaagggcgtttcgctgtaaatatctcaacttattttcggcattgtaaattacttattttttgaaaaattacagatagtcctaaataactaaaacgtatatgatcaatgaaaaaaaaatttaaaaaaactctcctgtaagttgaaacaggatagagatataccgaaacaaacttttaagagagcgcactatatacttacttgggttgtacataaaattttgtaaaccgctaaattcgaataacccgtccaaactaaaccaagataatctgacaaaaaatataaatcgaaaaactcgaaaaaaatataactcgcctaatctttatattgagcgggttgaaaataatatcaattcgcttaattaactcgaactaatttgaccagcccgattaggaagatttttttatatatatttaaaaaatataaagttgaattgaaatctatttttttttttacagatttaaattttgaattcaatttatatatttattttattattata

SEQ ID NO: 238972 - DNA, 8446 bp, Cannabis indica
aatattagtatgattgcgaggatggtaataatgttttttgagtaatggtgcatattcatttcccatctctttacctcactctactttaatttaattgtatcatcgctaatcactttaagggttcctgtagctgaggactaagcgtgttttaatccagaggctaaagtgagtttcaaactttgactcaaataaaaaagatactaataaaatcaatccctatcactacacttggttttatttacttaagagttgaagattcaagatgttcgatatttgatatgttagcgtcatttatatattatttctgattttgtttgtttaatatgtatgttgtattgttgttggtgtggcttcactcatttgatgttaatatggtaaaaggaaacggttaaggagaaaattaagatgagcaaccgtagggccccgccgattgaaagagacagagaaattacggaggatattagtggaagttggacacgaatgctattgataataggtaggtggaagtgatgccttacactttgaggggcccattgggcctctgctaacttaatgttcctgtgggaatttgtgcccaccacccaattgcctccatacgacgtcgtctcttctgttttatttattttatttttttgggggattgaagaacgtcgtctctagagtttatgtcgtatgttttgaatgttatggggtgaaagaaattgaaatgtcaagagtaagaagagtaggcatggaccacgtgttgtcttgtgtggttgtagtggtaggaaagcttttattgacctcttcctttgtttaagtcaagagttcgactctgacccaaccccgattatatttggcctttaaagaccgacttataatgaattatctttgagatatgaaccttcgtgagatagtacatggtcctagaattgtcataagaccgaaaggtagagacaaaatctgcaacacgtgattcttttttttttttttcagtaaaagagaaaaagactaagcaaagaaattttacaaatctctcttattagacgagaatgccttgcctaaacacagaatggacataaaataagataattttttatccgcaaataccaaactgagtgacggtggatgaaactatcctctttgatggggttctatataattttatttattttgtgttagtatcatacatcaattaaatattacacgtgatattatttttacaataataaactttatatatatttagaattaataaaataaataaaaataaaaattaatgaaagtaaaaattcagtattttaacataattagtgtatgatgtaatataaaaattttatactaaaaaaaattactaattaatgtattttaaagaatagattaaaaatgtaccatcctataaatatttatatatatatatatatatatatatatgaagaaattatttaagctttggagttcttcaacttcaagctctaggcagtgagtattaatgaggcagttaattagtagcactagctaatattgtacccattttgattacaaaaaaatgagcctaaaatgaacaatatagtttgtgtgtcggtaatgaagattttataaattaaccaatttaaaggaatgagagacctcactttggtattttgatatagatttcagttttatattctattttggtattgtcatttcagtatttggtttttgtaaaaaaaagaaattaaactaaagtagaatgtttctattcgaaatatttttttggtatattaataaaatgtatttgaggatgaaaagaaagtggagtatgtcaatgaatccatgaatatctattccgcattcaacgcttatactttaaagtatttttttttgttggttcttatgtgcaataatatttatgtaattaagttgaaattagtaaataactttttggtttgtataattgactcaaacatgtaattctagcaatatgcatatcaataaagtttcaattttgatccaatatttttggacctagtttttgctttagtagaaaatgttgttgaacatctaatactactgcttaaaaagtaaattagacttggcctaattaattgactagccgatgtgatgtttttataattaaaatagttgttgatatgttttgatatttgaatgaactttatcaatgttgtttcaaaaaaaatgaactttatcaatgcaaatgtcacatttattgatacataggttttgtcctagttttagaggaaatttggtgaaccactttggttaagctaacattactctaagagttggttatcattaaagaaaaatggttggttaatttaatgtaatttgatgtttggtttggatagaaaaaacattaataagcaatttatgaaaggaatatatagtaatttagtagatgtattatgtcttaatgtcaaatgtttggttaatgaaataatattttgtgacccattctaaaattacaaacacaatttacacatattattacattaccaattttatattacatattataatctgtaacatacttggagaggtttttattttacattattagtgatgtaataatgtgtaaatttattggtccttagatctaaccctcgacctcagacccagacccgtatttggacctcaaactctagatttagaccctgagctcgacccgatcgtcccactttttttcatctcaatttctcattcctcaccaaaataaaaataaaaataaaatttacaaactttatttttatttttgaaatcaaaaaacaaaaacaattataaagtacattttactttttgaagacaaaaatttaactttcatttttataatttaaaaaataaaattaaaaatattactaaacgtactttaaatttatttatttattcaaactaaaaatacagttgcaaaatgtatagactatatgataaaatctttcaacattttgtgccatattttgttttgttttgtttttttttttatgaaagaaataatatttctattaatcaccaatttatcaaaatttgataatttcctttccggtacaaaattcaatttaacttttaaactctctttaatgattcgatctatacacttcaatgccaagtatttcctctcaaaaatgcacaaattgcgatttaacctaatgtcatatgtagtttctactaatactgcataaaaaatcttagtaacgagttttctaggcctcttaatcatccaaaaattagttcttcaaatgaacttggccaaagttgacatcctaactaaggcttaatctgttgtaacactctccatgagtaaagacaatcaaaaaagagatgagcataagtccaactcacaaattgggcaaatagtatattcaataaagatatgttttttatgaagattatttcttgtaagaagattgctatggattacttaccataagatgaaagtgtataaaggaaaaaatattttgtatttttatttttcagcaaaattgtttttaccttgtaaactatacattttcattattatatatagttttgaagagggtgatatgagagttacccatatacatttctcttctctctctctagttagataataatttaattaggttcgaacataataatattgttatttaaacttaaaaaaaatggaggagagacactaccttataaaaagaaattaatagagagatacaacataatgatcacgaccatgatacgaaagtgtaccctttatacaaaatttctgaagagtgaaaaaaaggctcataataagaggttatcattggatcatgattttatagttcaattcaattaatgccatttggaaattggaataataatatattaattaacaaacaataaggacttggccagcaacataattgtagatttgttaaaagaaatttgttgaacaatttgaattactataatatgatcccaccatacaatacaacaacatccctttcaatgtaatatataaatatttctttagcaacgtcagaggacaatacaaatttttttactttcagacataataatatttataattaaaaataataaaaaatattgtaactaattataaattattattcctatgttatgacaaaaatgttcatgactaaatgtattaatcatgaaaatcacaatttatcttgactaaatgtatttctaattacaatatttattataactaaattaaattaaaaacgtgttgtatttaaatattatattttaatcacaaataactttttattgtgactaaaaatcatatttagtcacaaaaaattatattgtgattgaaaaattattactaaaagtaattattttttataatgctttggaatggtagaagctatagtgctgctgatgttatttggctggctcgtaccactctttgtcaatggacgagtgctcagtctaagcagctaggcttggtgtctctggctttcaattggcactgacacaagagattactagtccaaaccggctgctggtcaattaaaaattaatgtggatggggcagtttttgaagctacaaatgagataggcacgcgttttgtagcacgcgactgcgatggccgagtgatggaggcgttttcaactattttttctgtcagctgccgacccgaaattgcagaagttctcagtgccaaagaagcacttagttggataaagagaaaaaacatgtcaaatgtcattttagagacagactgcaatttagttgttcaagctattcttagttcggtatctatgtcttctatttttggattatttgttaaagattatcaagttattttatcttctttaagtaatgtttttattggtcatgttaaacggtctgctaataaagccgcgcactgtatggcacgtggtgtttattattggtcaagtcgtctcttttctgagagtgatattcctcttgctcttcagtcctttgtcttagcggatatttctgtctaataaaatttatttttattcaaaaataaattatttttcctataaacaaatattttaaattaagcattaatttcgaaagataatgcactcaagagtttgcttttgaaaaattgaaatagctagatcaacttttggccggacaatatgatccaatagtagaaaagagaatgaagaaaaatgaaatatatttttaatgatagcttggtaggttagagtgcgtctcacatcaatatatgcaactttaagcaaagttattttaggaaattgccttgctgttgttcctttatagtctttataaaactgagattagttaaaagagatttaagtgcttttcccaaacacaatgtgcttttcttgacttgttttgggacacatatatataatatttaatgaacatatatgaaacaagaatgtgtatatatgatatgtgatgggaatctcaaccgatttcttaattgattattaacttgaaaataacacattatagtgccactactataatgcctccttgtcctaattgccaacaaacactcacttttggggttttaaataggggcaaattccattaaatcctcaactaagttacttattataataatttgattcatgtgcaaaaattattaaacctgcattcctctttttcaattagtagttttactactcttggtaatatgacttttataagtgagtaaattcttttaatatatgtttggaaattaaatttttatattaacatgtcaaggaactgtcatacaaaacgatagcagtaagaaaaattttcaggtttaatttttttttctctctttttatttaatgtatatataaatatgtgggtgtaaaattaaattaaatctgacatgttggacatttttctactgcgtatttctttgaattgatcactaaaaaccaacatcaataacccataaaatgtcacgaaaaatgtttttattggtgaaagcaaaagtgacgctctcacataagaattttcttatatttatatatatggaagaaattttaatagttacttttttttatataaccatgatgattacattttattatgacctactaagacatcattattaaaataaatttattttagataatttggcatttgttgacaactatgttgagtatgcgtgtcattttttgttggtccattcgctttttaagcatatcaacttactatttttttaatggaaaagtcaaactttataaccaatcacttttgttactaaaattggtaacaaatcagttagaatagatgctaaactaaaacgacgaccaagataaaaaattaaactctagcaaaactataagctgttatatttactgaccatttaacaaaggacaataaatatatttcttaactcaataatcaaagatttacaatcttgaattatatgaccagataaaaataccatgataactgagctacataaagcttaaataacacccaaacagtttatttcaattgttacttgattccaatgctgttctcaacgcctccctcaaattcgttgtttcagcaagaatatgttcattcatgctataaaagaaaggggtgcacccttcaattaagaagccattagaatcccgagcaattaacccaaagccatagctatagttttccttaaatatagctgcatctacatttatttttatattattcatctgtggtgcgatttaatgctcagtcccatcactcgtccaaaaatcagaccataacgactctatcatagagttttgagcaattctccattgttcaagataacctcttgtaaattcaacaatattagcagcttgagtttttttcgcatttccacactagatcgttacgtgctccccatatagcccaacacaaagtgcatattaaacaccttaaatcattgtttgcgtgactaaaatttccaataaaccaatccaaaaggtaatttttggtgtaacagttgtgcctatacccggcctgttccagcacaactccaacattttacaggtcaccaaactgtgaagagtagtttctgtacacaatttgcagctaggacacaacaaataacctcaactctcttgatctaaaatttgtccatggtcggaagacaagccattcctgcatgccaaacctaatttttaatctttggaggaagttttaatttccacatcttcctccaaaaagttttagcttcaccattaatccatttgccatgatcttgttgcaaaatattgtatgccgactttacacgacacaagcttgagcaacaccaaaacttacaaatatactataaataaggggaaaatttaattttatattgttacgcgaagaaatttataaaaatactgtcgtacacttaaattctttctcttatactgtacagatgccaaaacaaagaggaaggcttcattctcaagacccactgtcagaaccaccagagcaacactaaaacagccaaaaaacaactattaattcaatcagattcaaggcaaggttagttgccaaagggttcactcagaaggaaggcgtcgattacaataaaaatttctctccaatggtcaagcaagcttcaattagagccatgatggcaaaggcagcaagcatggacgtagagattgaacagatggatgtaaggataactttctaacatggggaattagaagaggaaatctatatgcaacagcctgagggctttggcaatgggaacctagaagaggtatgcctactcaaaaagtctatttatggcctcaagcaggcacctacgcaatggaacttgaggtttgacacctacttgcaaaatattggatacactaaaagcaagtatgactcatgtgtatatttcaataattaaacctacttgctactctatgttgatggcatactgatctttagcaaagcaaggtcagagattgacaagctgaaaaggaaactcaatgatgagtttaagatgaaagatctgggcaaagcaaagagaattcttgggatagacataaagagacctaagcctcgcatgataatactttctcaagttgcctacctacagaaagtgtctgcatctcagtcacaaaaaatagatgcagaaagagccaagatgagcaaggttccctgtgcaagttgtgttgggagtctcatgtactccatggtgtgttctaaatctgacttagctcatgctatgagtgtggtcagcaggtacatttcagaccctagccctatacattgggaagcactgaaatggacaatgaggtacctgaaaggtactgtggacaccagtattatgttcagtaaagagaaccagttcaatgaagaaatcattggttttgtggactcaaattttgtagcaaacctagacattagaaggagcctaacagggtttgtgttcaccgctcttgcgagctggatcagctagaaatctaacctacaaaatgtagtagccttgtcatcaacagaagctgaatacatgattgctacaaaagccatcagagaggttatatgtaggttgactgagaatttaggtttcaaatctgagaatat

SEQ ID NO: 238973 - DNA, 2495 bp, Cannabis indica
acaaaaatatattttcttatgttcaagtgatatacgaaaatccataagatcctacaaaaagatggaagcttaaatcaacaactaagaatgtgtttatattttaagacatctaaatgaatgaataacaatccaaaaggaaaattgatagttaaagtctcctaaatagaaatttaccattaaaactgatctcatcaactcaacagattaaagacaacccttcacccacaccagaaaaagaaaaaagaaatgcataccaaattataggatatgagaacggaagaaggagaaagaaatcctatgattaccaacataactgcggattgcctcaattcgaagcactttctgagtgagttgggggagttctttcgccaaaactctatgaaatctcttggaaccaatcccatctgtgaaaaggaccccaaaataaggggctcaaaattctacaagagaagagagatatacaaacccgaatatagaaagaaatttatacaaacgttgtgaagtgaggagactgaggttctgaagatcatgattgagacggcgggcatcacttttggcttcaaaagagtgagaaatccaggaaacgcaagacttggcgagtatggtttgtagggcaatgaggtctcggtccaaatcgaagcagttgcggtcaagctccgaaaggagaagaggagctttgtgaggaagatctttaggagtttgaaaatgttggtgtagaaagctcagttgttcggaggagaggtcagtgtgtttgggcaaagcaggagttgcagagccatggggaggaggaggaggaggaggaggaggagcttccattgtttaaagaatcgcagcacagcgggtcagacagttttcaaacacaaagcagaagccaacagagtacgggtatgggctttgttctcttttgcattgaaaagtgtctttttcagttttctcttttcttttcttttctttttctttttgtttaaaaggatattatgaatttctcacagttaattataattgttcaattgcccacaaaactaatgctaaattgaatttttttgctagttaagtttgtgtgtgcacattcaatagagggtaagaatatgtatgtttttgatacgggaaaaagagttataatgtacatcgaaaacaagaatagattcaaacgacaaattatttgcatacttttttcttatccgcataaattctattttcgtgaaattattgaaatgactactctagctacaatcgctattgttatatgaaaaataattgagttataatggtactaaaaatagcgtgcttgctaatgaggcattggacccgtcctaaatttactttaatcaagattaatgttgataaaatacttttttctaacgagaagcgctttgggttggtggctcgttcagctgttggtattgttattcaaactaagactttgaataagatatggtgtctttcaacttcatgaggtcgaagctattggtatgaaaaaaactttgtgctagatcaaaactaatcgatggatgagtgtgattgtggagttgcattgtcgtagagtcatttcagatttacaaaataattaaaaaaaatgagtaatttgtggcataaatacttaattttcagttgcaaataaatacctaagtttaatgacttggaccaatcagggattattacgtggcaatttacttaatcaggtacttacataagttccaaaattataacttagatattattaccgccaaaaattaaacttaggtatttacttgcaactggaagttaaacttaggtatttatactgcaaattaattgttatattatttttttattgtaagtctttgattgccgatgttagtaatgtttcttttatttttatcaaacgatctactaataaagttgtgcatgctttgacgcgatcttctcttattgagactgatcgtatttttagtagtgtttctttacctattgtaattgtttctttaattttggaagatttgaattaagaaagtttcattataattcaaaaaaaaaaaatagcatgcatgctattaaaattttaatatatttatataaagtaatttattgcataaatatttaatttaatccctgattataaaaaaaaaatatttaaatggtaataatactaagttatgtttttgaaacttcgtagatactcgccgtttaatgttaagtcattaaccacgtgtcatttttttattggtataattaaactaatatttaaaaaatgaataaaaaattaatgacctgaaccaattaagaattactacgtgaaaacttacttaacacttaatattcaagtacctacaaaaattccataattataactattactaccaaaaattaaatctaagtatgtgcttataactgacaattaaatttaaatattttacaccacaaattactctatttatatatataggaaaatacttaggtagagtcatgaaaaacatatgtacatacagacattttttcattatgtgtcactctta

SEQ ID NO: 238974 - DNA, 9672 bp, Cannabis indica
aaaaataatgtatagataattctcctaataataatggtttttgtggggcaattttgtaggtggtacatggcatggacacacttcattcttatatgggcagtctactcctccttcttcactccgttggagttcggcttcttcagaggactacccgaagacctattccttcttgacatcgccggccaattcgcgtttcttgttgacattgtcgttcgcttctttgtcgcctaccgtgacttccattcccaccgcatggtccgcgatcgcaaacttatagctcttcggtctttctctctctttctctcatccattatttttctaacgatcattgttatataaaacaccttataggatatgacattgtcatgtcgttattaatgtgattttataagaaattaaaataagtaggatctgatttaattttttttaaacatttttctttattgtactaactctaattggtttttttttcttcttatttttaggtacttgaaatctcgttttacagttgatttgttgggttgcttgccttgggattatatttataaggtgctttgttttgattcaaatatattctattgtagttttggatgataaattataacaaaaatgacttaggaaaataaattatttattcaatttctttatattgaactatacttacctcaaagctaattaaacactagttgtcaaaattcaagtaaatctcttaggagttttttttttcttttctttacaaattagtgatttaataatgaaatatggaaacatacgataagaatatttcatctaaccaaaggacatacaaatcaatttattgaagaaaaaaggtgaacaaaagagaaaattagttcaaaaaaatttgaaaataaaaccaaaaccattaattcgttctagtagttggctaattttcgaattaactattttggttcttatgctcaaacttgacatgtttgtttttaggcttctgggagaaaagaaccggtgaggtacttattatgcattaggttaagtcgagcttgcagggtaacagagttttttgagaaattagagaaagatactcgagttaattacatgtttacaagaatcgcaaaacttttcgtcgttgagctctacagcacgcatacagcagcgtgcatcctttattatctcgctaccactgtggagccttctcaagaaggttacacatggataggaagtttgaagatgggtgattatagctattctcaattcagagagattaatctttggaagcgttatgttacctctctatatttttccattgtcaccatggctactgtcggtaagcattttttgatcgtcgtatttaactacattagtaataatttttatattcaaatattacacatagtgacatgatagttattacttttaattgaaatttattgagttaaatttggttatgacccttttcttcctttatttggttaaatttgcttaacctattgattgttttgtttgtaagaagttattaggtacatagtggtgtttaatattactatgagatagcgtttagtgaataattaacggatttctataataattagagaaaattacatgttttatggctctttatacaatatgtacaaaactataattttttttgaaaaatattttataaaaaaattaaaaatataagaaaaacagttaaaggtaaccaattaccagttaccatatattatgttttccacatgtttttttctttttccataaaatcacatttttgcaaacttgtgttttgaaaacaataaaaataaaaaaatttcctaataattattaaattaaaatacataaaacccgacacttaattacactaaagctatacatgcaattatcacttggtaaattggtacttttatttttatgaaattttacactcattactttgatactcttcattttccttttctattagaattttggatgaagttaatttgatgttcattttctctttaaattaaatcctatttaactctctttcttaatttcttgtaaaggttatggagatgtacatgctgtgaatgtaagagaaatgatattcataatgatttacatatcactagacatgattcttggtgcttatctacttggtaacatagcagctttagtagtaaaaggctcaaacacagaaaaatttagagataagatgaatgatcttatcaaatacatgaatagaaacaaactagacaaacatacaagtaagaaaattaaagatcatctacggttgcaattcgatcgaagctacactgaggcttccggtcttcaggatgttccagtttcgattcgccacaaggtactcatactttaccatttaattcatgtgaacagtttcacacaataaatatacacagtacacagaacctgaattttagtggttcataagaataaaaaaattgagcttttatttaaaaaaatgtggtattttaaaaattagtaaaaaaatttttaaaatagtttttttttgtagcccttgggctgggtggtcccttagcacacgcctaacgtgcatatacctagggccaggcctgacaatacatttcgagtttcgtaagtgtactaacgtatgaaaaaatctctcaattttcgggtttgcagatttcgcagagtttatatgagtcatatattaaacatgtttctcttttcaaagggtgctctacaggattcataaagcagattgtaagctactctttttccttttgtaattctcctcttggataatcatgtgaaacacataatcttgattaactagaaattattgttggcttgggatatcatatgcattctctaagtattttttttttatataataaattcatcttttggaaagaaaattgctaaaggatgagtcctacatactttaatttaaaatagaatatgtaatttagtatggagtcccacatgctttaattttaaataaaatatgttaggtcttctattcaaatagactaattaagatatgatagtgttagattggtgcattatttattgaactaaaaaaaattaaacttgtataacatttgttttttattgagtataagttaatagaggtaaattgattctcatttttgtttagagttcttaattttctcatttttgtttagagttcttgatttaatttacacttcatgttctaaacaatatttactattcgtaaatagaaaagaagagatttttgtctaaagaaatgcaggtagatgtatagaaactttcaacgaaatagaatatattctaaacatatatctcatggttttttactttaacaagataaaaatatttaaatttgatatttttagatacgattttagacctattatcgatactctagtgtttaaggttatttaacaacttcttaagtagaattaacttccaaaagattagcatatacttagtctaggactctaacaataccctgcacttcttattttgttcatcattaaacaattttgtatcttaaaaattgaaacaataatcgattattttcggattttccaggcaatcagtgtccatgaggagtttttcctaccaggagaagtgatcatagagcaaggaaatgtaatagatcaactttacatagtatgccatggtgtattggtatgactatgagcctaattattattattattagaaaattgatcttgtcattaattcataacacaattaatgtctgcatttttatggcttcactatgtaggaggaggtagggaatgaagaaggtgatgaaaccgaagaattatgtacacgactccaaacatatagctcatttggcgacgtttctttcctttgcaatactcctcaacgttatactgttgtggctcgtgaactatgcagagttttgagacttgataaacactcatttaccgaaatcctaaaaatatactttttagatggccgaatcatattgaacaacctcctcgaggtaatgttgttgttttttctatgttgttgttttttctttcttcttcgatttttctgtatttattagaatcattgtaatgacatattttttcttaatttgtatagggaaaagacttgagtattcgaaaaaagcttttggaatcagatatcacaatttatattggaactcatgaacttgaattggcgacgagagttaactgcgctgcctatgttggcgatctttaccgagttaaacgcttgattgaagctggagcagatccaaataatacagattatgatggtagatgtgctttggtaagatttcaagactattatgacaatttttcttttttcctctgttttttaataaatattttttttatatcaaacctataaataacttgtatgtataaaataagattcaatatagttgatttttcttttttttttggtaacatgttgcaacatttaaagaataataaaacattacttgaataattaataatctcggttaaattatactttttatcaagtcttaactcgagaaaaatggtgtaaattaacactcgattaactactaatctcaattaaattatacttttgtctaatctcgaaattgtttctttggtagcatgttgcagcatctaaaggatatgaagacataactgctttcctaattgaacaaagagttaatgtcaataaaataggttggttttttaagataattttgtgttacaaaatatcattgtgattttttttactatagtaactaataattaatttattttgttacaccagataattttggtaacactcctttactagaagccctaaagaacggtcatgatcgagttgaatctttgctcactgatgccggtgcttctcttacaatcgatgacactggtaattttctctgtagtatagttgctaaaagggatttggatgttcttagaagggttttggctaaggaaattaacccaaatgtgaagaattatgatcatagaacacctcttcacatagctgcttcagaagggctttatcaaatggcagagttattagtaaatgcaggagcaactgttttttccaaagacaggtaacaaacaatctaaactcatattattgttggtgatgagtagtctcttcgagtctcctcgaaaaaaatgttgatttggtgcatgttagtattatttctctttttgaagttatcttttttttttgttaagtgataataacttataacatgtcatactgttattagtgtaattttatatctttatttatacacacaacatcgaacattaattgtatgaattgctagtattaaatactgatttgagttgcaacattgtcacaacctagaaagaaaaaacaagaatatattattgtttttgataaaatgaagaaagctcatacgagaacggcctatatttcttagtttcaataggattttttatgagcgttatttttatctactatttctatattgtttcctatcacataacttattattagtcttaccctttcttgtagatggggaaatactccgatcgatgaagctcgaataggcggtgataaaaagttgatcaagttacttgaagttacaagatcttctcaagtgttggaattctctgaatcttttcaagaatttaaagaaactactaaagtaacatcatttgataatagtgagacttgaacggttgatttatgaacatctttttttttttagttaaattattaagttcataatattttagcttcctttgtatttgtatttcaaagtaatgttaaggaaaaaaaaagttatgttacttagtatatttatttatagtttaggccttttctttagtagcatacaattaaagaaatatatactaatggtactttaggggtgcgataaacactatccttgatagtgatgctataatagagtataaccaattgctaaaggatactttctatactttaattacacacttgttataattttactatcacttactccatattttaaattactaataatatataaaaatggctaatcaaatcataacacttaaaatgatgattaggatatgtctccccaagttttgacatatattaaattagagcattgatgttagttccaacaccattttaatatgttttgttgtgaatagttagtggtttattttattatttattaaatcaaaatgtatgagatacaattttgaattacaccttttaataactgtataccacctcttgtggcattttgtattttaatgtattccttaacattttttattaacttatgttgaatttaagaatttagttcaattttactaatgaggctatattgacaaaaatttaaaaatcataattttgtacatgtcaaagtttaaaaaacatgatcgatgcttgtcaaagtttgggaacacgatttgatacatggacaattgacactttaatcgtctactagtaagatgagtattgttataatataccaatagtaggtaatactttgtaaatagttagtaatattctataataattactaaattaaattacataaagcctgatacttaatattattagtgtctattaatattcttttactaagattaagctgagaagtctttaaatttaataatttgaataaagtgtaatttatagtgtaaatacaaaaatttacgataatcatatcaaaattatatttttgaaatttttataagtattggtccatatatcaataagaaaatgaagaattattaaaaatttaagggctaaattttaaaaatatatctaactatttatttgtaaccgagaataatttaccaaatcttagatatgtatggtgaaagagtattatgcagtaaagttcaaagtaatggaattgaatacaaaaatggaatgatgacgaagacgatgaagatataataatggtgatgagcatcacaacaacaacaatcaccacgatccctctattccattctctcccaaaaatctcccaatcccaaagtcctcaactttctcccaaaatggctttgaattttctcaccaagaaaccatattctcctccttcatgggcttctcatctcaaccctttacccactcacaccttctctctcgccaatgtaatcataactcaatttctttctctttttccccaaatgggttttctttactactctttctcattactattgcttcattgattttgtcaggttcctactccgattcataaatggaatcttcctaatttgcctaacaacactgaaatttggttaaaggtactgtcttttcttttgtggttgcattttgattctctgaaattattactgtttttcaattttgtgtgctgtagtgaattcagttcagttcagttggattgaaacttgaaattgagttgttttgattgatgcccatttgtattgctttagctataataattttggaaaagattgcagtgagttcaattcagttgggttgaaacttgaaattgagttatcttgattgatgttcatatgtattgcttttagctataattattttggaaaagactgcagtgagttcattttcatagtaatgagctcagtttaattttttttagtaatgatttttctctacttctgttttggaaggattgaaattatctgggctattttttagttttaaatattattttgaaaaaaaggtgagttcagttgggttgggttggtaatttgctttagctaaaattattgtggcaaagattgcagtgagttcatctgtatagtagtgagctcacttagtaatgatattgattgttataatctgggcatttttagttttcaatttgattctcttttcttttgttgggacaaagattctctcttttttttagtgtaaagtagttgattcacaaatggaatcttcctaattttcctaacaacactgaagtttggttcaagatattatttttcttttatggttgcattttgataagtcattttttggctattcttgttagttcatcaatgcagtgagctcagttcagttgggttgggttgaaatcgagttactttgatagatacccatttgaatttctttagctataattattgtggaaaagattgcagtgagtaaagtgagctcagtttaatgatcttcctctacttctgtttaggaaagattgaaataatctgggcatttttagtttttgattttattttgaaaaaggaacttctttttgtcctgccttaattggcttctcttttgggaaaaagattctttttttaagtgtaaaaagttggtgattcaattcatggagaaggtatcaatgttggtttctctgaaattgttactactttgtgtgttgagttcagttcagttgggttgaaattcagttcttttgatttgatagatactcatttgtatttgctttagctttaattattgtggaaaagatggaaaatttgctaaattaacaacacgaaaatgttaaattagcaaaatttttattgctttagtagatttatagtcgcaaagttttatgatcgctcgtgccaccaaacatagttatgttgctaataaaattttcataatgactatttttacaaaacactcggaaaagattgaagcgagttcatttgtatagttgtaagctcagttaattttaatttcttaatttttcagtattgaaataatctgagcatttgttagtttttgatttgattttgaaaaagggatttctcttttgggacaaagattctttttttattaatgtaaaaagtaggtgattcaattcatggagaaggtatcttgtgctatgaatttgatacttttattcatgcattgttataaggtgcttctttgatttttttgttctgttcttcactttagttttgtactgacataaattattgcttatggtatcttagcgcgatgatcttaccgggatgcaaatgagtggtaacaaagtcagaaagttggaatttttattggcagatgctgtagaacaaggtgctgattgtatcataacaatcggaggaatacaaagcaaccactgtcgtgcaacggctgtggctgcgagatatttgaatctcgactgttatcttatactacgaacctctaaggtcaataatttcgcttttggaattccttgcttcttttgtttattggtttacggttcttcaaagttgttaacttatcatttttgtttcgattttacttaggtatttgtggatcaagatccgggattgacaggcaatctcatggtggagcggttagttggagctaacattgaacttatttcgaaaacagaatatgcaaaaatcggaagtgtggttcgttatttttagtctcggataatgttaagcttgttattatccatgcttttttttttttcttcgaaacactctttaactatgtttcattgcatcattaatcagtaattaacataacaatataattagatttcatgaattaatttttttcaggctcttaccaaccaccttaaagaaaagctaataagtgaagggaggaagccatacgtcattcctgtcggcggatcaaactcgttaggaacatggttagattcgcttactgatttttgtttatcatattattcgattgcattgatcgaatctaatctgcatgatccaatccaatctgcacttttgcgcggattggatttgattgaattgtgagggttggatgggatgcactgtaagcaaaataatacggattggattggatgaaagcccctagctcaatcttcttatttgctttctcgaatag

SEQ ID NO: 238975 - DNA, 4981 bp, Cannabis indica
attgaaaatgaattttttaatcttttcaatacttgtatttttcaaaatacccaaataaaatatgaagaaataaaatatttttctactattaaatttctgcttttcaaatttgattatgttagagtgtattaaaaagagtagtggttggagtatttgtcatctaagacagaagttcaatctgaatgagatagtgaaagctggttctttagggtggtttagaaccaactggttgtacaacaaaagactgatcaaaggtccagtcaattattacaaggctgtttggagctttataactgtgcctaaacacagattcatcttatggcaagtgatgaacactcatctcctaactagagataagttatctcgattccacatagctcttaattcgaacttatgtctggtttgtgaggagaatgaggaaacccatgagcatctcttttttagatgtttgttgtctcaaaaagtcctagactcaatcttttcttagatgggttacagggcttggccgacagcttacattggttggtatcattgggttattttgacaggtcaagcaagaatacatcaactcaatatcactatcttggaggctgtaatctacaatatttggcttaacagaaacaagtgtttttttaatgattattctagatcagtttttggtttagttgatgatataaaaaattctgttaagtacagattataacttgtaaacaaaagaaacatgtcaaagcaggagagagactacttattagattacacaataggtagtttttgttggtcttggctaattttggctggtttgtaaggggtggtctttgttcttgagttgtgtgtggctttggtgcttgtgctagttgttgtatttagctctgttgattaatgaagctttttcttcttgatcaaaaaaatagaataataatttcaaaaaattagaagtttataaaatcggtatatgggatatgggagtgggaggagattgagacaactgaggtggtatagtcgactggtttgaggcagtgatgctgtcagtggaagtggctggagtattggtacgagttatggggactgtagtggggacttgaaaagtattagggtctatgactctaagagtatggtgtgcactgttgttgcatgctttggaaaacaattcttggaaagagaattcggtttcgttgaatgtgacacttcttgccacatagactctttcacttgggtgtaagcatctatagcctttggaggaaaggcaataccctatgaataggcatttggtggatcgaaatgaaactttgtggtgctcatatgatcttaacaaagggtaacaggagcatccaaagacttttaagagattgtaatcaagcttttgagagaataattttttatatggtgaaatgaggtttaggatgggggtagggagcctattaattaaataagctgcagaagtgaagacttcccaccagtattacaaggggatattagcctgagcaagaagtgtgagtcccatgtcaacacatgtctgtgttttctttcaagacgtaaagatttttactaaaatgcatgtaaaaccataagttggtgtgtttcttatatttatatattttttactttttttaaaagaaaaataaggaaacaaagtttagcgtttagagagcacaaatggtggtgtgggtggtgtaattgctatatatcacccaatcatttctcatctagtttggattttcaattacagctaatgattggaaattaatgattgacatattataaagattagagttcgtagttaatgccacccattattgcaatctaaaaataattatatatttttttaaaaagaaaatacatgaaaagtcctctgcaatatatttgatttccttgataggatgggcaaacaacactttgttggtttctttccaagttttcatagccagttaataataaagtactaacatcctcaatttatttgttgagaatcgatacaatatattgaatatataagataatgaagatcgtatattaacacccaaatcattcgtctaaatggaatatagttggacttaatcttcattatgtgccttattcgactaatccacttgaaaacgaccatctagtttaattaatcacagcacagaaagaatcgtaaaaaataaaaataaaaatagaaaaatgaatcagcttgacttgaataagagatacgcaaatcaatataaatggaataattgaagcaaaatttaagaaaggcaagtagtttttcgtttttttggtctttcaatctaaaaaagattttcgaaatatgtcaaagtgggtcatatgaagaagggtttaaaccaaacaaagattctgtagtttataacagaaatttaaattaaaaataaatgaatgtaagtttaaacaatggtatagtaaagtatgaaaattaatgaataataaacttatacacaagaaaaacacatacatgtaattaagtttgatgcatgttaaaacaaccggattgtatggcaaagtttctgacaacctttttatctgtatttttctgattaaaaaacttgacacctcacatggggagttggacacaagtgaattaatgagaatcattattcttcaccaacctgaaaaccccatcttctcccacctcctctctctcataatcttatatattatcatataatataaccccatttaagtaatttaattcattcaaaataaaaaacacatatataacaaccatttcatttttattaattaaattagttatagagagatagctagcacatagagtattggttgttttagatagaagccccataccagattatgagggaggtcatgaattagatctgtcttggcatatatcttataatatcagcagccgcccatacacaaggctgcaaaacaaaacaaaagtacatatggtgcaaaatggaatgtacttactttgtaaactggttagaaaatcaaccgcatgaatgattggcaaacccaagcaaggattaggtgtcctccactttgtttattcatatatatatatatataaaataatgatgacaataataatactcttgaattccatttgttacttaaaacaaaacgtttgtcagttatggacattatctgtcaaatcaaagctgcagcgtcaaaatggatgaaatcaaaatttgtagtgagcccccagaaagattttcctttggagatcattgatcccatagactgataatgaagctcagccagctgccacttccacaacaatccatgaaaccacctacaaaagcaaattgggctacacccaattattggacacaatacaaataaatagaagtcactacactgtgagcatatttttcgaagaaacataaaatagacatgtattaaaatcactactttcaagagccgatctgttggaatgaaggaaaactagatataatagcacagcatgaaataaaaaaactatgttttcaaatacttacaaacaaaaaaacaatacgacttattgcttcaaatacttagagcaagttgttagttagtacattaacaaagctgatgacatggattgttgaggctattattagaatgttttcgatttcaaaaataaaatcaataaattaattttaagataaatgatactcattgaatttggacacaattcattggttaatattctatatatgattagattacgataaaccaaaaaagttgacaaaattaccaaacattatcactggttttggagaatgctgcaacaacttttctttcattttctgtctcaaacaaaaatagaagtggtgaagagctagatttcagtaaacaaacgtaaaagcatatctggttatggagaatcccatttcaagtttttaagctcttctttgaaatgctgaattcataagccaacacgacaccctcaaaattctcattaaacctgaaataaatgccacaaaattttgttacaaatcagcactaaatattttaatgatcgttaaaatatcaggcaacaagcttacatgaaaaggctcataaatatacatatataacacgtttcattgaaaataatttgagtagaatacatatttactatcatagaattcatgataaacgaagataaattaagaataactaaaagtttagataataaatttgctatggaaggatcctctaccaaacaccttagcatattacaacacaatgatctattaccaaaaaggaaagatcaagataaatatgaatatgaatatgaatatgaatatgaaataccctttagacaactgatcagagaaacaacttacaaaaactaccgaaaaaataaaattgatataagtatcacttaataagtaaaatctcaataaaacaaagaaacttagctataaaatttaactatcgtcagttcttagaccgttaattctgttagttagttaggagggtagattggtcttttagttctatttccttgtatataaatactgtaccattagtactgctctgtatcaattcaattcatttttccaatcaataaagttcttcctttctctgtttctacactgtaatatggtatcagatgacataaagctccaagatttcccttgaatgcttccaagaacttgacaatggtgagaaccagagcaactacatcagctaccaccactgatcccgtggtcgatgccaccatagctcagccaccatctcatacttccgcacaaacgcaaactcaaatcgatccttcccaggattctgcagatccatctcttcgatctgaacctctccaggttcctcgagctcctccagctgcagatcgaccggcatatgaagatatcagatctccatattacctcagcaacgccgatcatccaggcttggcactcgcgacacctgttctctcagatcgaaacttccagccatggcaaagagacttcaaactctccattggcgccagaacaaaacccctttcttgaaggtacctccctcaaccttctcctactgataacctttacagttcttg

SEQ ID NO: 238976 - DNA, 3612 bp, Cannabis indica
acacatcaactaacacaatatgagacacctactttttaacaggatatcttgattccagcgccaacagtgacattacgaaaaagaatagaagaaaaaaatcaaccaaacaaaaaaaatcattaaaaaaaggcaaagagatatgagggaggaaatttttatttttttttttaataaaagatttaataaataaaaaataaaaaacaaaataagtagaggaaatatgtgtaataaaaattaaactatattttacaatataataataactacttcctatataaataaatgtgtttattattatataattgtttttagaaattattatgatatataattttgaaatcaaaattaagattttatattaattattgtgtacgtagggaacaatgagatgcatttatgttgcaccagagatccaataaaagagaaagatactaattttgaagaggaaattcaaactaatggtgaaaagggtgatgttgttattacatacgacgtaattggttcatacgacacaaattatttggcacaagtcacaatctcaaaccacaacccactcagtcgtttagagaattggaaactgagttgggaatggacaaagggcgagttcatttactccatgaaaggagcttatcccatacttatcgactcaagagactgtatattcggaccacaaggtcagtattacaaagatatggatttttctactgtcttgagctgcaacagaagacccactatcatcgatctcccaccaacaagagcaaacgattcaacactcggaatgattcccttctgttgccggaatggaacaattctctcaccgctaatggattcaaccaaatccatttctgcttttcaaatgcaagtctacaaaatgccaccggacttgaaccgaactcagctcaacccacctcagaattggaagatcaatggcacttggggacccgaattccaatgcggttcgccgattaaagtgagcccaactcgattccctgaaccatctggtttaccaacggaatcgacatctattgctacatggcaagttgtttgtagtatcaaaaagattaaagaagtaaacccaaaatgttgtgtgtccttctcagctttctccaatgattcagttgtcccttgtagaacttgcgcttgtggctgtaatcgaaaccccacaaagacttgtaacccaactgagccatctttacttcttcggcccaaaactctgcttctgccatcggagaatcgaaccgaagaagccttggaatgggccaagatcaaaggcttggatgtcccggaattattaccctgcgtcgacaattgtgggatcaacataaactggcatttggattcggatttcaagggtggctggacggcgagaatgactctgctcaactgggatgaaacagagcatgtggattggtttgcagcggtggagttgggggaatctggacctgggtttgaaaaggcttatccttcaatgcaaccttcgttccaggctcaaacgacaatattatcttcatgaaagctttaaagggactgaattatcttcatggagctgacaatggtgccaatcaaaagaaaggtttgaaggtggctggtaaacaacagtcggttattatgttcagcaagaagaagactccagatttggatttgggtggcgtacatgggtttccgactagggttttgtttaacggcgaggaatgtgtacttccgacaacttttcccacaaacgataatcaaaggaaaggtatggttgtgaagaagagcatcttttttagccttgtgtttgttatggcttatttgttattgtagttttaatttttagtttggtataataatattgattgattgatttttttttcttgcctttgaatttggattaatgtaattttataattctatgtaaactaaatcattcctcttttcaataattattatttagtttcattttatatatttacccaaaagataaataatacacctaaatttgtttacgtctaaattgtttgggatgcaatgatatctaaagcttatgcagaggtaataaaaaaatatttctttttaataatttaagtttgaaactaaacagcataaaagggatataaaatacagtgtctcctctcctatatgcagaagcctagctattgtagatgttcttccttataattgtaaaggtaattgttggattgaaccccatcacaaacaagaacaccttatcatgaaaccctgcacacttgatcactcgagacacaactaaagacacttcagttataactaaacaaatcctatatgacataactaacttaagagactctgctgccacttaattttcctcacctgacttcaacaaaagaatataaatgaatctaatctcattgatcaaatcagagcaagatgttctcttcaagttagtgagagaagctccaaaattgttagagagagagaaaaaagaaagagagatagtcaagtgggtttctgcaagaaaagagagaaaccaaatcagattgtattcgagagctgaccttccaccattgttgtaactatccaagcttggatcataatggaaaagagctgaccttccagagaagagctcacaaggatgcagcccaaagtttagggtgaaccttgccaaaattcttgtgtttgatctatacttttctgattaattcatcttttaatttctgttttattacattacatgtttatgtcaaacattgattgtttgcgtctttattatattagtatagtttgaattagtattaacaagttaataactcaattgacatggtttatgcaatttgataatcagtttcgtaaaatccattgctggaagatcaagttggatccaacagtatgtgtcttcacgtaggaaatttattttaccaagatctagatttactaacatacatgttgattataattctataatctaacatcctcaatatgaaaggaaaatgtgaatttctatgtattatttaagggataattggttaggaaaaccaataattagggtaattttaaaaataggatacttttacaaaaatacctaaaataccctcctcataatttctaaccctttctctctccatctcaaccaaatctctcccttctctctgcccacttcgcatgaactgaaccccccaccgcccaccacgagtcaagccccacctccgatcgagacgagtccgatagagacccacagccgcaccactacgacggagacgccgacggagacccaaagcaccatccgcgaactgaacccactcccatccatacccatcttgaccgaacccacgcacgcacgccggccgaacaccaccggagaagaagaaggttcgatgtcgcgcaaaaatttcaattttttgggtatttaaggtcgggtccgatgggcccatcggaccccatcggacgggcattgggccccgacttcaaaaatcgaaaaaaacccattggcccaaaaaaaaaaaaaaattggcatcggacccgacttcaaaaacaaaaaatagccccatcggatgggcatcgggccccatcggacccgaccccataaaagcccagaaaaattgaaaaaaaaaaaacgaagaagttttgagaggggtattttggagttttggaaaagtg

SEQ ID NO: 238977 - DNA, 5945 bp, Cannabis indica
cataggaaagtaagaatagtgaaaaatggaaaagaataagaagaaaaagtgtcataataacaacaatatttggtttaaagatggtatggaggaatttattaactattattccattcacttacactccattttacaattcacttaccaaggaaactcaatgttttctgttcgtatttgtgatgctttgggttcggaaattgattatccatttgatgaagaagaagatgatgaagatgaagaagatgatgaagatggtgatggtgatggtgatggtgatggtgatggtgatggtgatggtgatgatgatgatgatgatgatgatgatgatgaagatgatgatgatgatgatgatggtgatgaagatggtgatgatgatggtgatgatgatgatgattatgtttgtaagtcatataaaagaaaaagctttaatagtcaaaagcagagtggcaaaagaacaagtgttgcttccaaagaccataattccaaacaaagttcacaaggattttggtctaatgtaaaacaagaacaagttgatgatgatgataatgataatgatgaacatgaaatggttgttccaagaagctttgattatcataaaggaagaagactagtcatgtccaagggagctaaggcagctcaagcggctgcctatgcatctaagtccaaactacacaatccttcattcatgggtcttgtgaatcaacataatataagaatggtaagttatgtatttatatttttcaagttaattaatagtgttataatattggttttgggttttgattaggtagtccctgcagaatttgtgagaaggcacatgaaattttgtgtagataagagtgttgaagttgaactacagccacagaccaacaatgatgagaaaatgaaatgggttgtgagttgttgtcctatgaagaaatgtggtacattaatgaagagattagggaaagggtggtcttctttctcatccaatcaaaacttgaagagtggagatgtttgtgtgtttgaaatgattcccaacctcaatgacaatggtgatcttgtctttagagtttggatttatcgtgaagctaattatgaatgaaatgtttatttagcactaattctcttttttgtagtttttgttgggtgactttgcttgattagttttgttaatggtattgtgttttttttctatgcatgttagaatattgtcgtttgtagaaacattggttcttagaatttttttgtttaaaagggatttttgtctttgctcaaggttttactttgagtgtctcactgaatctgtttactcatgcctgtattccacaggaaagaattagaataatacaaatatcagcattttacattaattcaactcataatctatctatatatttatataatcctgttgttaagtaagatgatgtggcaactcataactatatcgtaattttactttattttgtagattttttaaattattttttaattgtttttacattattgtagtctattactctactcttattaatatttattcaataataagtatctataacttacatttgaaccgacatgtcatttataatttttttttggttttttttttttttttttagtgtgattcgaagggactgcacaaagtatatcacttgatattaattgttatttcaaaacaaaataatattatttagcatttaaaatcaaatataaacttgcccaataatcaaccaattaaattaaaattgaaatttgaccaactcttcaccttcttcttacttatgcctctctgagtctctcaccaattaaaataatatttgcataaagaattacaatttacagaaagacaaaataagaaaatagaaaatatttgtatttcttctcttattctggtaaaccctaccatatttataaacttttattaattttctttttttgttggaaaaatggtttaatatttatttacggattttgatacttctaaaaagaatgatggtgatgaattgaataaggaaggtaggcagagaccgatgaacatcttatgtactgtcttttacagttttcaaggcccttcttttgtccttatttatttatttattaaatttcaaaataatattcaattaataatatatcacaacaacagtacagtacagtagtagtaccatattttatttatttatttataaatatataaaaactcaactcaaaagtgatcaaactctagtcttcttgaattgatcactctgccaaggcagaaaatgtcgacaccagcaactacaaatcttcatcgcttctcaaattctccagccaatctccggccactgtttgcctttgtagtggatgagaccaccattgtactacataaattggtacattctcttcttcttcttcttcatttgtttttgttataaacttagatcaagaaactatgcattcttttggggtttgttttgattagctaattaattattattttttgtgtggtgttattatctgcattatttgattattgggttttacttttttgggactatgtaatatatatggtgacttaatcattttttcagaggatcccaaaaaaatgtgttatgttatttggtgaagagcttggtgagatgggaactctcactgttcctcatggcaatggtaatcgagcatggaaagtaagaatggtgaaaaatggaaagaataagaagaacaatatttggttgaaagatggtatggaggaatttatgaactactattccattcacttacactccattttgctactcacttatcaaggaaactcaatgttttctgttcgcatatgtgatgctttgggttccgagattgattatccatttgatgaagatgatgatagtgatgatgattctgatgaagatgatgatgatgtatgtggatcatctaaaagaaaaggctataatagtcaaaagcagcctagaaagagctttagaagaagtgttgattccaaatccaaccaccataattccaaacacttccaaacaagtaataatggtaaaagctttatcaaaaaagagaatgaggaagaggaagaagaagaagaagtaattgctgagaatgaaatgattttcccaaaaagctttaagtattgtaatgcaagaagaaccttatccaaggaaactaagaaagcagttaaagctgcatgtgcatcaaaactacacaatccttctttcttggctgttgtcaaacgtattgtggtacacgtttatataatattatgacattaatttctgcaactcttagtattcatatcatatgtaattgtgatttaattttggtttattgaatataggaagtgcctgctgaatttgtaagaaggcacatgaaatcttgcccagagaagattcaactacaagttagcaatgatcagaagaagatatgggatgttaggtgctattatgcgcacaaagattgtacttttgtgaagagactaggcaaagggtggagtttgttctcgtccactcaaaagttgaaacaaggagatgtttgtgtgtttgagttgatttgtaatatcagtggtgtcatcttaagggtttggatttatcgtgcatgaaattgataccactaaatctttttattagtaacttttgttggaagattttaattggtttcttcacaaactcatatatggcttgcccttttttgaacaatgggtttaaattatgcatttgtggtataaatatatatatagtttgaacacgatttggttggttagatgtattgtctttgttcaaagatgatgttgttctctgttagccattgtcgttaaaattgtcaaagttgttgttgtctttcaatgatggtcaaggtcgtaataaaggtaatttttagatagctcttgtttattaatttgtgacaagtgtagtaacttatgtttttatatataacttaatattataccaaatatttcatgtgggatacttttcataatattcttgatggtgggacatgatcaccatgatgcagaataagattgataagtaatttatatttttatatataactcaatattttatcatttactttatatgaaacaatatctacaatagtcataacgtaagtttaagtactaagaatattgatgatgataatgattagcatgaaatgattgttacggaaagatttggtttttgttttgattttggttaataggcagtgctcgcaaaatttgtaataaaaagacatgaaatttatttattttctttttaaaaaatagtttagctcattataaaactatacacaagattacatttagtatgatctaatctaattcaatcttggtatgccaaacagatccttaatgttctttatagactattgataaataaaagaaaattaatggatgtgaaagcaaaagtaaaagcaagattttttcatcttaccataaacaagtccaaacacaaaagcaacctgttcaaaaacttgctcttcccccaaagaaatgctatcctaaacccaacttgcttgcaagaattgttgcatgagtttgaacttgcctacacttaattataagctccttttgcctactaaaattataagaaggtagctatagttcagccttttataagtatcttcttgcctcacaaaacaattcacaaactgcatagtaaagcttaaaaaaatatagtaaagttaaaattttttattttaaaagttaaaattttttattttaaaattttgttgttgaaaaaaaaatgtattctataaataattttgtttttttactttaaaaacataaaatgtaagtaagtattgtaaattttatttttattttttaattttatctaagtcggatctagattcggtgtccgaatccggatccgggggtctaggtctgggtccagggccaagtccggggtccgagtctaggtcaaggtctagactttgggtcttggtccggggcaagagtccaagtctaggtttggatttcgtggtccaggtctaaagttcggggttaggatcagggtacgaggtcatagcacttttctaaattaaaaataaaaattgattaaaaagtgttataaaaagcccctataattttagtttcaaatacaataaaaaattaggatcactttagaaagaaagaaaacaaatgagcacaaatactcgacaactttggacatacttcgtcttgagttgtttcggtactctgttttggtattcaaaagaaattttaatttattttatttttttataattacatatattgtaattatatataattacttgtaaattttttaacaaattcaaaataatttaccatgctaagggtcagtttggcatagctgtgttgtgggaaaaagcagttgtagttgtgctgtgagaaaaaacaactgtagcataactgtggaaaaaaaactgagctgagcgtttggtaaattataatttttaaagtgctgcgagttgttaagattctattataataatgataatatttttttctcttttatcaatataaaaagtacattacataaaaaacattacattcacaataatagaaaaaatattaaacaaagaattcttataattgtcaaaataaataaaaaaaaaaatcattacattcacataataaaatgcaactttaatatgggatatgattttgtcccgttattgtactttcacggattgtaatctgtgatgtacgacagccgtcagatgagagagttatttaatctgacggttgagattgatttaggggtaattaggattaaaagtagaaacataccctgacactcatttaatgtaccctaagacccatttaatgtaccatgaaatacattccatgaaagtacgttacgctacaaaatcatatccatatatatatatataaaaaccacactattcttccttttgtgtgtattataatttcattttttttctcttttatcaatataaaagtacattacataaaaacagaaaaagttaatgatgatgaattg

SEQ ID NO: 238978 - DNA, 6210 bp, Cannabis indica
ctccggaattgagaaattataactctaatatttatttctaaatattggggtccacaaataaattaattcacaaataataataaaataataaaaattagtgctaattgcccttactaatctaaatttctagagcggtcattacactctgtattgtttggattaaggaattattggatgaacatcttcatccttcctcaaagcgtagtcaaggaaatagaaaagtattgcagactctttttatggggtcaaagcgagaacataagtaaaattcatttagctgcctgggaaaaagtctgttgccctaagaagtttagagggcttggttttagagataattctaaatggaatcgtgcaattcttgctaaatatttgtgggcagttatggagaagcatgatgtcttgtgggtgaagtgggttaatataatttatctaaaaggggatgattcatggacatacaaccttactgaagacaccagctggtagtagaggaagttatgtaatttgagacaaaattttaatgagaaatatttgaaggctgcaggcagttcaggtaaattaaaagcctcactgttgtataatagtttgctgaattatgacctagttttgaatactagagtcgtttggtgcaaactaagcttgcctaagcatagattcatgcttcagtaagttgtaaataggcacttgtttgggcagggggattgtgctagtctgttatgatgtaacttgttgttttatttacttggtgattaatggaattcatttttcttcgataaaaaaaaactataatcttatttattatttcctaattatacataattatatttttgagatattacaactatcgcctcttaatagaaatttcatcctcaaaatttaagtgaaccattcgggagatagttcctaaatctgcgactctaactcacaagtcgcattcttaaccttgttgttacatcatagcactttcaacaatagaatcatcttgttatgtatttctaaggcatgtaattaaatcataaacatgctttaacattgtcctaccttatttacctatctttctaaatctctaaactcctttcagagaatcacaaagtccccacttggaactcattatccctacgtttcaattcaatgaagcttttttctgtttactctataaggcgagcatatgagcttagtatattctcaatggtcgtattagttccatggaccctcttcgtctaatgtgcactttctcatggacttcattccagtaaaccggtaatctattgttacctttcataccatatttctaagagtgcttggccaatggcactttaatgactactatcaacaaaaacctagttagagaataaatttattccaaaacactctatcatctgccatacatgatcgcgacatgttttctattatctaagtaatcttctcaaaatgtctatccatttgcatatgaaggaatccattgttaacccttgatttgatacccattcctttctcaaaaattagagatatacttaaaaccttattcaagattttaactcactacacatgtcatccacactgacagcaagtgcattgacctagtgtatcttgtccactatcatcctggtagagtcatacaactctataatttttggcaattctattaccaattccatagttatatcttccattttatttgggggtcttctaagattgacgtaatcttgctcgttgtcaatactctgcttttatttactgtcaattacacatgttaacacctgtccaatcatatcattcttcattgttggccattaatacattctcattccaatatacattcttattccaataccttgtgccatacactactctcaattgattcttagaacgtcactagtcttccaatataatgtctttctagcgtgctctgtcctcacttgcacgcttctagaaaaaatttcttaagaaattacccatcctgagattactctaagttaagtacgcttaactctagaataaactcatggtgggctaactgaatcacaatacatcttgttgttcccaaatgtgacaagtatggcgtaacgtaaaagttgtcaagtatttctcacttcaatcttttcatcatctgaaacctaaagttaatctttattcttcaattatctttctctttgctacatcatattaatcccttccaataaatctgactgtccaatagtgttaattactcttttcaatactaaactatgctcctacactagtcataccctttgccaatgacagataaattgctccaaccattaacttttcaattgcattgacatataggcaatgccctttccgaaccattttaaaactcaatgtagcaccataatcaatctctgtttcaacttagaaagctttactcgtaaaaccttatttttacgaatcttcttccataatatccaattaacccatgagaatttttgtcttcaataattgattcatacctcgctagatttcaaattattttaatcaacaccaaattcttcaagcgtaggaaggctgcgatgaccaaacggtcattgtgggggaaatgaacgtgtttggcattatcctccgtgaatgtgatgggaaagttcatggttcttggacgttgtgctggtgagtgtacaactacacacatttccccctcaccatctaatttcctcaagtatatcttttgggaattccttataaatccagcaatatgtggtcctcctaaaatcgtggctacgtgttcatctactcgtggcggagctagaccttgaaggtatgggttcctaggtcccagagctattactgatattgcagcttgagttggtagagtaggtagggctcgtagttgtgttctaggagcttgagggtggaccactccttgcggagaaactatggcaccctactatcctggaacgatcaacggtccatgaacaaccctctgtcaaggataaataatggggatatgcacccattggcctacgtgtccaactctttctaacattttgatctcatcctttaagtaaccacactcattggttgtgtatcccacatctacgtgatacattccatttttattgtaatctcttttgtacttccccccagaggcttccttgggccttcctgtagtggatcatattgcaggttccttgtacacattttctcatgtgtcccctaagctggtgtactcggtgtactttggctcataattcttccttggcttttttcaaaatttcacttcgactttggttctttccacttctcttactctgggaatgactcacattctattctagaacttctaattgtgactttgactgttgggagtgatactacatccaatttgtgtcgctttatacccagagaaatgggtatgagtaggtacctacacaagtgcagaaggtccatagacagctagagtgtactaagtttcgagaagagggacttgcgaagcatatcttaaagtagatgtgaaaggggccaatgccagagggacttgaaagcttattggtcagcatcttctaagttgatgcaaccttgtgctcttgacataaacttaaacaaagtctcaaccctttgcatctctcccataacagagagccaattgtaagtctagattgcagggctacaagtttcatgttgtcactcacctttgtcttagtcgctgcctccatcatttgttgaatgaaattcttcagcttctctcctacttgttgtttgacatttgtgatcgaccccacttccatatcatagtctgggcgactatgaattgctttcaaaaggcggactacatctctttctatttatggatcaatttaggagccaaccacttccaccaatcctcagtagacttggtgagtgttagggaaaaacataaacacttggcatcatcacttactctggccacctacatcatcttgttgtacttagtaaggtgggtccttggatatgttcgtccatcataaagcttgatttaaggcatcttgaaattctctgggagcggcgcttttttgatccttctgacacacggctcctggttcttatcttcagaatcggtgaggaccccactctaattctagacaagctttgtcagagtataaatttgttcttctagcctctttgtgtcactgtctaggagatcgcatctgcgagctttatcattcaagtggtttttgaggtcattcccacatggcctcgccttctctcccttggctttttcgtacttagtgtcaagacacctccgaagatctatagtggaccaactgtcatcagaatattgtcccctggtcccaccatcctggataacgaaatcactgaggcagtttttccttcccctaagcttaggtacatttgcaccagtccctttttgcacagcaggacctttcagagcaaaagagcatacaagcccagaggcatcagtggccttctgcgactgtgtaggtctgagagtcacccacctttgccttccccttatcctgtactggaacagaggttccaacatcgataggattttccctattgtttctgttggcacactccactaaaggatcatctttagagtcttcttctagatctccaaatttgtcttggagacgagccattattctcttctttttttgagaaagcttctcctgacgggctagcttctcctgggtctcatgcaactccttagacactcgagccacctctagatcttgttcataatgatacccatctttgtagtaccagtctttgacgtattctctatcatcatctatttcctcctctttatcattatggtttttgttaacattcttacaatgcttgcttaggtcaccctctcaattgtcaacttttgatgtacctctctcacattgctcgactgagcgtgctctggggagagagggtttacatcctacatgacagtgtcgaggccaccttgaggagccttcttagtaactgttttttgtgtatacaccatggttgcagtagcaccatgggcttagatctttcttcagctctcaataaaagcacccaaaatgcttaccaagattttttgaaaatgataacataagagtttaagaaataataaaatacagtagtaaagaggatatgggtttttacatggttctgtcgtcaatgagtcttagtccacgagttagtctattagccttaagaggcttgtataatgtttttacaatagtgtttgcaagaaattctaactctaccatcttggtttcttttgaagaagaagaaaggtcatagtaattttactagagattcagctatttatttttcgatccccccttcatatgaagataaaagggtatttataggctaagggaagggtatggacatgcccatgactcgcctagggtttttgcaataaacccactaatggggtaaaatacatgtaaacgaactgactattaggcctaaaagaaggttttgtgctcgtgcatagaagcagctagacaataggggactacaatttgtaaagaacacatgtcaccaaaagatttcaccttgcaaagtaaatgcctgaaataaccatctgacaaaaaggtgtatggggtgtacacactactatggtctgacatagggaaaaagatctgatcttgtgtcaagaaaaagcataactgtcattgggtgatcgtgggttcttcatgaaggtagacatccgtgtcttttttgggcagtcaacattcatgatagccccttcgagtaaccttccaggtatcgtttgtgcacactttgaacctaatcatttccgaatcccaaagggatagtaagccttccgtatcctggatggcataataagacaggataaatcttcgtatgtcctttggtcttgatctgttcctggatcagcaaagcttctctgtgacttagtccaaacagggggacttgtctagtgactatttaaagttgtacttctcctttcaggccacatatctttcgtccgaaaaaacggataacagctgaaagttcttctgtgttgacaattatcatagtgtgttttaagttaatctaaaaaataaatgatcatgtgatttaactaaaaaaaagaagtgaattaagtttgaaattagaaattatgtttgactagttgatctatttcttttcacttaatatttaaatagaatttcttttatatatatagtgacaattattgagagaactatatattttttttttttttgaagaaaattgagagaactatattggagaaatcat

SEQ ID NO: 238979 - DNA, 2203 bp, Cannabis indica
ggtacatatccactaatgatacttacctcggggtaaaactcctttctctcagggagtgaatagaacatcaaattcttaataccacgaatctactcagcaggaaggaaaaaacataaagaaagtgttaatagttaagaaaaatagactacagtacaacattttatagaactataacattgagcattatctaaaacgccacatggaagcattatacaaacatgaagatttcatcaattaaacatcaattactcacccaatacaagcatctaaacatagatagatacaatatctaaaaataaaagtaatgcatgtgtatatatcatatacacaatacatgtatataaacaaacacatgactgcataaaaagtattaagtgatcttaaagagcagttcaaggaccttgtatctgtggtagaagtgcattctctctgtataaagcatgattttccttttcccttcaaaaaaccaaactcgagcacgagaaatatcactttgttttgtatacctgataaacaaatgccaaaattttgtgaattataatattttccacaaagcaagagatagaaattaaagagttacactatatgtgattcaacatgggcagtagggaacagggatgatagattagcagcctcttactctgaaagtagacaaaaggatgcattctgtgactttaagaagttcctaattcgaacaaactcaaagtaagaactgatgaatatcataacaccaccctataaaatattccatcaaagaaaataaattagtactaactaatagacattgcatttaaggaaagtttagccattgcaactacaactacctcactagaatctttaatctttgggaaaacctgcagcaagaaaatgaatattaactcacttttcataacacacacacacacatgcaatggaaaatacatagaatgtgttccatttgaattttaataaaatatatatcaagaaaatcacatctacacaagcacacgtaaaatgaatccacttcttccagaagaacaactgcaagttgtcaattacacagctaaatcttaaaagaaaaagaaagtaattagtaaaactgtagaaagaaagagagaaaaaaaagtgaaaagaactgtccacatagtcgcatgttcagggctgttctattaaaaataaccagaaaagaatgacatgagaattttcaaaatttatattcatcagtttctggataacaggatatttactgtgcaagtaattgccaagagaaatttttcagtttttagaaggaaaatctagggattgccttcccaccatcattgtttcaacacacattcagagaaatatttgttacaagcctattggaataacatactataatccagcacagaaatttcattgcatcaaccaaacaattaagtaaatcatccaaatatatttcactacttgtctccagtgcttaatccaggttgtaaaatagtacaaaatgcactgttaatataatttgcttgctaagtttgtgtaagtgtgtcaatcatcacaaaagaatatggcatctactgacatgttcaaagccgatttacaagaaaaaaacttcagaggggtcactcggccactactatcctccatgtcttggcacagtttatggtctttctattgtttagatacctgattaggtgtaaattccagttaaaatcccaaccatcatctatgacacagaatttatctcattctgttttgcttcaccaatagtgtagctagatgatctcttgtcaaaagatattcacattgtaggcatgattcacaaaagctgttgatgaggtataatccctatcaaactaattttttttgtgacaaattcgcgagctttagatgcaaccaaaaatatccaaccaaaaaaaaagaaaagaagaaaagtgtttgcaaaaaacataaaatccgtggtctcttcaatagggactcattttgaggcttgtaaaataatcttataacacccaactgcttcacttgttgacaaggcttcaattttcacattatgtaaatgactggctagagaaatacatcataaatctataactaatcttattaatttacatttttatagatcaaatgtagagaaagttctacgcaaaatgtttatcctaaagctaggcacaaatatattattgctgttagcagtcaaatacttacttagagagagaaataataaattatgaaatataaa

SEQ ID NO: 238980 - DNA, 3443 bp, Cannabis indica
ttcaatttgttatcataaggtgttgtaaagaaaagtctatagtgtaaatagcaggtatagattatagagaacaaggaataccaaagtcagttgctgtatagattgcttgtgcaggcctcggctgaggtgctggtagtgtgtaaattttctagtgataatgaatttactgattgatcaaaacaaaaaaacttttgggagtggatctcagaagccaacacctccaacttcaaacaaagaggctactcctaaggctccaaacacggaatacctgtctgcttccgttatcgacttgattgagcccgttttgaatgtggaacccttgcagcaagtacccatggggagcagtgagcaggatagctcggattatgatgggccagtcgtgctttcgaagaagtagtgatctggtacctcagagggtgaagccaataaagaggcaaaggtgaagatcaaagagaaagttcttcagctggtagcctcaaggagataggctacaaaagtttagtctcgaaaggggtctaaggtcattaagaatggaaggtcacctagaaggagcactagatccaccaaggaaaattaggattcgcctccaccacccccaacgcctaatatcattcttgctactgccacacaattatccagggagaacatagctttacctccatttccccctccgcacttcaatcttctatcaagcctaccttagtgatagaggaaggcaaggcacatctggaggatgttgagaagttttaccaaaagaggcatagcagtgagtatgacgaaataagaaagttagcctgtaatattgctactaggtagaacgccgagttttccgactatgacaagtgggatgagccttaccctggcttcattaatagggctaagatgacgaaaagatttcaccctagggttggaactgacgtggctccattcttggctgatttattggatcagagcactaccatgagctgtaaactcggagctcacaagtttgccatgatggcaagtggggactctgcctatatggcggatgctatgaggaccaaggctaatgttgcaagttaattttagtttaacttatttaagataaaaaatactcctataatttttaagttgtgtttttgtataataattagtattttaaataataaataatgtgtaatgttttaatttttaggtaatttaataattttatacatttaaatttttaaaataaactttatttttaaagtaggggattccctgccccattaggggatccccccccttcttgatggggaataagcaaggtttgggaattaaaatccttaaggtgaatggggacggggggagcacttcctgtaaatttctcaccccgtgtacatccctagtcgtgacccaccacaaccatccttgctatgacccaccaccccaaccatcaccattagagcaccaccaaccaccaccacaacaacaacaataacaccacagtatatttcaaacaatctcaatatcagattcaaacacaaaataaaaactaaatctcaaatctccaatcttggatccaaaacaattaatacaaaagaaaacacaatctcaaacaataaatgatgaaacttcaaacagaaacagaagaaaaactcaccaactctcaagttgaatctctctacacaaacaagcctagacttttctcagcatcgacgagaaaatagaggccatgaacgacacctcacctcccaaattccatcctcaaatttgaatcctccttctcaaagttccctctcactttgtcgcatctcctttcgttcttcccttcgcgagtcttcgttaagagatgaagggagcaccatcagcttccctaggacccaaaaatctcaatcccatctcttcctcttgatttgtcatccaccgtcattgggctactaatcaactacgaagaagatggagagaggaagaagagcgtgaagaagaaagaaagtcacaaatttagattttaggatttttttatttataatattattaaattttagttattttttatcgtttaaagaattttaaagaatgattgaaatatataaaataagaagtaccaataaaaatatgacataaataatagtggaaaaggcgtgtgatcctcttgtttccctcccatggcgaagaggaaaaaaggggtttcgaagcctagttcgaagggcaaccctgtgctgcgagagagtcctgagctcccttcaatccaggaagatgatgctgcgactaaatcggaggtgttcttggatacctgcgaagaactcgaaccagcatggaaggaagagatatcggtccctgcgattcagaccccatcagcgagaagttgggtggacgaggctaaagctcatgatttccaggagtcggctaagattgcttggagtaaattcaaagtgaatcaggtgagaaccccttcttctcagcttaatttcactgaaccactggaaataggtgatcaggtggtagctcaacttgatttagaggaagcagaagttgaagcttccttttggagatcttccattgtttgtattgtcttgggggcccaccctcctttcaaggtgtttgaaggcttcattaagagaatttaggggaatttgggagttgaaagaatagtgagaatgcactctgggttcaccttggttagtttcaaagataaagttactagagatataattctagaaacgggggtcattcaattcgataagaagccggtggcgttacgaccttggaccgtggatatggatgctactcagatgattaggtcagtcccggtttggattagattgaatggtttgggtttacagtattggggaaagaagaatttaagtgctcttgtaagtactattgggaagcccattacggctgacaaggtcgcattagaaagatcgatgattaagtttgctagagtgttggtggacgttgaaattaaggatgatcctccgagaaccatagcttttgttaacgagaaaggtcaactggtggaacaaccaattgagtatgaatggctgccaaccaaatgtgcagcctgtggtatgttgggccatattgtgtcgaattgcaacaagggtaaaccagttagttggaagaaaaaacaatagggggaaaaagagaggaatggaaacacatagaacatggctgctaaggagatgccactgcataaaaatggcaatgcttcagctgatatggcagtcaaagtctcggctgttagttcgggagctaaagagaaccaggttattcaaagctctaaggagtcccaggccatacagagttcaaaggagggtaatgataattggattactcccaagaggaagggcgccaaattggttgacaatgatcagcgagaggcaaagactagtaatggctttgaagctttgaaggaagcagatggggtcttgatttctaatcctgttaatggatagttgtaatatcattgggtagaatgt

SEQ ID NO: 238981 - DNA, 4938 bp, Cannabis indica
  modified_base (5)..(5): a, c, t, g, unknown or other
gggtntagagtgtaatttcctttatattattaagcccaatagatatagtaagctatttattaatgggccgagggcttggcccagtgggccggcctagtttttcccctgtaatggcaaaatatagttttaactaactaattttagcaaaatgaaaatacacactagtgtttttgctcacctttcattgaacttttcaattgaatggctgagaaaaatccacagcttcaatgaggaacaaaaccaaaacccacttagaaaattaaacacacacttctctctgcaagtttacataaactaaggtatgcttcccagttcccagtctctttcaataaccaaataactgtgtatagtctcaactctcaattcaaacaacaaggtcttgtcttttgtaaagatagaacctttttacttgaaaacttaatatgagaatgaagtatacacaaatttttttcttcatgataagattttcagttcagggttatcctctttagttatagattatacataaagatgcaaactttaggatattggcccttaaagggtgacttgtggatagtatctgaatcgggctttgaaaggaggagctcaaataatggtagaaggagaagaaaaactatatggggtcttggattttcatcattgcttgctgatgattctagaggtaatggatatgggggttgttatggaaagtcaagatttgatttgggatatgggttttccaaacttaaagttggtcgcttttgtaagcctaagaaaaattctttaggttcttcagttgctttggtgtttgcattggaacaacaagcaattggtagtgaatttcaaattgaagaagagttcaattcaaatgggactttgtctgaaaattctgagattgatggtaatctacatttgagttctgccaataatggtggtggaaaagaacaaccaaaaaaagaaactggtgtgggcagtgagggagagaatggtggtaaggtcaatgttcgcgaactcggtttgagtttagggttagctaaaacagcagatgatgtagatgagattcttaaggacaagggtgagttgccacttcaagtatactcaactttgattagaggtcttggtagagaaaagttacttgattctgcttttgctgttcatgagtggcttaagagaaaaaaggaagaaactaatggagttattgccccaaatttattcatatataatagtcttttgggtgcagtgaagcaatctgaaaaatatggagaaatggagaaaatcttgaatgatatgagtcaagaaggagttgttcccaatattgtaacttacaatacaataatggcaatttacttagagaaaggacaaggtgtaaaggcccttaacattcttcaagagattcaaaagaagggtctcactccatctccggtatcctattctacagccttgttggcctaccgaagaatggaagatgggaacagcgcgctcaagttcttgttgagatcagagaaaatatcaaaagggagagattggtaaagatggtaatggtgatgaagattgggaaaatgagttatttaagcttgaaaacttcacaatacgaatttgctaccaagtgatgaggcgatggcttgtgagcaggtcgaacttgagtactgaagttttgaagcttttaatggctatggataatgctgggattccactgggtcgatctgagtatgaacgattattgtgggcttgcaccagagaagatcattatcttgtggcaaaagaattgtatgatagaataagagagaagtattttgatataagtttatcagtgtgcaaccatttgatttggctaatggggaaagctaagaaatggtggacagcattggagatctatgaggatttgttggacaaaggtccaaagccaaacaacatgtcacatgaactaatagtctctcattttaacattctcctaactgcagctagaaaaagaggaatttggagatggggaatcaggttacttaacaagatggaagagaaaggcctaaagcccgggacaaaggaatggaatgcagttcttgttgcttgttccaaagcttcagaaactactgctgctgtgaagatctttaagagaatggtggaacaaggtcaaaaaccgacaagcctttcctatggggcgttgcttagcgctcttgagaaagggaaactatacgatgaggcaaggcaggtgtgggaacatatgcttaaggtgggtgttgaaccaaacttgtatgtttacactataatggcctcagtttttgctggacatgggaagtttaatttggttgaaacagttcttagtgaaatgaattcgtcgggtattgagccaactgttgtcacatacaatgcaatcatcagtggttgtgctaggaacgatatgagcagcgcagcatttgaatggtttcaccgaatgaaagctcacaacattcccccaaataatgtgagttacgaaatgctgattgaagctctagctagagactctaaaccaaggcttgcttatgagttgtacttaaaggctgctaaaactgaggactttgacctctctccaaaggcttatgacatagtggttgaatcatccaaattgtatggaattcctattgatctaagagttttaggaccccgaccgccggacagaaaggatacagtgaacaaataggaaatctaaccatatttatagtctcaatcatttgaatgtgaaagtaaacaaaaaaagaaacaattcatttggtggtacttggtgccctgaatttgtatgatactagattattcaaccccatatatctttgtacatttttggctttgtttatagtgtatgcagcttcctctcatctcatatttgatgtaccaattagtcttttctacatggatgaaaaaagaagcttcttagtccatataacacctttcccagcttgttacagcatctttttctaaataaagttttaagagttatcttcttgcaatataataggtaccaccaagtgtttgaatcaaaattcatgttcctgaattgtgtaaagaaaagggtcatcatcaaagtatcaaagaatagaatataattaaagaaaaagtaagcatttttaatacaaaaaaacagattagattatacctttttgttttggatgaaataattaattaaatattaaggagatgttttttgtcaacaatatctatactataatggcagttagcatcaatatttacaactcagtatatctaaagatatagtttttattctagaatctgagtctctgactacatggaaatttttaaattaaagttaatttttctctctttttctttttttttttttttgacaagtagtggatttctttttaatgttggctgctgttttagctctcacaagtggacactgaataaggtattaaaatattcaaagatatgtcaattattgttatctttacccaacaacaattattatcttgtggagcacaatcttttgtttgtatttaacaaacctaatatctattagtgtcataacaaaaaaaaaaaatatatttttttagttttttttattttatttttctactcaaaaaggtgaatttattagaaatttaactgggttggcaagacagccagataatctaacattaaatatagatacataaaactttttgcaatgcttttaagtatcatatcatatcttcatattattatatattgtaataaagggtggttaattaatttaaaatagatgctccagtgaatcagaccaagaagaatgattttggagaatatatgtacaagtataaccagctaattttccataaatcccaatattcatttttgtaaattatgattggaacaccaaactaccaaagttgtgagccaataatgttctcagtggtactttaatgaactttaaacatcacagctttaaatcctctccttcgtttattattgctttggattgctttagatagataatctagcattgctttggatatcgcgaagaatcaaggttttaagtttattattgtagagagtaattcgagagtgattatcaacgctcttaataaggaggtttcccgttgagagattgagaactatatttctttttgttttaaatcctctcatttgtttgttagttgtattttctcgaatattagtaggaattgtaattttgtggcacataatgtggctaagtgggcatttacccacatgaagtttgattgtattccgactttttctatcccgaaacacttattttataatgactgtgaggtctaatttattttgattataatatatgtacgcttttttttttaaaaaaaaaaaaaatcaaaaactttctttaaatacttttcaagtttggtttagaagctgagcaataaaataaatcccatttttagtttgtacaaatcaaatcaaattaacccaaaatataaaacatcaaacctaataataataataataataataataataaaagtcttatcttagctactaggaaattgaagttattaatgttattacaaaatttacaagcaataataattccattttctttagggtgttattattatcacatagtgatatattcaaaattaatcaataaaaaatgtcacccatcttttctaaattagcatgaaccaacgatattttaaagtgacatcttatttatgtttaaatttattagtttcaaaattttaaatcgtaatatacaatcgattttttctgtcaaaataatatatataaaatccaatttaaattcaactattcatgatagaatatcacaacttcacaagcaatgttaaagagtttatagtgacttataaaatgatgatagttaagtgttaactctttttcttccttttacaagtctttcaagaaggaaaaatgaaagagaattttaccaaagtgtttgtgacataatatatacgtagggatatgattttgtcccgtgatgtactttcacggaat

SEQ ID NO: 238982 - DNA, 2956 bp, Cannabis indica
tctctctctctctctctccgtctatggtctatatcatcaattatgtatatgatggataagtcatgatatgaatactcgtagggttgtgttgcagaccaaggttgagattattgtgacagagggagaccaagaggggaggaaaatttccgccatggttagggagattggagcttctgctattgttcttggtctccatgatcatagttttctctacaagtaagttgttttattttaatgctctgttcccctaaaatgcttcttcccttttctttttgctcagaaaaaaaaagggaagaagataatctacagaattttaattgctcctgattgcggtcacgattggaaacttaggaatgaatttactaagtatatagtttgggtgttttgattgatgaagaaatattaggaagcttcataatacgtgggtggcttcattttctggatttaatgtcttcaaattaatgagtatgaatatgataattaagtttttcgaatattttgagaatcaacatcatggtggtgatgatgatcattgatcgtggattggttggtataggtatatggtgtgaaaattttggggctaaaattagataaggggtggggtgggacttttatttacgacggctctctacttgaaattaattaatggtcaactgttatcagatgggtttagttttagcgttaggtaatcccacgtattgaccgactctctctagtttatatttgattgtttaaaccttagacccaattagaactggttatggtaacaagcagcccacttaacttacttccctcctggtgggaccctaaaggtcctatctttgtctaataatatatatatatatataaaaaaaaatagatttgtgtctatgtgttgttgtgtactatatatatcgctaattgaataatttctgcgtttgctgtatttgaaatcgtggaattagtaaaataatctaatgcccaacatttccataaaaatgaataatatcacacaaattggattagttttaaattatggctaattgacctatataacaaatggaaacggagagtctaagataaacaatactttcatttcttttttagaataaatacttgttccagtctaagtctaatgcactaagcacctttaagttttattctttacattttaagtgaaaggttaaaactggaacggtcagacaagttttcgaactagtgctgttgatgttcaacaatacattatacttctataatatacgtctggtgttgttgtacttgtaatcaaggaatttcttatgggacttattaatactgtgaatgcaatatatcatttatcgattggttatgcattactaatacttgaaaactttgatatagaaatttacgtggacttattttttttggggtttctattagcaaatattaaaacagtttcggttatgtgctattaaagatatgtttagtggcactttgtaccatcaagatggatgaaatcttcaattcccttttcagactactaacttttataactcagttcgaaatgatacaatcaatgaaggtctatctactttaaaagttttacataatttgtataagctcttttttaagttcgaccccaaataattaattactagttggtctgttcttgtacttttgtctttgtatgctaaggattcaaaaaaacagggaatgtgatgatcaagtgggaagacaataattggaaaattctatgaacaaaatcacgcgctataagttcaatcatggaccttgcatatgggccccaccttttttccgttcattttttagagttctttttgagatattttcttgtggccaattcaaaatatttaaagcaaaatatataaattggtattggttttatctggtttcttcttaatggaattaagtgatccacaaggttgtttgttatttgtccccttcacataaattattaagcattttttctcgttataccaagttcaataaatatatgatatccactttttgttatatggttttactaaggaaagagagtgtgttatctaatttgtacctgtgaatatataggttggcattggcccacaacgatattacaaaaagctttagttgcagagttttggctatcaggcaaccaccatgctcagcatcagggagaaagacaagggcaagggccagtactactgcttcacttgctctagacaattcaattagcatggatttttcacaaatcgacatcagtggagtactacggtaatattttaatcagatagtttaattaatatattagtatatatcatatactttttctattttttttaacaaaataataatgttaacatattttttttttagtaaatacaacaagtaactgcgtcataatagacattttttttttttttgagaaaaaggactattatattaatttgtagaaaaattacataatagtcataagtggaggtggaaatttctccaaccaagaacaatcagtatccaccgtaaaaacaaacttagtcaaaacgggcataagtattagcagatcgtctgacatgagagacctgtgttcgtggaaaataggatacaagatagttaacatcgtttaatacagcatgaaaagcagaattacaatgagaagcaacttttaatccctgattaccaacaatgaatcagtttcataatagacatttttgaagaaacataaatattttttctattttattgttttttaaaaaataataataatttttttttgaaataattgatttgaagaaaatgataatagagaaagatatgtgaaatgtgtttaaaattaaattgtaatgttaaaaaaatatatatttaatgttatagactcacatttaatataaataaaagataagagccatatatatagtgaataaggttttacggaatgttaaatatttttataatttttttgattttatttacaaaaaatacgatttttttatgttatact

SEQ ID NO: 238983 - DNA, 3004 bp, Cannabis indica
ttttcttttggtgaatcaatccagcattgttcagtagttaagatacatgttgtgggtctgtattgtgcattagttgtttaatatcacttcttattatggaaatgtgggaaacaatcttgaaccttcacttgagtgcaatatccttaagtgtgcttgaacagaagtaacctacattaaatcaagcaagctaaagtcaaaatatttcttgtaatttcattaattgtttataccatactttgctttgtccatagttctcatgagaattgatgtctcctaaattaatgttttgtactgattgtactgaaatctctttctttgaaagattatttgccagcttaatgtgtgttctctttccaaaccctataccatctcaacatcttcaattaccatagtaacattcataattattactggagtgtgaacttcggctttccacatttacattaatcatatggttatctctgacctgcctaatgacattattatgttcaatcttggaagacatgaggaagccaaagctggccgctgaaatagccaaacaattaaacagatttcatcaagtggaaattcctggttcgaaggaaccccagctatggaatgacatgttcaagttcttcgagaaaggttttcttttaaataaatattgattgtatttttttaatgtagtatgctgtataatttatctgtcgaatgaatgcaatttttctcatggtcatcttgccttcttcttgtagcctccaatattgaatttgatgatattgggaagcagaagatatacaagaccgtttcttttgaggagattcagaatgaaattaatgagctcaaggtagtcattgttttacttttcactttctttacgctctgagaggatatttggctctttcttaataccaatattttagttgtctttcctacatacattcatgtctgtgagctgcttagtggcatacttgcttcttaggtttgtgatagaataggtgctggaatttaaatgtaaatcggcactcaagtctttaagtctgtagtatttcacaaaaatcgtgagtgctttttctttatttctgattatgtaggttcgatccatgttgtgttgtagttctgaccacttggagagtaaaaggtagaagatgttttgcatgcacttaataaatgacctatcaccaattgagattctccatcataattcataatattaatgaagtagggatttactttcgctgaatttaaattagctattaagaaagaccctcataaaattcaattaatatccagcttagttagaattatgttagccttatgaagtgaatttttcttcagcattaaattgttgttgtttggagccagcagcctaaatgttctgaacaatgtctggtggtgatggacgaaggaattgtatatttttatttgctctggtaaatcttactggtctatagttaatattttctgattttctaacgaggagcaagggttctaaggatttcatatgtatttacatgttttccataataatgaaacaggatctgacagaccgttttaatgctccagtggtgtttgcccacaatgacttgctttctggaaatataatgatgaacgatgaagaaggtattccatggatttttttttttctgtggtactttttattgactcctgtggttctttagcaaatatcaatcttttggtttctaaatgtgctttttttaactacccgaaactatcaatagcttgcttgaactagacatgatgacgatgattgtggcaaatgaaatagcttgctaaagtaaataatgttaatttttcttactggtattgttttccgcttttccaatctacttactacttcgcattctgttccttgttcagagaaactttacttcattgattttgagtatggatcctacaactacagaggctttgacattggaaatcacttcaacgaatatgcaggctatgaatgcgagtacagcttgtatgtttttgttttattttctattttctaattctttatcatattcccttaaaacattttgtagaacagctactttccggtttgttgatactcattactcaaatcactgatgtcaatcgtaaattgcagatatccaagtaaagatgaacaatatcatttcttcagacactatctacaacccgaaaatccacttgaggtatgttaaaagagctttctcaaacttgaactgtcttcaaaaaattcatgttaaaaaccattgaaggctaatatctctactaacctaaataacaggtatctgagagggatcttgatgctctgtacgttgagacaaatacttacatgttggcttcacacttatattgggctttatggggcataattcaggtacgcaacacacccattctattattcataaccttcaaaactatcaagaaaataactcgggtttacatatgcatatacatatgtaatatgatctgcaggcaaagatatccccaatcgattttgaataccttaattatttcttcttgcgatacaatgaatacaaaaggcagaaggaaaattgcttcacgctagcgagatcatacgtctcaggatcagaattaggatctgggaaagcccaaaatcttacttaagaggcaatgagagaatgtgacttcttaaagaagttttcttgttcatttgtagtttgattttttagttgtgtaatattttttgtgattcaaccatgtaaagaccaagaatgatacactaataattggtgttcaaggatgccgagtctattgcaatatgataaaataattaccaaatttaggggtcattagattaccagcttaaaatcctaaccgtactgcgtggtgggttgagtgtccaatttcctaccagtgcgataaactgaaatttatttacttgaatgtgctcttttctttattactttgcaagtaatggtgtatgagtactgaaaattgttttttttttttttttttatatagaattttacccaaaacatgttcataattatgtttaagctggttgtta

SEQ ID NO: 238984 - DNA, 2025 bp, Cannabis indica
tgtactgtgtttgataatgactttgctttttcatttggacttccataactgtttcctttcgtctcaatgctgagataatctgtcaagacctttttcacgcctaatccacgctgggcaagcttgccactggtgatgaatggtgatctatcacctcttgctgggctaactaggtgtgcaggagagaaacttggagtggcaaaagctgttttgtatggagtgcttggaacaggaacagagtatggggttgtaacaccattttgagatagcaagccgacttttgagatcgatgagaactgatcagaatgcttggttaagtcatccacatagagtaaatcatctatacgtgctactatgttaaatgcgaggctctctaaaactcttgaataactctccaaaatggatttcccaacatcctgaaatagaattgaattttatcatttgtattagattagaagacatctagaagaaaccatctgagttcacaaaagtacaaaccttattgtactgaattttgctcatatctaatgctgtttgaggaagaccggggaacctttgtttcaagcaaagcaggagactttcggctctatctgcaagtagttcccttttctcagcatcaaccatcagatctttgaccatttcccatgatgatcttgagctggatctggacgtgttactggcgggtttggagtttacttttctgcgccacacatatattgaggcttctgctcgattggcaatctctatcgcttgatgttcggaagataagtcaatgcaatcaagtagacattcaggataaaattgttccgatgatatgtaccggtatataagatctcccaaacaggcttttccattctgaagacaaaatgaaaaaaacactttcatcacatctcatggaacacaaaatctggaaggctttaatggtaaatttaaacaatacaaacgattcatacctttggaagagattctagatacgattcagggattcccatatcagctaaagtaatactgttgatagccatggcagcttttaatatttgatttgtgcagtcacgcttatgttgcaattgttttcttgtatcttcatggaggccaccggtaggaactcggggtacaggcaaccaccacttctcttcttgacgctgaagtgatcttcggagagaagatgatccatcgtcatcttgggtcaaaatcccttgatcaacataccagaactctgtgttctcaaaaccgtccaatatttcctgaaacaatcagctaacattttataagtaaagtggccttgtagaaatggattcattttatttacaatttaacaaaagtaagggtctcttacaagaagcatgttatccaatttacgaagtgctggaagattaacgtacagatctgagcgcggtctgcaagtcatgatctgaagaacagaataaaataattaacatttaaagaagctgaaggtataagtcagcccaattgaattaaaatcacttagaagtaataggggttccttaaaaaaaaaaagaatactgtctgactaatacttataagaaggcccttataatttatagctaccttaactaccctatgctgagtttgttagtttccttttgtcttcttaggggttttcaggaattgtgttgtctccagtttctgataacagaaacctatgattaaaagaatgtcacatctaaatttggagggaattgacatttctaagcacatacaattcattattgtatgaacatactggatcagttatttcaattatataaaaaaagaatccttgataaagttactactctatgtcatagttgccaaatttaaacaaatttttaagtcttaagctttgtgttagcctctaaagagagatctgaagttcatggcattcgagcatttgaaagaataaaccaagaaacatggactagcaacattttggagtgtaattaacacataagaaaacagtatatcttgctgaagggctatctgaaagcatgacagattgatatatttagctacaaaaattgaagatga

SEQ ID NO: 238985 - DNA, 6053 bp, Cannabis indica
gtgtttttatatgttaaatgcttaactttcttatttattcttgctgcagtgttttgtcatctttccagatgaatatgcatttaagaaaatctcgtattgtagatagcttcactgcaagcatggagaaacttcaagaaaacaggttttctcaggaagaatgcatggactttgaaatgttttatgcagctgaagaagaagctcgaaatgcagttacattattcgaggaacataacctggaggagatgattaacctggtaacatcatcatcgatggttgcaatgcatggaaaagcaaacacagataagcttgaggactttggagaagatgatgtgaaccttgtgagatcttgtgggattgaacagtatgttgtgaacattgcatcatcatctcaagatgcagcagagcttggagaaacaaccgcagaaaagctttgggacattgagagagattatgatgtgaccattgcatcttcgtctcagggtgcagtgcatggagaaataagcacagaaaaacttctctttagagaaaatgatgtgaatcttctgagaacttatgggattgagggagatgatgatgtgaatattgcatcaacatataaggatgcattgcgtgaaggaatatgcacggaaaatcttcttgacttagaagaagatgatgcaaaccatgtgagatcatgtggatttgagggagatcatggtgagaacattgcatcatcaactaaagatgcaatgcatggagaaggaagcatagaaaagctaatggactctggagataatggtttgggagaatctactgatcacgttggacaacacggtgaagatctgcaaattgatgggcaggagaaaatcattccagaaagtgaccagccggaatgtgaaacatgcgatattattgggcaagcacctggtccaatcacttcagaagctgaaatggagaaacttcgaaacagtacttacacacaagtagaaagcatggatgttgatatgttctctgggtctaataaacctcaagaatgtgatgaaccatttgctgaagagaatcataatgatgaagagcaaacactcactgagatgctagaaaatataaaatctcgaagcaaaggagaaggcagttcatcagctacaaacttagcaggaccccaaagtaagattgcagtggagtcaggtgaaaatttctcaacataatactgataatcagacaaccgtacttttcctttacttttccctttagaaaatttggctgaaagtcttctcctaatgcaggtgcttccatcccacagtttacgctcattccaacaccagccggtaaagatcgtgcacgaactacgagtaaaagaaaatgtttcattgatgatatgatggtgatccctaacgagtatgtaattgttatccaaatctgcatattttcataccgtaatacttataatcgtgattttggtttatcctaataatgcttactgcgtaatagatgggagtgaaacacaataatatcaatacaatcagaatcattatcggttgtttgtatgtctttccttcgaaaacttaaatactcgctgaaaattatttagtattgaaggtttgagctgctctggttattcaatccttttctatttaatgtatttcatccatttcagtgaacttggctaaagaactgatttgtctgtttttctatgctaaaactaaacagggtgcttaaagatggaatagcagatgcgagtgatttggtttctaaacgaataaaagctgctcattcggccctttctgttttgaatgctaaaacctctcaaattctccaccataacttctttgagccgttactaccttgtaagtttattttcaccattgcttctgagattattacttgtgaatggtctaaacattattttttcttacaggtctttcatcagaactgagatccctcttttctgcaaagaaattgaagattgtagagtgtgctaaatccgtcaaacctcgaaaagaaatgaacatttcggagataccaactttttgtttatcaaacccagagcaaataggcattgctccagaaacacctgttcagcgtgctacatttacaaattcatttgagtgtccaccgagccccgtaactcccaactacagaatgagttgtgaaaaattgacaaaatcaattgagagcccattgagccctggaactcccaaatatgatagagaaaggtctgaagcattggaagattacttagaactgtgctctttagcggaccaagagcaaccgtgccctttaggtgatcaagagcaaccgtgccctttagggggtcaagagctaccgctgtgttctttagtggatcaagagctaacataccccgtagaggatcaagagctaccgcgatgccctttagaagatcaagaactaccgccacaccctttagaagatcaagaactaccaccgtaccctttagatgatcaagaactatcaccgtgccctttgggggatgaagagcttgatctcaatctgatcgatgaggtagtagtcttagacatttattaaacatattttcttattgagtagtcctggtcaggacaaaatgcaggatttgtaaatggcatgtgtttagtatttttggcttagaatatgacagtgtttctttttggtttcttacatgcacctcatatatagcttctttctctctttttccaggtgacaaattcatgtacagacaacaacaatgaatcgcgtaagaaaccatccctttcaaatttgttatgttacttcatttgagctaataagttggtcacttttgatttcacattttgtttaatgaggaattctttgtttattctagatggatggtccgggcgaacaaggtatttccgatagccattattcaagttccatcttcgatatattcaacatattagtcttatctctgtcaaaattgtatccaacatattaattttatttacagaatagtgactaagtacttgcatagaagttttctaaatcaacagaatggtgggaaggaagaggtcattaacttatcacgcgttttgaatggaagaaccaagaaagaaagtgccagattcttttatgagatactggtatgtttcttatgttcttaaaatattttagtctgattttcacaatttaaatatcattgaaacgctttgatcagtaagaagatgcctgtatgtttttgacatggtagtggatattattagctcttcgaaaaaactgtttaaagcttacagttttgtactctttccttctcagtttagagcttcctaatttctcttatatctgttacctgtggaaactgataacttacctttttcggtggctttcgcgagtagggtaactgttcaaaatgtgcatgagacatctaaatgtggtgatcttaaaattttacaggtgctgaacacaaaagggtatgtgaatgtgaagcaagatgatgcttatactgacattttggtccggaaactcaatacatggcccaaacatgtggagttgatattgaacaaatagcagctgaaatagtctaaatttaaattactacttgaggattagtttagttttataagaatgtagctttccttgtacataacaaaaaaaatgtcattctactttttaatacaatgtaggtttttatttgtatgttgaccccatttgatagaaaatacaatatattattttcacccgtaagtgattcttacctggcatagtgatccattggaatattaaaatatgcccaaatgggaaattttgtcctttagatgaataacttatcatagaaactatcatttttttcctttcattgtttccaacttttggtgttggaggtggttgtatattacatcatagcaaacttttattttacaatggaaagacttttttttttgttaaaatacaatgtaaagaggcaataaaaatcacatgagttcaccaagaatactaataggtaaggtttagttatgcttcaaactttttttgttcttatttctttctctttcaatgataacaaatagagaattttttgtattattattattatttattattattattattattattattattattatttaagagggtattaatttttagaatatcttctgtatataagatgaaatgtgataattttgtctatgactgaaaaatagagttttcgttatgcatttttaaatggaggagtgataaaatagagaaactaactaaagggaatgtttaaaccaattagataagaggaagatttttaaaagaatattcagaagaatcctatcctgtccaaatcagcaatgttcatttttctcttattatcataagctgacgaggacatattgtcctaatctacaaactaactacctagtttggccaattacttcggattcctattacttcttaaatctgtttatgagtcaagaatatgatcctattggttggtgtaaatattatatataaattttgaaactagtgcagaaacaagtttgcttatgccataaaaaaagtttgtgtaaatttgcttcatattttgaagcccttaaagctcatcgaatctgattccaatggcctgacctgagctcttaatccaaagcttcttcttccagagtctctcctaaattaattagtaagtgtaatacacaaattgttcttgttaaaatattttagtttttgacttatgtcatcttctagttctattatacatgaatcatatgtaaatgtatctgatttccactgttttttcttcttcttttaatttttgtttcagaatatcatcaatcagattcagaatatgtcgttttgcattaattgttgtcgttttgatcaacatgtcatgttttattaagataaaatactaattggggctcttattttcagagttgataagttaatttcaaaatgaaaatctttcaaaccctttggaacagtccagttggtcttaagacaactcacttttggggtcctcttttgaattggagcattccaattgctgtaagtaatatatatatatatatatatatcatcatcatctcacacaataaaataaaaatctcataaaatatgtatgatgttagtactagagagaaatcttatactatattaattgatcatcacaggcgtttgtggacagaaaaaaaccaccagaacttatatctggcaacatgactgcaggtactgttatttatatatttatttataataaacacgattaattatgattatatataatatataattagaatctatgatatgtatatgtggatatatgcagtgatgtgtgtgtattcagcaatgtttatgaggttttcatggatggtaaatccacgtaattaccaccttcttgcttgtcatttctctaatgagactgttcaactctatcaactatctcgttggatcaaggctcaaactcaacaaaataataagtaaattataatatacatatatattcattatgttcaaaatttgaaaattatatatattagtgtttatatatatatgcttaattctttgttactaattattacagaaacttggaacagaagaatgaggaggctgcacaagaagaataaaatctatatgttgtgtacaaaaacgttctaattaaataatagtaattgagttgaagggaattggtgtagttttttgttgttgatacaatgaattgtgtttatgcaaagatcaaatattttctattttgcccataactctttatatcaacattcaaaagacattgaaaatgtccataacaatatcaaattttaatagcttttctacgtttttttttttttttaatatatcaccaattttttttattattttaaatcaaacttttacaatttatcttacatatgcttctctatcattttatgtttattattaaattatatattctttttataaagaaaaaactaaataataacacatataacaaaagaaaaaagatagagatttgtgaagatttttgatcttgtagaatctaagttatttactcattgagccaacgatgtaaaataaatcgaattacaaacaaaatgcataaattaagaggctgtgtttttaatttttaatttttaaaattt

SEQ ID NO: 238986 - DNA, 4439 bp, Cannabis indica
caaaaaaaaaaaaaaaaaaaaaaaaaaaaaaagaaagaaagcttttctgccttgacagtggtacctttatagcaaggacgtgccaccaaaaggtcattccactttagaataatggcataatggggcttgaaaacaatggacctcttcttattagtgtataatgaaatgatggtgctctttgagcttttacaacaaaaaaaaaatgtatatcccagcgaatattttgtactttatgatcctttgttttaatataatgaagccgtctaaagtgagttatttaataatagcatttatttgataaactaatgaattcgtcaataatctacaatctaattacatgtatgtgttttttatgaatatcgccgccacaagaccaccaaatctggtaactttattatttatttttgtcgttaaatgcaaaagccatctcaaggagttttttagagtctataatgtattaatccttgagaataaagaattaaataaacgggaacatatatatgttaaaatttagttaacattagtgagtgcaatgtgaaaaagtgtcatacattaaaaattattataaggttttactttttataaggaaagaaacaatattaatttgtattattgagagcactacccatggatgttctaaactaatatttctttcaaaattttatatggaagtgatatgataagaaaagtcttaacattaaattctcctttacacgttttaaaattgtcaatttatcatcaattcgataatgtctaaaaactataatttttaaataacactaaaaaagacaaaagagaaaaatgaaaaatcgaccgataatttgagagggtgatcaataaaattcacctttggattgtggaaagagtggcataatgtcaatgtgttttcgggttgtcaaactttggtggcttttcttaatggagaattgattgcccaggttggaggagtgccctgacttgagtcacatcttgttcattatgaaaaaaattgctttgtctttattgcaagcaattttaatagtctaacggatgctaccaagtggcgttgttgttttaagatcagcaatgctacatgtcttaaataatgtggtaatatatttattaaaaaataattcaaaaagtaacacataagtttatataaaacaaaaatttatagcatgacatagcattcatgatgaaatttcaggataaattttcatgatgtatgacatgacatactccttaaattttcaccgtttatttttaaactagtctaccaaataccacatcagataaatggcagttaattcagttgctctgcctcagatcccgcctacaccaactagagagataacataactctagactctcttcctctctccctctctctaaattccaagttaaaatcttctagcttaagaaccgattgtaaatattggtgtcatgtcaaacaccatatacattgtaattcaagactttgtaattacattttgaagagcaataaagatctaagccattaatggttgattttccctaaagagtaggctatgaacttaacatgttcatgaatcgaaccacataaaactatgtgttctacttgttcattttattctttaaatttcttgctgcattattgacttctgcttggtgttagttttgatttgttctatgtttgttgtgtgcatattcgaatcacaacaagcattatatcacttttttaatactctattggatgctcttatattatacatatatttttttaaaaaagaaaatgtgttattacacatcctttgaaagagttttttctctttttttcttctttcatgtggagttaccccactattacaatttgacatgttagtgacccccacaattagactctaaattttagtattagtctcatatattgtaaatcactaaaaatataaagaatctcaagagtaataccacaaatctcacaatttttcttaggtaacaatttctcattcacggcataactattttgaatatataaaataatacaattttcaaagacatctcaccaattataaagtgtcttaataaaatcatgcctcaaattgtcactataaaattgtgtaaaacactaattttttccgacaaatgatactacatattttgaacaggtcataataataatactgaaaattattttcatttcgcatctacacgagcatattaattagacttacaaaaagtgttgatgaaaagtaaaacaaaaatctataaatgaaactagtaaaagtagtatatacatgaaaaaaccatgtggtcaaaacaaaataccacacctgatgtttttcagtgaaacctatttgtagaacagatattcaaattaagactatacacactccatcaccaaccctttgtttccctttgggtctggagggacaattttttgcctccaaatgtaaaagtttccatttaattaagaatcctgtatggccgtagatgatgacccattttagcaaaataaattaataaataatgaaacaggtaaaaggaaaaattaaaatcaaataactaacgaaccctattaaggaatgtgtcgtttagagtcatctgaggattcgttgaagtttttcacaacgagatcatagttgatagaagctagttgtgacaaattctgagagcaataataaaatgtagactcaaactttaatgatgcaatctcacacataatccaaaagaaaaagaccacatttctaatcttgtcatcaaaatattaatgttttcaggtcgtaccttgaatgagaaattgctaaatgagtagtgtacggcgagggcaggagcactaaactctgtcaaactaccacattcatctccctaatgatagcaaaataatgataaggaagaaatattgatttcatgttcttattccctaaaatgtttacttattcgagataaatattttggtaagtccaaagttgtatgaaaatccaaacaagggaaaacaggggttttggcactttggtctagttttgataatatatttttcaaaagatggacaatactaacaacaaataattatcaaaataaggctaaagtgcaaaacaaattctaaaaaaatatatctattaaagtaacaagaacaacagatgtagatgtagtggtgatgatagtcattattacctcttcgctttgtatgttgctatatgagccactgctgcaagtgtcggtcatgtcatcaaagtcgctgcctccattaacatggtcatcttcagggctccatatgtaccggctcataaaataacttgtgtcatgtgcttccgtggatggtatgaacatagcctgtgcccaacaaggattaaaagtgtatgaaattgttcaaattcatctcgaaaactttaaatattatttcaaggagcgggcattgctcaaaataattaaatataaatgtgggaatgaattatttatttacaccaaactaaatacttctttatcctttctagtttctatattagaaagtaccttttgtctcgcaagtgtatcccaattaacatccttgaagaatggatgtctcttcacctgccacacatttttgaggttacttctgagtaaactgatgcttcaaataaagcacgaagttctcattgtcgtacttacctcacttgctcccgttgttcctagtctttgaactggattttcagttagtaatctgaaaattgagtgtactcgaaatcagtaaggtaaaatgtttcattgcttggtttcaaatttctgatgacaatatttatttttatgcattaagcactacaataataagcctttcataagagcatttgtgtgagtttaaatgtgcagaatagcttccaatgaatacatacttgtcaatcaaatcataagcttcgtagctcatctcatcaggtgtcttcggccaggggatgtccctgtttatgatattgtcaaaaacacgctgaaatgaaaaggaaaattgttaatgttgaattctttatacgagtcagaaacattaaaaaagtcctacttagaaaatttgtagcaaaattcgttcacactataagggtgtgctaattttgttatacttccttggagtgatcaaaacttgattgctccatatatcttcgtcaaaataccataaagattgccaaacttccacaagaaaaagaaaatatctaatgtgatatcgacacatgctggactgttattaatttgaacaagttaactccactcaaagatgtcaagctgcataaactctccctggttaagtatcattgagtttatctaatcgactggagtgttaaaaatcaaaccataacacttcaacgctttgagttttgggaatattcgttttgattctaaatttggtcaccatgcgaccataataagctctatttatatatccatgatgtaattaaaacttatggattatgaaatgtagttataaatagttctccttgttaacatacttgaggatgatctgc

SEQ ID NO: 238987 - DNA, 4072 bp, Cannabis indica
aaaaatagtatatagggtaaatttcctaaaattactaagaaaatagcatcataaagagtagtacaagcagacaaggggagattcctattccaataaataaatatagaagattaagatacataatttttcattaattggagcctaaaaaaacacttttaataaatgaagttctcttattatttactatcagaaagattaaatttccgttaacatgaatctattatatttatttttcacaagaaaaaaaaatatcaattcattcctcctaaatattaagctagaacttttatatttattaaagaacaacctgtttgaacttagttaaaatttcgaaaagatataagaaatgaagtgtgtgatagtactttgagtctcgcataggatagaaatactttcttggaagtgtatataaagtgtaaccttgagaattgagtttaggccttaaggttcacccaattttgtgcgcatgggtaagttaggactcacacattcatgagccacgattaaagtaacgttcttttgaccatttttatttgattgacttaatatttattcaaaacaaaaccactacaagaaaagggatcttttatcccagtttttacacttagaaatatagaaaatgggataaaaagtatcttttagcttttaatcccacttttacgtttgaagtctccaaataattaagtctgggagtttggagcaagggactcgtttggaaaacagacacaaaacccttgttgggaagactatttttatgcacatgccaaacatagcctttgtaagactttttatcccagtttttaggcaataaccgggataaaaagttgaggtccaatgggcttcaaagtgaaaagaccctagccaaaaccctatcaattgattttttgttttctgtcgctccctttctcttgaaacctctctattattcccctctcacagacacagagctttccaaaccctaagctcgcatgaaacctgaaccaaaaaaaaagaaaaaaaatcctctctctccatctgaaattagcttcctagtccctctctctcttcctcaagtccattcagctcattttgaagatgttctttcaggtatgattattagttttatatattctagaattatatattaatttttttttcgtttttctcactcccaaaattaattagggtatctttcttcttcataaatttgaagttagatttatctctcaaccaaatggggtgatccctgctaacctcgtttttgggttagtgtgtatgtttagcccttcaatctcatctttatttgaaaaacatcacttacaagttaaaaacaaaatctcctctgttctcattgaaaatatctcttttaagagttggccacaatacatatgtaagtatttttttttcaatatttcttaagtgtgtatttgtttgaatctggtattgttgcttatttaccatagtgtgcttacaatgacaaaaatttatcatcgtgtaataatttgatttattttgtacttcagagtatttttctagtcaaactacacaaatattggatttaaaaattatctgtaaaagcagtttattgatttaagtcaaccatgatttgtaatttatattgaaaatgaactccaaaaaaagtatgttattgcaatgatgcttaatgattcaaatatttttgtaggccagcttcgattccaaggaggtaatgttgtaaatatcttaagatgaaattggtttgcaatgaatagatacctatttagttttttatttttgttataattgatggattgcttgtgttcgtgtctactttcagatggaaacatatatatatgtatgtatgttcccattattaagaatcggccttattagtccttgagctcgctgattatattaaaatagagaggcttttgttttttattatctagctatgtgtatgtagagataaagaaagtgtgagattataattaaagagttgagtacatagtttgtaagaaaaatttgttcttaataaattggattctaggccagagacaactggtactagttataatgatgttgttttcttattttgcttgagttatggttcttttttattcatagttataactagatatagaaatgattgttggtgcacctgattatgttcaaggcgacttagacttcttgcaatatatacatgtgtgtctttgattatgaaaaaataaaacaaaataaggaacaaattaattagtattagtaaaacaacacaatatgatttttctgtaacagttaaatctttgatttgcataagctcatatagtggggaaacattatacactagctctatatatattgttaatttaaagactttttatcccacttccatatatcccggttttcattttagcgaaaaccgagataaaatgccttaaaaaccgggattaaaggcctttgcttgtagtagtgaatcctcactattagacaaagcttgctgatactaaaatttggaggactaagtcttggaacccccgtgaagtggtataagtactaaacaacaaaagtaaatttttataatctgagttctaagacttaaaatggttcacttttgagaccaaaaataattgatcccactcattattattcccaaccttctatcaaccctttcaaaaatagggaattctttcgaccattacaccatgagtagaagccaccttcaattaatgtctttaaagcaacactcgtcaataatattgtaaaacattttcactaatacttcaattaacaagcctctcatttcttatttgattatcaacaatcttattaaaggcaacgccgcaaacccaatggccaccatatttctcttctagatgacaaaggagagtccatgagtgtttttattgttccaagtctacgttcaggtcctcattgaaccatgttgttcacacagtaatctggccaactcgctcgtatatttaaacgaaatgaaatttagaagtaactaagtaaaatagagaacacacgcaagaatttataatatccatgtgactacccaaaatttgattttctcaaaaaaattctccactgatctctcaaaagcttcaaagattctactatttcacttggtccacatatccctataataatgccaaaagtgtggacctccacaacttaactcttcttttgcccactgctagtttgcgtagcaaacatggaaaactcaatttaacttaaattctttgtataattaacacttgattttttgagtgtatgtgcattctagtaataaatgttcaattgtttcataactaaatctacaacaaaaaatcggtcaaaagagatgtccatgtatggtcttctcttttccaaaacctcatgcacacttgcttttcttaaagccaccaaccagcccaagacttttacttttacaggtacactacttttccaaagagttttggtccaatctaaatcacttgaacactaatttgaagtaaactagaggaaagaaaatttacaagagaatgattctccaaattttggcgtccaacctttacaatcaattgatatatgggcaaagttcacatgttcataacgctgcaacaaaccctttaggctcaaaacttccctgtccaaaaattttctcctgaaattagagtctcaattgatcaccctaaagctaccttcctctactattggcatatctttgatgcacatgctctttgatctagccaaaattgctaatttcgggtaggaattcaacaatgagttctctccaatccacacatttttcgaaaaccagattccctacctgaaatgacactaaacttaagtatttaccatatagccatgaaattcatttccaaggtccacggaggacattctctcacctaatttggtttcccaaaagttatctgatatttcataatgacttttgatcactttatggtaaagtgaatctttttcacaaggaaatctcaatagccatttattcaacagtcccttgttttgtgcatccagtctcccaatttctagtccctcttcccctttcggtttacacacttcctcccaagcaaccaggtgttcacctttcaaaagatcaccaccttcccaaaga

SEQ ID NO: 238988 - DNA, 4448 bp, Cannabis indica
cttctaaaatcaaacctggaagaagtttgtcatgattagccacgcaaagaaacaaagagagatgattgcaaacatcacagccttggggatagatcaagatgtacctgcagtccaacataaatgcttaggtcacaataacaagcatgacaatgtttctacttgacttaggtttgtgtttgttcatcgtgaaaaagatagcatacaacaaaactagtcaccaattatttgttgtccaaataaagatgagaatttttgcacttttaacattttatttttattttttgccagaattccattataacatcttacaattacttttttaatgcatgaaaaaaaaaaacaaaaaagtaatatgagtgaattcatctagaatcctaaataagtacaaatattgctctacgaaaatatacaaaaacttggaggaaagaaagacaaaaaaagaggcatcagatacgcttcaataagatacacttcaataagatatcaattacatgtaaaacatttcatacacgtgctacaagtgcctcctactttccatgaaatatcattacattgacttacatataagaggctaatatttacatgtaatatagattaaccacgaataatccatgacaagattacaaattatagccccataccatttatagccgccaacttcaaatgcattactacgaagctcccttttgttaatctgagaaaatttctctatcttccacgtattttttccatacaactcagacggcttaggccctataaaaaagtcaactaatgtgtaagtaattggccttctaatacagcaataaatataaaaaatagagacgtaaaagacgaagtcacaaaatcaccaatactaacatggtataaaaagcattgagaaaatatttaaaaacaaatactacacactgtgatgacatgatctatagttggttcaaatgattaatgagaaagcataagtgcgtgcaattaaaaatatatagaggttacatcgtcaaaatatttttaacttactatgttgaaaaactggatactcttactttaaaaagagcataaaacagaatggaagtaaaggtgcttctatagataaatcttcagataaaaagtatcaactgactgccgagaagaataaaaagctactaactaaagtagatctatgccttgaaagccatctgaaaatcagatttcaccacatgtaatgaggctatttaaaacctaaaactcagtagggttaatgggagtaaaggtgcttctatagataaatcttcagacaaaaagtatcaaccgactgcagagaagaataaaaagctactaactgaagtagatctatgccttgaaagccatctgaaaattagatttcaccatatgtaaatgaggctatttaaaacctaaaactcggtagggttagggtggaagttccatgtttactaatgaaggaaagtggagggattaattgtggattgtgagtactgtggttgtttggaacgaaagattttaggagaaatggaatgactttctaactacattatttttgacttatttacaatctcacctccatattagccattgtctcaagaataaataaacaaatccctccataattggacacactttatctccttcctttcataccgtacaaaacaaagaagaggtcttccctacttctccactttctttccctagcttatgcacctctatgtaagtcctatctaatcgccctgctaccaaacatagtctaaggacgcagattgcacatataaagtcttagccaataacttgaattgtcctttctttcgattcttagttcaaatattgaatataacttcacacacgaaatgcaatttgattctgaatgtaaccacgaaaatataataaagaatgatcttttaagacgaccaaaacattatgaaattattataataatcaaatcagctccattgtaaagcacaaaccaccaacagccaagtgactcaacatccaaaactaacttcaaaatttgcagttaaacagcatgccaataacaaggagtgaaggaatcaccgtccgtgcacatcttatattggacaaatcatcttctattttctcagcactaaccacaatgattaacacacctcaacagtccaaagtactactaaaaacgactatattagcatactgtcaaatatttagctgctccacacctcatttcttcacaaattttgatagccccaaaacaggcacttgatagaattaagaaacacacagctactgaatcccccaaaacaaaaccaaataatgcaaatatacaccaaaaaaaataaaatcataccaccatcatcatcatcatctgtatcccaataaggaggtgaagttgatggaatcccattctccacctgctcagaagaccgccattcagccaattctccagattggcaacgctgcccacttgaatttccgtcgatagagcttcccactccagactcctcaccagcagtccccgccatttcccactccaaaacttcttccctagctcttccactcagttcgccaacaaaaggaacttaacctagaaaataatataattagaccaagttgttaagtttcaatttacaacattacaaaaagaaaggtaacaaaacaaaatttgaacatttttctatttgagtgtacagtaacgagggctgatcatgtgttgggttggttgggttaagggtactttaatgggcctggccaattaaatcggtttggaaaattataacccattcattcatattatatttttatgtacaacacaacccaacccaacacactatgggaaatctgaatgtgatctcaagttcatacctaaacagaaaataaaaaatttaaacataggcagagtaattcaaagcacacattaaaaactaatcattacagtcatccaattaaagtcctaccagctaccaactagatagaaattacaaatttgcacgaaataaaatctagtatttacatagtcatcaattatgaatttcatatgtcttctcctcctttggtatttccttgtcctcaagtttattgcataaaattcaaaacagaaaatgtttcaaattattaaaaataaataagcataaaacaagaagattactataattacaaatataaattgacaataatcaaagaaattttttataagcaccaaaaggataaacaacaacagtcccagagaccaaagagacaccaataaactgaaaagactacaaagttagcataaatcacacacacacacaaaccaaagagtagataaaatacatttcatctaattgctcaatcaagcaaaaaaaaagtatatttatcatatatcattaatattagattaactaaaagaatatgatagagaactcaaaaccctacactattatgatttgaaagaaaaaaaattgtggaaagaataataccatttaatcagatcagtggtgatgaatagatcgttaacatcaaggagttcaacatcatcctactgaatcttccaaatcctaaaagatatattcaaaataaaaatatcagatctgcaaatgaatacatcaagacttctgtaaataaatcaataaacccatacagaaatgaaaattaccgttgattccgatattgattttccctgtaaacaatcataagaagaagaaaaaacacaacaacaacaacacgaacaaaaatcagaaaacaaaattaaaataaacaaataaaatggatatatgataagcagccgtatataacatggggtggggtggggtgggttgcggtgggaaggtaggtggggtggggtggggcgggcggcggagatgagttgacaatccacaaattttcttctacttccttttcttttatatgttttgataagaaaaaagatagctggtatcatttgaaatttacaaagacgagaatctgtctttctcttttagtaagagaccgttgtcttagactaagattgagaaaaagcctagacccttgctgagatttttccagaaattaaaagactagattgagaaagaacctttaccattctagcaaagaaaaattgaaaatgaaaagtagagattagagaagagagatagcttacctcgccgactttgcttgaatttttaccggccaagaaggcagtctggcctggtgcgtgcgtcgggggaagggatgaagtttgggggttagggtttgtaatatgagataagagagagaagggttattagatgagattcagtatataaaataggaaaatttacatgtagggacttttcattacatataattacaatatttattatttattttttttctgaaagaactgaattacaatatttattatgttataatatactcaaactatgatatttaataacttataaaacaagtatttaaattttaattaccatattattcaaaaataaaaataattaccatattatttacggatgcagtgcattcacatattatactaa

SEQ ID NO: 238989 - DNA, 7594 bp, Cannabis indica
tatcgcccaaactaatttagcagttgcagataatgtaaactgcttgatcttgaacagacagctgtacaattgctttttaaggttcaggttcaggatacgtgaagaagctttgatttgtaactttagtttcttgttaattgtgttatttcttcctttcctttcagtgtagatattacccattttcttgctgtcttataaagatttttcaccttgaaactattgtgttatattcctggaagtccattttgttagacagatctctttaaacaactactgtgccaaatgccaatgtagatattactcacttcttgctgtattatatagatttttcactttaaaactactgtattatatttctggaagtattttttgttagaaaaactaaagaatccacttctgtgccaatgatattgctctacaaataagttgacttgttatatatatctgcattcaccacataaatttttctatgcatgatttatttattaataatgtagctttatatgtattgtgaatgacgtaacttgttatgttacagtctgaaatgtacactttctattgttatgattcttctcaactcaaattttcatacaggttgaagctttagctgttaagttgacacaaaatgagggagaattaatccaggagaagttcgaagtgaaaaagctagcaaacttcctaaagcaggttgttagtggtgtcttaaatttgtgcacagacatttatttcacttttataagaatgttttttaattttttttcttcggtagcaactttggaatgccttaaataatcctaggcattttgatgtcctgtatcattgtttgatttgttttctgttatcaatcgacaggcctctgaagatgctaagaagttggttaaccaagaaaatcttttgcttgtgctgaaattgagagtgcacgggctgtagttcagagaattggagaggcactcgacgagcaagcaagagtttcacaagcttctaagaatcaggctcctgtaagatcctttttacaatcaatttttccaccttcatgtgctcacagacacaaatacgcacgtcttaacgtgtacatgtatgtctgtttgttaatttgacattccactttattttgcattgctgaatgtggtcaccatgtcatctttatgcctatattttttatttatttatttattttttgtcactagcacttccaaattttcttgcttttgttttaacatttttgcaactgaaacataaaataaaataatcctaaaccaatttttctcctttaattttatgaattattttcaagtttcatgaagaagcaatgtcaaaacaattcttacaataaatactgataaatgtataagattttaagcaacagttgcccaaactctcaatgctcttctatcacaatacatttagcctatgaagtaagagaggtggaatgaaccattgtacatacaaaatgtcacctaaatgctactgtgctttagattgttgtacttgatttagcgtagggaagagtgttttcagtccgacagtgataataacccacttctaaattttaggggccagaaacggttgtttcaagtgtgaagtcttataatggttttctgcaatttgaacatctgttcagtgtagagttttcataagaattatgttataaatatcattgatcaaatagtggggcagaatatcaaccatgtatacttaatctagttatttactacacgaattattcacagtatctgttttgatcatatatattttcaggatgttgaggatctagttgaggaggttcaggaagctagaagaattaaattgttgcaccagccaatcaaggtgcagtttggttttcttaactatattttttcccacggctttatgtgatgcactgtgagcgggtttaacctttatcaattgactgatttaaatattttatacagctgttcctacttcgatatttttgtaaatatatgtatgttgtgcatgggtataaaagaagattttggaaacataattgtggagattttgaaaacataattgacattttgaactttaggaaatttttaatgcttgcaggtgatggagatggaacacgaacttcgtgcactacgaactcaaattagggagaaatttatattttctgtcaagcttcaaaaagaggtatgtgttctctacagataactttttttatgactttcttaggtttatgttcagattggagtagccgttgccttaacttttttttttcaaactgttcattcactgattaatcaatgtggaattatgctattaccgaaacttaattataaatatttttatgccaaaacataaatgttttggtttatgccaaaatataataatatttatttccttcactttaaaaaacaatatttatgcctaaactagatctaggtagtaaatgttggttaggatgtcttcatttgcaaaaattgatagtatctcagttttaactgtttcaagcatattttatccaatatttcattttaaccttgtaaaagataaccaaatatttatttcttgtactttcacataatatgtttttagtatctttgggacaaggagttgttaattaaacattgtgaataagtttttggttttgagtctgtggcattgtcatttattcacccccctttttcatgcattcttaatgtctctaatgacattcattgaccttttaagtagtttaaactagttagtttgttacaacaaaatacatcgaagttatataagcttgattttgaagagttgccattattatcagctggcattaagcaagagggcagaggagaacaaaactcgtttatatggtctagatggtgggggaatcctgggctcctgtcttagaatccagatttgctcggatgatgctccacagctttcaaaatgttcaatccagtggtatcgtgtatctttagaatgcagcagagatgaaattatcttaggcaagcaaactttcaacatttactttctggtttgacttttaattatcatagctgtacaatctgttcttgactaatccaattctactattagaactacatagttgtctaacatgtttatctttgtacattctttcctatatttttattattatgaatctctattgaagtataatgttgtcttataaatgagaaaactaatttgctcaattttcttcactaggtgccaataaaccaatgtatgctcctgaacccttagatgttggaagaatcttacaagcagacatcatttcaaatgggcaaaaagtctcagtaatgactgctggtcctgtcgattctggtcagctctcaaattgttttcatctggtctaaattattagttttaagtccatacttgtagtttcaattcatgccaatatccacactgatactaagagagaagtggacagaaggtctaactttgttactttttacagctgtgggacttggaagttacatagagacacttacgaaaaagtcaaatactgaatttagtgtaagattctacgtcttattgcttgcagttatgtttactacttcaagatctttttttttcccataatgaagttgaaacttctgaatttgcttcctgcgtctattcaatcaactacagagacggcccgccttgattatgcttttgattctgaaccgttctccaatcactttaaaaagattgtctttctgattatccttcgtacatatttaattgaactctaaacaacaatatgctgtaactctgctggtccacacttggacactatatgtatacttagtgattattcatatgcattaatcaggaatcagcgggacacaaactaaagtgggatgttgaacttttggagaaagtgactgaacaatcattaataatcaaattaagtgtgttgacagacaaaattttactcatttaaagattttgatgtcctttcatcgattagaacactaccttctgctcccatgaaataatcttccaacctgattatgaaagcccaagattttctctggtttgtttacaacaagtgattgttaatttatcagctgttgcttggaggttgtgcggaagacggtaacatagagggttatagcgtaatctttgtgaaaaagagaaaaacaatgaatatgatctacaatgctagcataaaaacaattatgttcatttgtcgtagaaaattatatgcaggtattgacaaagtagagatggatgtttggccaaccctgggtgtatgcataaggattcaatttttgtctaacccgacatttgtttttgtaggttaccatttcccaaatgaatgggcaaaactattcatcgaattctgtacatgtatttcatgttggaaagatgagaatgaagctttcaagagggtggattacaaaggctagagaaatttattctgcaacaatgcaggtattagtcaaaaaataatttgactgggaaagatgaaactagtttatgatgtgcttggtcgcttagtgcattaggcattctgcattctgataccacatatagttcttaaagtgattcacacaaagttgaaccgaagaaagtgaattggcgaatatgcaaggaaattgtattattcttttttctttgaccctgttctctcaaagcgtttttttaagatatttcatcactagatagaaattattccctttcaagcctttacccattcagttaaagtgatatcattgtagcatggtgtaatgatattgtttccactgaatctcacatatttctttattctggtatttagttatgcggctacagaggtgaaagtaatactgcagcaagaacattgttttggcaagcgagaaaggggctctcattcatgttaacatttgaatcggaacgggataggaatgcagctattacgcttgccagaaaatatgcttttgactgcaatgtaagtaacttcttgtttttattcaactagagactttggtcattacatagttggttctaaacggttcccatttggagagtcatggatttttccatttttaagtaatcatctgatctgcctaactactctgatgtttgtcacacttagaaacatgataaccttcttttataatttcattttatgaaagggaagaaataagatgattcaatatttaaggcttttatatctttagtgaaatgattttacatagtctatatatcttcatcttcttaggcatcttaatcaatattttcaatgacaggtcatgcttgctggtccagatgatcaagtatagaagcaaatctaactgacagttttttcaaatgtgtgtaaactcaggttttgttacagtgtgattattaatatgtatgcatgtgtgtctgcattgataaagaaaaagattaatagcgtggtatgctatattgattgggtgtttttccactaatcatggttgtgttttaggcattttttttgttttgcctaatcatccgttgtaatgaatatttataattaatttgttctttgtggctgattgcaattctctcgctctctaattattattattatcttgacgtgaattgttgtgcactcaagcacaaaacaagtacacaatgcaagaagaaatatgcttagaacattaaaccagaaaatcataaaaccagaaaatgtaaaatgacagcaagaattaacgaggttcagtcacaagttttggataaaacttggacctaatccccaggtagaaacagctctattggctgtattaactttattgataaatgacaaagattacaacttacaacaattgaaaatcaagaacacaaagtacactaatggtgcttcagttcacaccagtaactgaattgagctcacaaaaggctgtcaaaattcgaaaaataaacagtcttgtaacacctcaaatcaatcttgaagagaattcatctcactttagctctcattcttctttgtgtattacccttaccccaacttgatctcattctgttgtttgttgaatgtctatttatagtagtaggttagttaggacacaactaatcgaaataactgccaactgtcaaggcagttaaattggttgtttaagtgttctaaacttcacatgaattctataatttcagttggggtcatcttttctttccatttagaccatcactattcactaatgcaaaatctaaatatattgtcaaatttgacgaaaaataatcaaatgtttaggtaacaaatgtactaaagtagcatttatctaattaataaattttattatgggttacaacttaagtgaggtttcctaaatgtaagagagaatacaattttattttgttaaatctcagtaaagaataatgtaggacacgtcattaagtcctagttatgttatagccttgtaattacagtccaagcctaccgactataaataggtttttggctcattcttttagaacttagttagtgtttggttggggcaatgaaaatataaaaatgagaataagaataaaataaaatttaaaatacgtataaaaatttaataaaaaaattattaaattttttctcattatacatgaaaattatttttttccattacattctaattcgttacctccaaccaaactccactttaatgtgtaatgttctaacattcaatttaaagattctactttgacttaaagagtttactgtgttgttgtgtctgagggtgtgcgagtgatctgagattggtatgtgtgttcttgctgtgagttgagagtgatcgagcttgaagaataataagtggtattagagcctcgtggtgtttgaagggaaggatctcaaaaatacacataaataaagttgcaatttttgttaagaagatacacattaatagaaaaaataactgaaatatatatatatctttatatattaaaagtgtctatctaacgtcaattcttggtttaacagaatatactttaaaagtaaaagaatattatgttaactttaacggagaaccaaaatacattttgcgattcctctttcttctttaacaaaaccctattgcgattctttacaggacaacgattagctatctccatttagtctttctctcaatagtcaaccagtctcgaccgactaactccttcgttctctcactccttcgtcttctcaccatcgccgcaagcatggttcggttaactgctggtacatcatcacctcaaccagagaacatcatcacctcaatcggagaacagaatgcggcctcttattcagacgaattcttacaaggtaatcatggggttttggttttgaacaacttttatgtcataattattatatgggttttggttttgcttcattatttatatatttgggagtggagtatttgaaaattgaaattggattcttggcccttatccaaacatgaatatgtccaaagacagcactggatttcaagttgaagccatgatcaaccacaagcatcctcaacttgtcgacgacaattccgatctcatgccttcagccacttcgatcgcaggttaagactttattttttgacttttcctcctttccaattatgctatgtttagctcttgatatttttccaaatcaaaaacctaccctgtatattgtgaatttggttgtttctatctcaattttaggaacaattagttttgattgctctaacta

SEQ ID NO: 238990 - DNA, 1656 bp, Cannabis indica
ttgttgttgttgttgttgtgtgttgataatgacattttttttattctttttttgtgaatgggggttgtgtttgtgatatattggccttgcattgtaactttctattaaatcaaaattatagatgatattttgttcatttgatgatcattttgttcatttgagcaaaaaaagcattttttttttgcagatatatatttgcttagaatgcaatcaaattttctcatttgaatgagacagtagccaactttagagcaatgcacttaaattatgtaccaaaacattgcaatacattggtgtttgctagactcgacaaattactttttactcaagttaaccaattagaagaaaacaaaaatatattaaagattggtcgacaccggtgttaataatggtcactatttcttgtctcatctttataaaatattattttatgatcttatgtgactccacttactcacgagcattctgttaaaatttgcctagtaatacatttgtaaaaaatgaatttaatcaaacataacatttatctaactacatactatattttaaatgtgtttggttagaataaactttcaagatgttagtgtgtgtactaatttggtatataaattacatatatcattactcacagccatgaactaatatgtaataataactcaaataacattgacttgactactaatttttgtttcttgggacacctttcaaaacagtatctttaagatctcatgtattgatttagtacttgaatcttaatttgatacttttcagatagcatataaagagggatttttagaggtataattgtaaatgccagatcttgaggaataaaagttttggtctggaatcttgtcataattgtaaattacattaatcatctccaataaaaataataaataaataattaaatcatataattatttatttataaattttgaaggacatatttactttttttttattttttaattaataaatataaaattaatataagtaagttaaagaaaggggaaaatattccttatgaaaatgagaggagaatatttcctttaatttgggtggagaaaataaaggatcaaatgatcaagaataatgaatgaaaaagaatctttattgctaaattagctttgattacaatcaatgggagagagagagagaaaaccaacatgatgaatcaattaagagacaattacagaaaatcctcacatgagggaagccatttcatgaatggacactccctttaacatccctctataaacaatctcacaatctttggttttcagtttctcaagctctctctcatcaataacaaaatcatagaaccaagtcctctctaaacaagtgagcaagttaacctatttatagttgttggctgtgactgtttagaggctaatcgaattagttggttaggacagttggtgatgatgtggcaaactaattgttcatatgtctcttaattataacaaaaaattaatgagatagatctgatttgggggagttttcatacacgacgatttaggaacctattaaactatattaaactatctgggattctttacgacggtccaaaatcgtcggtaatacccaatatagctgacggttttaaacagtcacatatttttaatagcgacaatttttcaaaaattgcaactttta

SEQ ID NO: 238991 - DNA, 6755 bp, Cannabis indica
attattttaaaaatacatatatttgttttagtaattttttaaaatactacttttttttttgaaaaggatccaatattttctttcttttgagttgaccaaacataggtttttgacttcatttgaaggaagtctttattgattcaagtttggtttaaagacttctttcattgaattgaatttggatgagtcatttaaacgtggaatcttttgtataataaagtaagattatacctaattaattggttgttaacaactcttatcatgtttatatgtaattataatacattatgttaaatattttccaatcatcaaaactaattaatattagatagagattaatgtatatgaaataaatattactacaccttaatataaataaatgtatatgaaattaaattttaaattagaaaaatttataccaataccaatactaatattatagtagagaaattaaaattgagaaattagaatgagacacaaaatgatgaattagagaatttggcgaagttttcttcaccctagagtagaaaattaagaattggattggatttggtccgatcgtaatcccattttgattagctttcaattatgagctactcttcccattgtcaattaattttaagatggaactcatacaccttactatatattcatctattcttagttaatcaactatacactttcgtatgctaacaattaataatacctatgcctttactataaattaatgatttattttcttttttctttttctaaaaatctgaaaaatgttttttttcctaaaaatattgcactaatttaattattctccaagccttaaaccatgattaaagtcttctttaattggtaagcaaatttagcttgataaagaactcttgaaaacttttctagctccaaatgaatcatagagttggggaaagaagaggtatgattaatcatttgcttaaacaaaattagttactaatacaattagaaacattattacattatatataaaacccaattatactccaactacaacaccaatctccagaatagtattatcgagataatattatttctcgattacttcaacaatactataaattactccacaatagaacgagaccaaaaaaaaaaaacccaaaaaaacctattttgcaattgcagtcataatacttaaatttttttccttgatgacattaatatcttctggcagagtttgataacagtcaaatacttacagaagttctaaaagtctaacaaaagatattaatgtcatacaaaaaaaaacttaatatttgattgttactgaaaaataaacttaggctaaattttcaagctttgtgttcggcgcgaattgacatctaagagttgcttgacaacatctctcattgaaggtctcttgttaggatcatattcagtgcatctcaaagccaccataagaacttcaatcacttgttctttaatacccaaatcattatcaaaaacttccttctcaaggcttggatcaattatctcattcaccatttcttttccacctttgctccataactctctaacccaacctacaatgtcggtttcttctcgaaaacatggatccaatgcctgttttcgggttaaaatctcgagcaaaactaccccataactgtatacatctgattccatgctcttgctccttgtgtatgcattttctgtcatgatcaaaataagcaaaatgagttagtgtaagaaacaagttaaaaacatgaactttgagaccgaaatcaaaaagaaaaagaataaaccggtgttttcaccttaaactattacgatgctaaatattttttccccgaatttatgtaaaataattagtaattttacactcgaattatgacactatcatatttagcgcaccaaatggtgtctttttattaaatcagaaaagggaaaaattactaattatttaatagaagtgtaacgaaatctaacaaaaatctcatatttcaacaacatagaatatttaacattactaacaattcgagggacacactcttattagtaaaaggagtcgattaaagtaaaaaacatgaactttgagacaaacaaagatagaaaaataaataagaattttgccccttgaactttgacccaaaaaaatcacaccctctaaactaagattgttagtgaaatatagaactttcattaaataattagtaattttactcccgagctatgccaactaccatttgttgccatccaactttttactactgccaaatcgcgcttttttactaaagcaaataaatttggcagcaataaatagtttagtaatattttagagagtaaaattgctaattatttaacattcaaagttgataatgaatattgaacactcataaaacaaaatacatatttattcaagaaaagaaattaggatttatacctggtgcaatgtagccaatggtaccagcaattgaaatggaagctgttgctaagtttgaaggcttatccaaaagcttggcaataccaaaatcagcaatatgtggctccatatcagcatccaaaagtatgttgctcggtttgatatcgcgatgaacaatgacaggatcacagtcgaaatgaagataagccaatccatgtgcagttccaaccgctatgttataacgaacgctccagtttagagcgaccggtggcttgttttcgtgtaaaacatcataaaggctaccattttccatgtaccgatagagtatcaagccatagtcttttcttaaccagaaatcttcgattttaacaagatttcggtgtctgattttccctagtgtttcggtttctctaaccataccaacacttccttctttgtaaccaacattgagaagcttctttgcagcgaaaacttcatctgaactcattgaagctttgtaaacagttccatgtgctcctctgcctattatgtacttgtcacttagattttctgtggcttccattactcgggttagtaatgaagatggtcctggtgaagagatccttgttgtttgctgcttcgatcgccttttgcataagaaaaacaagcaagacaatcccaacataacaaaaccaacaaccgagccaagcgaaatcattgctatttctacaatgcttaagctatttcttttgcttgattgagactcacaaagctgtaaaatgttgtttcggttgcaggttgagatgtttgattcgagacaacgagcacaaagacctgaattgcctgcaaatgaagttggagaggattgcagcagcttcatcaaattttgtgggacttcaccggtgaaatcgttgtatgagatatcgagtttgagaaatgaaaccatgttttgaagagctgttaaactccctgtcaagttgttatgagatatatcgaaattttcaagcctcatttttccaatttctgatggaagttctcctgtcaaaccgttattgctgaggttcaacgagtagaatggattttcgaatgctccaagaacagaaggaatctctcccccgagacgatttccaccgagttctagtactgaaagctttttaaattcagacaagaactttggaataccgccagtgaaacgattttcacttaatgtcaaagtgaatagccctgtccagctcttaaaactcgatggaatgaaaccgttcaacgaattgaatccaacatcgaacacactcaactgagtacaagccgaaagctgagatggcaaagaccccaccaaattgttgtgtgaaagactcaagctttgaaggagtgtcaactttccaagctctattggaatgaacccacttaacatgttcatcgaaagattaatggaactgatgttgtgacagtttcccaagcttgctggaatagctcctgataatctgttcattctgatatccaagaacaaaagctttgaattcattgcaaactcgggaagaaccccagtgaagttattcttcccgagaatcagtctctcgagactcgaacaacttcccacttgagacggtatgctaccatgaaatcgattaccacccatattcaacaccctcaatttcttcccatagcaaagatttgagggcatttcaccactgaaatcattattagtaacatctaataacactaagctgctgttaatccccaactctctaggaatggttcccgagaatttgttgtcgaataatgtcaagttttggagttgcttcagatgagtaatctccaaaggcaactccccagaaagactgttattataaacaaggacatgttgaagtgtaggaatcttccatacactaagtgggatttcgccggttaatctattgtcaaacaaaccgagatactgcaaccctgttagcaaccctaactcgtcgggaatttcaccctcgagttggtttgtgtacaattctaacagtgtcaacactctaaggttcccaagctcgggtggtatattccccgaaaaatggttttcggaaagcaagagattattaagcttatgaagtttccctaatgaagaaggaatagttcccactatattactatgagtagcagcaatgacatttaactcagtacaatttcccaaacttgaaggaagatttccattaaaactattccatgaaatgtctaaaaaagacaaactcttacaattacccaaactagaaggaattctacccacaagaccattcatcccaacatgtaaatattcaagtctttttaggtttcccaaactatctggtaaaaccccaaataactgattatcatttaaagtaagctcctttaacattaaacagttcccaattgaagatgggattgaaccagataacttgttactatgcaaataaagcttaacaagattagtcaaattcccaacatttgaaggaatcgaaccattcaaattattatgcattaaatacacttcttccaaacttggtatctcaaacaatgattcaggtatttcaccaaacagagaattatcaaaaaagctaagataccttaaatttctcagcttgtttaggtttttgggtatttcaccagtgagtaagttggactcaagagttagggtttcaagaaaaggaatgttacccaattcttgggggattgaaccagagaagctatttaagttaaaatcaatagtttgtaaatggctcaagttcccaatttgaggtccaattttgccagaaatgccaaaattagagaaatttaaggatttaacataagttcttgtattatcacattgaacaccaacccatgaacaaggagtggaatgagaatcattccatgttgaatttaatgaagaaggaacataatcccattccttcatgagtgaaagtaaagtgaccccatcagagtttagtgagcaaaaaacattgtgagttgaaaaagaaaaggttaagaacaacaatagcaagaaactcaaaaccccaaactccatacctaaaaaacttgtttttaatggcttcaaagttcaaagttacaagcttttgaggtttaatgggaaaaaagacacttacccttttgaaaagatgggaagaaagatctagaaagccattgaaattgcttgaaaacccaactcacaaagataaaaaagtagtctttttgtttctgtatttgagtaagaaatctgcagaggtggttgggttgatggtgggcttgaattagtagtaaatgccaaacttgattttatactatgcttaataattatgtcacaacactgatgagtgtgatgactgtggatttcattatatatatattgaaagaatcaatcacatgcctgaatgtttgaagtttttttagaatagtatagtttatttattttgactatgtattgaagttggtcttgaatgttgattaagcatttaaacgtgtgatatgtttagtattatattagataataataataaattccattatctttcttaaaagcattattcttaacaagagagttgagtttgagttgagttagattggaattaagaaagaaaaaggttgctgtcattcttaaaagtgttcacataggcttaacaatattgtcagtgccaaccaacactgcagtacacagcactattcattatttattattattagaataattggcgccgaaatattcttatttttttagtggtatttttttttataaatttgagacgtcagttaaatattttaattaaatttaaatactaattacatgattattgtgtacatatgtatatacgtaaaagtaaaattttataatcaatacagtaataatttcgttaatatttaacgatgatatctagcagacatctcaaatttacaaaaagaaataaatacaagggatttttctacaaaaaaaaaatgaattaagtctataaaataaaaacataaagaaatttcgcaacaaataactcttattattattgttgactattgagcattactatcaagccccatctaaatagatagcgatcttttatactttttagagtaaatagtgacataagtacgtaaagttaaatttgtaaaaggcataaacttaataaatttttttaacagcataagtacctaatatttgtaaaattgtaatttttctctaatttagtccgtatatactctgatattgtcttaaataggacacatataagacttaaattctatatcattggatttgaacaaaaacatgtagtattagttacttttaaatttcattctaataaattcaaaacagaatctatactcacaaaatttgagaaaaattatagttttacaaacattgagtacttatgtcattaaaaaaatcattgagtttatatcagttacaaactca

SEQ ID NO: 238992 - DNA, 1908 bp, Cannabis indica
tatataacttttataaaaaaaaatatataaatcggtttaattcggtttattcgggttaattgggcggtttagaataatttgtaaaccacccaatatattcattgggcggtttgcatttttattgtattatttcgggttgtattttttatcggtttattcggtttggtttgggcggtttattcgggttgggcggtttgtaaattttattgaacaccctatccgacaatatgagaaattaagtctattttattatgactaacatacatcatttgttgtgtgcagttttactgagccacaaccaagttactcagcatacagagaagcaagctttgggcatgccattcttgacataaaaaatagaacacatgcttactatacatggcatcgaaaccaagatagtgaggcagttgctgctgattctctatggatatataacagacactattttccagtggaggagaacacaacttctactatggtttaggtttattgtttaggtcttgtctttctttttaagataactattctttagattttaagataatcttagatggtcatattaagtagtactatttttctttatcctatttttttatttaattcttattataattattaatttgtaccctcagaaagtattaaatgtcatcaaaattcattggctcaacccgtgttaattaatattgcaacatcaagatcatcattattattgattggtctcttttcttaaatttcatccgcatcttaaacaagctcaactataaagcaaccaaattaggcccaacttagtgagtaacgttagtgtataagagcatcaacattctttaagaatgtaaacactttatacattatttatacattatttaaaaatataatataatatgaaactatgcaaagacaatgattggacaaatttcaagtatgaacacatcccaatcttttgttttgtatgtggtttaattggccacgcagaatgactttgtccctgaaggtttgatgaagatttcgatccattagtcaagccttatggaaacggtatgcgtgctcaaacaaggagaaagaactacttgataggagctcaatggcttcagaccggttctgaacagcaagaaatggtcgacggcaatggtgatgaacggcaatctggtgtgaacatggctgatccgactggggcaaaaatcatggagattgattctatcaatcagggaggagagattacgaccatgattgcaggaaaaaataagggtgttattgttggtagtaatggccataaagaagacgattctgaaggagaaaaaggtggcaagaatgatgggaatgtggctgattgtgatgatgagctgttaattttattagacatcaaaaggagacgtagggacatggtacaaggctcacgtgactcagagatagttgagagtaagttgggccaagataatgtgggcagaagtggatcaaaaaacgatttgaaggtgggccttgcctctcaggcccaccagacatcatgagtattctttcttggaattgccatgggcttgggaacccatggacccaacaattcataaaagatcttgtgatccaaaagaaacccaattacttgtttttatgtgagactttgtcaaagaaggaagctgttgaaaagctgcgtgtggctattggttttgatggtgcaatttcagttgatgctagaggtaaaagtgggggagttgctttactttggcgagttgaggaggaagttacagttatggaatttggtggagattacattgacgtgcgcattaccgatagtgatgttggagatcggcggttgacgggcttgtatggtgaaccaaatcgaagcttgcgcaagaggacatgggagttgttaaagacgcttcgggataagtcaaggcttccttggtgtgttattgg

SEQ ID NO: 238993 - DNA, 3499 bp, Cannabis indica
attggatcaaaaaataaaatctgcacttaatgtagatcgaatgcgagcaaaatagtgcggatttaatttgatgaccaatctattgcacaccttatgtatgtcatactcatatacttcattatggacatttttttttaaataaaaaaccaactaacatgctagaatgccgcaaatgtgaacatttagtacgttgatgagtcctatatatataacaatttgttgaattgattgtttcttaataattatgtgaaataaaaatgaagttggttgtggagatcttgactggaactctattctacattgaagtggggagcgatgacactgttagcgacctaaagcgccaaatcgctgcccaagagaatctcccttatgaccgtctgatcttgactctcctttccaatgatggcaatcacaaccgtccgatcaacgacgaatatgtcgaagcagcaggtagcagggtcacccttgctgatcatggaatccatgatggctcccatatctatctcattgttgctcctcccgatgaaaaccccttttcttttcactaataacatagattatttaatattcaactgttcttatatttgtttatgtgtttggcaatgtatagttctttaacttccgaatcaagtgacaagtgagtttaatctcttaattaatgatacatatatctttttgatgtatcaatatgattggagtttgaatgaaaaatgttgtaattccatattataagaatgtaataattatatatagggaaatgttatttatgattcattccctctttatatgaaattaattattgtttataggatgaaacataaataattttacataatattctcaattaatagctatttggtagttattattgtcaaatttaatacttttgatgttataaacaatagcaataatcattgtttatttcacttggaaaagaacatttccactattgcagtaataatattaattataagagtgaactttaaaattaaaactaaataatatcatagtgtgattgactaattgagatcagtgcatataacaatcttcttctacaattgcctatgtctaacattcactatagctgtaataacaattagaatgaagattcaccacgactgacagttcccttaaatacatataagaagtcaccatcttcaactccatgccaccttaagctagaacaatcacgcatgatcctttgtttgtgtatgaacaggtaatcatccaaaggaagaattttcccactcaaaagcagttccctcaagtcattaacagtacttgagtcactcaacttcaaaggaatacatgcaccattaagcaaactagatgaagtttgtactactatgctcaattttcttgacggtagctcaccaccaccaccatctcctaagcgattcgcagccttgtgcgtcacaataatctcagaaaactcgcatactccatactcgcttagatttcgataatcgtcatctaactctgttcctgaaaagaaaagtgacattcttttcataggtgttccatcaatgatgtggattttctctttgagactatgaaccatttctgttctttccacttccatgtgatgatgttgtttagatgaaagctttacaagtatttgaattttattgggttggcctagaataagatgatgattttggtgaatgccttgtatggtgagatcaattcttgttccttcactgatcattggataatctttcatgtacagttcatcaaataactcccatccaaatatggaaagagtttgtgaactcatcgcaatgcccaagtgttgttctatcttcctcttgatttcaataatttgctcttcgtgttccacttcaatctcaacttcatgttgcaatatacaaataacaactttcatgactgtatttaatttgtttcttttatgccacagctgaatctataaagagcactatatataatagcgacaataataaaatatttttcaatggctagttattatgagatattggattttttttcctattcgtcttgttatgattagaaataagaatcatgtcaaataagtggctaatgacattgttatgcttcattctgagtttcaaagcatgtaagaatcatgcacaattctgtaacttctgttcacatgcagcaaataccaaaacaacaaaattcagttatgagtactatgtaccattgaaactttttggcatcaaaacataataatatccgtgcttcaactttttgactttatctctatgtaccgacttgatatatagcaaaataagtgcccttaaactttttggttttgtccctttcctaatactacacaatatgaaaggtcaattctctaaccttttgggatttgtttttgtaatgaattttgactcttaaataacagaattgttcaaatcaaatataactagaaaacagaaattgactgtcatacattatttaacaaggaaaaaactataagcatatatttttattgggaaattttagtttctaggtgttgtgaaacataattgggcaagaacaaaatcaaacaagaaagacaaagagacaagttataaactcgttatgaaaaacaatgatagaaatcaaacttggacagagtaaacaaaactaataagagcacaaacaaacttaaggaggttcgaacaaggatgaattacttcatctagcctacttccgaccaaaacagccacaacaggctttgagtttctttattgagctgaagcaatagagatagaactaagtacaatcaatatacaatggttgtacagtcactcgagaattcgtgcttctaattacaaatccctcatgtgtggctatgatgattagacacacatcatgccattagaaccctcataatctcttgtatgttatggttacaagttttgttgttcggaattggaagctgtgaatccagagagaagatactagaagcttagtgtggatttgaaaaatcctgtgcggaaggttttgtagaattcagaaggtacttccagataagcttgtaccatgcatggaatggttctcccggatagctttttattaatctggaggtacacttctggacaacatactgtcagtcttgaaggttcatccgggaatgaagtcttgtacatatccaaaaggcttgtgtgcttatagagcttctaaattgttcgtactaaaagtgtgtatttcaagatgatgtggatttttgttgctggtgatgagctggatcatttaagacgatgtaaatgtgtcaggatgattttggagatatttttggcaacaataaaaatctatttatagttgtaaatctttataacctatggagaatcaaactagatttgcttgagtgaaactcgtgattgtgtaaggttgagagagatattctgaactagagagagaaacttcttcttgtaatctctgagaagtttgtgaagattcttgtaaccttgtaaacactgatatgaatatagatatggctgatgttgttgcaatcgagatgtagagcattgca

SEQ ID NO: 238994 - DNA, 3023 bp, Cannabis indica
aaatccttaggcccataaactaaatgcttttcaatcggcccaatgatatttaaatctggcccacacgaaggcggcccaccatccagagacaagtcaacggcattattactagaattcaaattttttaatttcccaccctccacgcttaatctccccaaagaagcaataccctcagaagcttttccttgcaacagaccccccttgtcacctccattgcccaaaacagtaaagctattctcatagcctgcatctgattgcttaggatgccactccaaacgctagacttccccaggcttagcagctgcacgatgggtcaccatcacagggcgcctcggtcgatgaactatcccagagaaacccttcgaaccacctgcaaccggagtcggggacgccaacaacggacggtgcgcaccaccattcttcaccacggccaaggaggaaaaattactagaaccaccatagaccggtccagagaacacatcgtggtaggtggaggacgttgaaagccacggaccatacatcgagaacggaataccatcacacttcgccaccgtcaccggcgacgacaacgaacagccacgtcgttgatgacccaagcggccacagttataacagaaaataccaatcttttcaaactttacttgcagccattgtttcactcccgagtttaaatcgaagaaacaccctgaaaacaggggtctatgaatgtcaatatccacctgcaccttgaagaaagttgtccaggaagctggctttccctcctccagatcaagctttatcacgttaccaaccagcccccctagtagatatccattggcacttgagtaaaactcatggggcagatggtgaacttgcacccaaactcttagagagttaaaaacaatcggcccgtcgacactcggagtccaatcttgcagagccaatgtataaccacgaacacaccaaggaccgttagcaatggcccagttcctgtcgttagcgttatcaaagccaaacttgaaaacattagaggtcttcacatcatccaccatagccacaatactaaccggctttttccaggtcttagccacaaattccacaacagtaggtacatccacattcatgggagcaatcactttcccgtacaaagaagatgaagctaaagccttaactgaagaagggcacggtgaaagcttgacagaagtttccatgcacgtaaagttctttcctttaaggggaggctttgaagtaatgattggctccataaatgcacacaagcagagaaataaatggaccccaagaacacacacacctacccaaatctcaccaactacaaaaactgttaatgaccgaaactttacactagaaaaaggtcactccaacccaccccagtcaacctaaggcaaacaaacacaaagggccagaaaaggataataaacaaaacacaaatacagactaaccaagcacaaacacaccagagagagaatgaagaaacaggagacttagtgaggaccttgttacaaacacagaaggacggaacaggagactaagggaagatacgaaagaaggaaacacacacccaagagagaaagtaaatgaccatccctcttgtctgaaatattctttaaccttatactctcacactggtccctgacatatgtcatgttcctctctctctctatcccattttgccacattctataatggtacaagtaatatttcttaagaaagaaaatctgaatatagagaaatagataaagcaaaattaagaaacaagtagatgaaatataacattattattttcttaatatagaaaaaaacataaacatattaatacaaaagaaacgaccttaacaaaaaaaaaacaacataaatgaaataagctaaaaaaaaaaagaaaagtataatagtaccaatattgaatttaagaaaccaatgtaaaattactatttttgatcgtattttgtaaaaactattaattgaattatctattttgttaaatgacaaatataaatgctatatcttctaaattgatacaaaatagtaccttgagctgatttcttaataaatttttataataattcgatatgaaggtgctacgacaagattagttatattttctacatctgttcatgccaaactttgtcctaaagttggttatattaaaaagagtgtctacacatttggtaccctgtattttatctaaatacaagtttggtaccatgtatttttaataatgcttatttgggaccttgtattttacaatcatacgtatttggtaccctaaattcaaatttttttgataaaatttaatcaatacaatcaatttactaaaattttatgaattctgaattcaaatttttttatttgataacatataattgagaactgtttggttaaattaataaaactgtattgattaatttatttaaggtactaatatgtatgtttaaaaatatgaggtaccaattaagtattattgaaaacataaggtaccaatatgtttccataaaaacacaagatcctaaatgagtatatttccctattaaaaaaaaattaaagctcaagatactattttataacatttttagagaatagagagtttaatttattttttcagtaaatgagtaagaatgttattgcagaacttcaaacactacaaacaaaccattcttactctaccttttacttgttttctcattcttctaatgagaaaacctcaaagaaatctttactttaattctatttataattgaataaattgtataaaccttttgattctataagccgttcatttttagattctgaaattctaatttatcatttaataataaaataaaagggaattactctacatactatttttttaattttttttttctaaatttacggtttaagtttgctaaagtggtttctccggtagtttttatgtgagttgttatacgattttttgttgcgatttaggttgcagggctagttacaataggagtttatgtagaatttcgtaaaaatacaaaaaaaaaaaaaaaaactaagtttagaaa

SEQ ID NO: 238995 - DNA, 3629 bp, Cannabis indica
ttttagaataaaaagcctaaacgcattcaatttcaagcaactcttaaaatgtctttggaaaacacaaccaaccaatgctaaatatcttatctattcattactagaaggatgatttttcataaaagatatgggtggatttaaaattatcaattgatctaacaaatactcaaaatcagcacaattaacacaaacaaataagtgaaaaagaaatcattcttaaaaagaaggataggttcatagcatcaagaaggataagattcaaaataacaaccaatgtttcaaagtttaggcataaaatagtaatgaggcttcttgacattttttggattgagagcttgctcatagtcccttgcagtatacacatatacttagaacctactttcctcagcatttgtgccaagtttgtgcctctaaatattattacctaaaggggaaaaggaaagggggtaagctaatccccagtaggtattaataaagtagcaagctacaatccaacattacatattaagagaattcaagaacatttgttcttgattacagagagataaatataaagtagaaaaatgaagaggaataaaattgaatgaaataaactcctcaatcaacaatgagcaagctaagcttatttatacgcagaaagatacaagcgagaatagaagcttaatgagttgttacaaaattgaaactgtcacaagttagttaaatagctaactactattctaactaaattctgtttgactcaagtcctcatttccaatagcccccctcaagtgacacgtgtgaatacaagtgtcaacttgtgtctgaaataagtaaaagcagaaaatggtaacagtttggtgaagatagctgccacttgataagttgattccacataacgcacatccaattgttaagctaatacgtgatcatgaacaaaaggaaggcctatttccatacgctttgtacgagcatggaaaactggattggaggctaaggaaccaactcctagattgtcacaccaaagaataagacaacttggaaattttatgtacaatttagtgagtaaggattggatctatatcaactcagaagtagctaaggcaagagcacgatatttagattctgtgctagattgagcaacgacattttgcttttttgagccccaactgactaggttgccaccaagaaaaatattgtagcttgaagtggacttgcggtcattaaaagttctagccaatctgagtctgtgtgcccctgcagatcaacacgagttgctggagtgaaagtgagcctgagatgcattgtcccacccaagtattgaaggacccttttacaagcaccccaatgatcggaggtaggatatttcatgaactgactaagtctgtttacagcaaaggaaatagcaagtctactataacaaagatattgtagagtatcgataacacttctgtagtcagttgggttagcccaaggtgtttcggattgagaggacaattttgagttgaaacacatgattgaggctttcagtccagcatgttggttccaataagcaagtcttttgtgtacgtctgttgattcaaatatatagttgattgttctctcaaaacttcaaatcctaggaagtaagtgaccagacgaagattcttgagagcaaactgttggtgcaatttgttaatggtgtggctaacttcagttggatttgcaccaataataagtatgtcattaacatacacaagaaggagaagcattttaccatttttgttggtgaaaactaatttgtatctgacttggagttggtaaactcccactgcagtaaggaagttttgagcttgtcaaaccaggccctaagtgcttgcttgagtccatataatgcgttgtttagtttacacttataatgtggaaagtttggatccacaaacccatggggttgttgcatgtagactatttctttgagttcaccatttaaaagaggcattgtcgatgtctacttgttgtgtttcccaattataagaggttgcaagtgtaacttgattctatacacccatttgttagtgactatttgcatatcaagtgatggtggaaccaagtcctatgttttgtttttcacaagagcaataacctcaacattcatagccttgttttacacaggattgtcaaaagctgctttaagagatgtttgttcagcatggaaaacagtggtggcaaggtaagacttgggtttgtaaatcccaagctttgatcgagtgaccatagggtggatgttttctgtgatttgagtggttgtaatgtgtgaatccgtgcttgagctttgagaagttgtgtcattatttggagttgaattactatttgagcttggagaaattgtactaggaggagtaaagttttggctaaatgactcagagggggatgaagtggagagagaatgggtggggaaggaggtggtaagggtgttggagtgtgagtgagaagaacaattggaataacataatttctagcaacaactaatataatagtagaactataggaagctggagagttagctggaaacaaacatttatatgagaattcaaactcattgaatataacactgcaagccacataaaccctgccactaggatgcaagcacctatagcctttggaattcaagcagtagccaaaaaaacaagcattttgtggacttaaatgatactctgtgattttcataaagtcttagtaaaaggaaacaggtgaaactaaacactttaagtatgttataattaggggcttggtgaaacaaattttcaaaaagagagacaaatttagtaagggagatggaagtctattaattaaataagttgtagatgtgaaagattgccaccagaatgtgaaaggcattttagccttggcaagaaaagtgagactattatcaacaacatgcatgtgttttctttcaacatgaccttgttgttgatgagtgtgaggaaaagagtttcttctaacaatgccaagatgttgaaacattttgtaaaggggttcaaattttttaccaaaatcactttgaacaacttttattttaagataaaattgtctctcaacataggaattaatataaattaagagatcagatgctttagattttgttttcgtatgaaataaccacacaaagcatgtaaaatcatctacaaagctcaagtaacatcagtaaatattagtgggagtataaattgaagggccccatacatcaccaatgattaattaaggtgtagaaattttatttataaaacttttgaaactaaagtggtgtaactttccaatttgacaggcatcacagagaccatgtttactacaatttgtattaggagaaatactaaacaaaaatttagctaagatggcatgataggggtgtcatatagaggtgaacttggacttgtcatagattgcattgctggtaatagtgaaattataggtagtaggattggaattctttgagagattcttggagagattagaagactttgagtaaggggcttgaagtttgtatagtctgtcacaaacattatcccaaagaagtacttgtttggttctcttgtcctttataagatgttagaatattagctgtatattaggtgtaaaagaattagggtaacttgtatttagtagtttcctat

SEQ ID NO: 238996 - DNA, 7615 bp, Cannabis indica
gtaaaataatttccaacaatctagtccctatatcctgaacatgcaatatgattcaagaaaatgaaaaggagaaaatttacttggtgatgaattaggcgatgattctggacccaagtagaaatgtggcttggaagagcacacactaacgtgaatggatggtcatagagaaattttgttaacccaaggatcttcaattcgatcaagcctctctgcaatggcattggcctagtgatgagggagttgatctagaattaatatctagatttataatttcttctggcgatgcactcgagatcacaaggggtaatgcacctaggaattcccgacttttgatttgaaaaagaagttgaatacaaaaatcaatgtcataatgcagaatgtttcaatttatgtatgattctggttctaggtttttactttcgaaggttctatgtttgaaacaagagattttgaaaatttgggtagaagcggtaaaatttatcattaagaagtatttatacccatgaggaatgatctgtgcaaagccaagatcaatggttaaatttcatcttctagaaatgcaaaacatatttaaatctcaaaaacccatctgttaggcatttaatgtcgtatctggaaccggtgtagatcaaatgatgaaaattcccatcaaaactcacgcaaaaataaataatggttagtttttttgcctccctacacacgcttcatcaagcaaatagatgctatgccacatagaacctgaagtttgaggaatggaaagttgtcttccattcacataaaatatttagaattcataaaggtttcacctttagcctccacatgtccacttgagtaggctgaagcgagcctctacaatccacaacattccgaaagcttgggggtaaatattatctgtattttcagcaagggatatgtggattccaaatagaattcaaggtccatcagtgggcccaaacaacatgaactgggtcgagcccaacaccagtccggccttctatgaaggtaattacacttctcgcttagacaagttttcagcaagactagtccgtatctgaaaggatgctagctccgtgtagccgaaagaactctacagtgtgtacttggaagccagctgtagttttccatttactattttgttcagaataaggaagccactctcctcaaatctcagatagagaataatatcagccttaaataggaaactgcatagtttaagatcaagtaattaatatataattaattacccataataataggatacagtaacaatagttgtgactgtgatcaacatgccaagtcagcatatagtcactctctcatgggctgggcttcatttgataagcccaaagtaatgtattatctgtataacaccccattagaggaaaagggtaactaagtatgacctctattactctatgaattcgtgctaaatccttcatagaaagagttaaaatttcttaactcacaagcttgagaagagaataaagggttcatattcatcccttaggctttttagcctatctcataattatactaacacgtggactaagcctcattaacatcccaaccacgcaaaaaatatgagtattttcctcatatttgattctttcaattgcattttctttagctctaatactcaataattcgtttctgaaaatctcaataaatactaataatagttagtatatatgtacatattgattgatgggttatatacattgatcaaggaagattaatcattttaatagcatgtgtaggctagacaaaaattatttggtgctagtcattattattactgtaaaaagagaagaagacaatccttgatatagagaaaaggcaagagagtcaataaaatctctagagagcgagagagagatactcactctggtgagatttatatttgtaatcccattatttttatactgaatgaattcttttatatattcatttcattatatcaatgtaattttgattttcccattttattcactcaaagaagaaaaaaacgtataatccaggatattattagtttgtattcaatgttcgctttcccaagtggtatcagagattggtttgtgttacaattattttaagtgattcaaaatggaagattcaacctcaacattatcaacaacaatgtttaagttaacctcttcaaactactcagtttaaaagcctagaatggaggacatcctattctgcaaagacctatacgagcctctttaaaataatggacaaaagccataaggaaatgaggagaaatattggataatactcaattgaaaaactgttagaaaattttggcaatggatagaccaaagtgtatttcaccatgtggcacaagaaacagttatttatacattgtggaagaagttagagtccatgtaggagaggaagacaacccaaaataaggcctcagtgatttgacaattaatgaaccttaagtatcaagacacaatgagtatcttcgaacacttgagaaattttcaaggattattgaatcaaatcagtaatatgaatatggtgcttgatgatgaactggaagaattagtactaaatgaagaaggctatacaagtatgtttagggatatgcacatgagtgttagacaaagaaggctatacaagtgtatttggggataataaatagaagctaactgaaaattccatggtgatagcctgagggaagaaggcaaataccctttacatgatggaagctaaaatttgtaatggatatatgaatgctctgagacaagattcatcaatcaagttatgacacaaatgactcagtcatatgagcaagaagggactacatattctagctaaaagagaaaaagtaactggtgttaagggaaaatatacacttccaaagttgtgtattcattgtttggctggaaagaaacatagagctacttttcatgacaaggccccacagagacgatcaaatatcttagacttggtgcatcctgatgtttgttttccaatggcaactagtactcatggaggcgcaagacactttgttacatttattgatgatcactcttgaaaggtttaagcatatacacttaaaataaaatatcaagtgtctagagtgtttaaggtgtttcatgctagactggaacgagaaactggcataaacttgaagtgcattcgtacagacaatggaggagaatatatgggagcattcaaacattactgtaaaaatactagaatgagacatgaatattttgctcttaaagcgcaccatcataataaagtagctaagaggatgaacagaataatgttgtctaatacaaagcttaacgaaagcttttggggtgaagctttgatgactgtagttgatctaatcaacttttctccttcagctcctttgaatggtgatgttccaagaaaaatttgacagaaaaagatgtatcttacaaccatttgaaggttttagagtgtttgttcatgttcccaaggatgaatggtcgaagtttgactggaagacaaaatagtttcttgagctacgcaaatgaagaattcaagtgcatgctatgggatccagttgagaaaaagattataagaagcaaagatgttgtcttcttcgaaggtcaaaatatataagatgttcagaaaggtatgaagcctgctattcctagtgaatatccaatcaagttagattttagtttatcttctagatatttatgggggagatataatagaatatgttggggatgtaaagaatgagaccgtaatttatgatgatcgagctccgtaagcaggtaatgacaatagagatgacaatactatggttgatgatttggataatggagaacaagatccttaagagccattagttaaaactatagactaaatatcttataatcgaatatatactactcacagataggggagaaccaaagtgctatgaagaagtattgacacatgagcataaagatgagtggttaaaagccatgcaagatgaaatggaatcctttcatgacaacaaaacgtatgatctagtcaaattacctcatggtaggaaggcactcagtaaaaaatgggtgcataaattaaagatcaaagagaggaacttacaaccaagatacaaggcaaggatagttctgaaggttttttttttcaatcaaaagaaaggaatcaaatttgaagagattttctcacccgtggtcaagatgtcatctatttgggtagttcttggtttagctagaatcttatgtctagatgttgaacaagtagatgtgaagactgcttttcttcacggtgaccttgaagaagagatttatatggagtagtcaataggtgtcaaagtcacagacaaggaagatttggtacgtggactaaagaaaagtaattatggacttaagcaggcattacgacaatggtacaagaagtttgcttattcatggttgagcatggatatcgaaggacaacttctggtaaatgtgttttcatcaaaaaacattcatgagggtgagttcataatactacttttgtatgttgatgatatgttgatcaactactaaaaatgttgatttcccaattgttttaaacagttgggtaaaggtattattgtggggccacgaaactgacgcatattaaactatcgtaaaaatggaatgaaaaacatattggttaaaaatagtggagtatgcctatgtcccaaacactcacaaagttaaaaaaaaaatttacagacctgaaataatatgtcaccgctggaaccagatgtacaccaccaaaactagatctcactacatttcaggtcaatacaataaatatatatatatatattcattacaaatatattaacttttgcacccatccattgacggtgaaggaaatcccgacaattgttctcctaagtagtcaaccatatcgttcctctctgtcatggaaattcaagagattagtaggattttcacaacgaaaatactaaagcaaaatgaaaggatatatcaaactctcacctctgctttattgagaaacaagacatcaatattaagatccctttggaggtggaggtgggtggtgatggtggtatgattgggtctttggatcaaaggtgggtggcggtggtggtgcgattgggaccgagaacaagaagagacgaggaggagcaagagaaagagaggtggaggtggacgtcgaggtggagctagagcaataacaaaagcgaggtagagcaagagtgaggttgagcgagtgacagaggctcggtggaggagatgacggtggttgtgggtgttgctcgtcgttcgaacgagcgagtcgagagaggagaaaggaggttacatgtggttgagagagcgagatctgagataagaaaaatgagatctcaaataattgggtttttgtatatttaaatgggaatcctcaacaatttaaaatcgtccgggattccctttacaccccatttttcaatattggtctcgtgaccattttaagccatcgggaatggtaaatgactgtttaaaactgtcagaaatacttaactatgaccgacggttttaaaaagtaaggaaattttattagtgatggtccaaaaaaaacctaatttaaggactgatgggaatattaatttttctaatagtgatcgtaggacaaaacaacgacaatattagcaggttaatgaaagaattgagtaattcctatgccatgaaagacttagaacctgcaaaatagattcttggtatgaccaattctcgcgatcaaaaaatttgaaagttgtggttatcgcaagaatattatattgagaaggtattgacatgatttaatatggagatgtccaaaacaattgttgaacacttgctaatcacttcatgcttagctcaaagaaaagtcctacaagtcaaaagagaaaaagaggagatgaacaaggtgtcatatgcttcagtaattagaagtttgatgtatgtaatggtgtgtacaaggccagatagttggtgttgttagcagattcttgtataaaccaggtaaaaagcatcgggatacaacaaagtgaattttaagatatcataaggaaacttccaaagtaagtttatgcttcaaaagtaaaagacttgaactgatcaactacacagacactgttatgggtagagatattaattctaaaaagtctacttctttatacctaattacattttcagggggatcagtctcgtagcagttaaagctacaaaagtctgttgctttatctaccatggagacagaattcattgcaacaacgatagcttggaaagaaatgatatggatggaaaagttcatgcacgaatttgaacaggaacaacaaaagtacattgtattttgtgacagctatagtgcgattcacttaagtaattaaagtaaattatttaatgaatatttgctaataataattagtatatagatatacatattgattgataggttatatacattaatcaaggaggagccatcattttaatagcatggataggctatatataaatgattcgatgttattcattattattatcttaaagagagaagaagacaatctttgctatggagacaaagcaagagagacaagaaaatctctagagagggagagagagatactcactcttatgagatttatgtatgcaatctcattattttcatagtggtggaattctattgtatatttatttcattatattcgttttatgctatttgaaaatgttaatcccactttacaatattttatgctatcatgatattttaaatgacatgttacatattaccattcatttataattttatttcaattactatttaaagtaaaaattacttattttttataatttataatatcactatattaaattttaaattacatattacatattaatagtaatttataatttcatttcatatattatttaaatttaaagtaattttaaaatttataatagaactttattaaattttaaattacatattatattgatatcaatttataattttatttcatatattatttaaattaaaaattacttattttttaaaatttataatataactttgttaaattttcaattacatattatatatatatatatatattaaagtattatattatcgcaattcatatttaaattgaaattacttatttttagagtttataacattattttaattaaattttaaactacatattaaaattaattaataattttatcacatttattattttaatttatctataattaatttattattcattaataattaattttataacatttaaccattaaatacctatattaaaatttataattcacaataatataatatatatttaacaatttattatttttaaaataaatatttttgtgttataaaattttaatttaactttttccttattgcattatttctaccaaacttttggcagcataatagcttaaaaattataaatctaaaatttttaaaacttaaaaaacataaaaaaacattccagaacaatatatgcacaaaaaataatacacccatccgaccgttgcacatttaatcacagaacctacttcactatatatccatatttaagatattcatactccactataacatgcataaacatattaattaaaaacataaactatgaaatttctaatat

SEQ ID NO: 238997 - DNA, 8966 bp, Cannabis indica
acgagaggatctatctgcatatggacagtatgctaccataaagagaaatgctaagaatttagttggatctggtctgcaatctggtcctcaggattctgttacatcaggtattactactaggtttttctaaatagaatgaaaacagtataagaaggggaaggggcttagtgttatttatgatcttttacatttcgtttcttacttttttttcttacttttgttttccccactccttttagacctatcagctacttttacacatcagactgcacagaaacttcatgagctgttgtttaagcaagggtgctatgccgatcttacagatgccaagattttggaaatcatcaactcatatagttttgatgtaagcacttgtactttctttcctgtttaaatcatattggtgcagttgggagtgcgataataaagttacaaatcaagcttgatgatgctcatgtgtcttgccattatcttttgcagaacacatcaactcagtcactttgtaatgctgtcaatcagatcttggaagatactatccaaagaaagaatggtgatgtttctaatgtatggcagtaagaggatgcatggatgcatatttttaaaccatgcattaattccttacatggtttttagactaattcatttcccccctttttgtattttgtttagcagttctaacttctatttccgtgaatactttaatcagcatgttgcatatctgttgagaaaagtaatggatgtgatccagcagcgtatctcaaatcaagcaaagaacttgaaaaatgtaagatgctaatttgctttcctttccccactacacataaataatatattgattgtagcttgtcatttactatcgactgtttatgttgcctgcttgtagcataacaatctcttcatggctcgtgaagagaagtatcaatcaaaacttagagtacttgaaagccttgcattagggacaactgaggagaatgaggttagtcaagttatagatttgagccatgttttctttttttaacagattaaattaacataatttattaagctaccatctatttgtgtaggttgttttggaccagctccaacttttaaaggtactggcctttactgtaaattggatcctttcgcagtttttctttgttacatgttgatgtttctgaatatatgttttttttcgtctttatcaatttatattagagactaattgttttgttgaacgaattttataatcttatagttcatgatacaaataaaaatgcagatacgtaattatgttctttatacactattgttctagtcgtgtataaaattacaactaccattcatcatgcatgccactattgataaacatgcttccattagctttcacttcttatgcaagtttttgagataacttgtccattattatcatattttaatactacattgaatatagcagcagtttaatagtagtggtttggtccattaaaaaaaaagtatgaacatttctgaatagtcttaccaataatttaccagtaactagtgaaaagaatgctagaacaattaattgaacaatctgatacataataaaactcctaaagtatttcaataattattgcaatatatacatgtatataaatatgtttaacttgcagaacaggatactttaaatgtatttaagatttggtttttaattatatttttgggcttttggttattctaaataagtttattggaatatgcagtatgagaaaataaagttggaggagaataaaaaacttgaagagaaggatgttcagaaaataagggaagagaagaatcaatttcaaaatgagatttcaagacttaaagaagaactagaatcaaccaaaaacaaacatgaaagtcattgtctgcagttagaagaaaatgccaaggaagaaaaaattcaattggagcaaaagttgaaggaatttgagcatgaattgatagattctaggaagaagatgaaagaaacagagtcattcgcagagtctaaaatacggagatggaaaaaaaaagagcgtacttaccagaactttataaagtttcaatttggagcgctgcaggtatgcctacatcattaaattgtttccaagtttaacttttaacacgtttctaaatgttatttaatgataataggatttgagggcttcaatggagtccacaaaacatgaagttttgaagacaaaaagaagttactctgaggaatttaattacttaggtacttgatttttgcttgtttaatttcattttcagttgatattgttttgggttatatttttcactgttttttccttgatattttatgacatatacttttacatatattaggagtgaagcttaaaggacttgcggatgctgctgaaaattatcatatagttcttgctgaaaatcgaagattgtataacgaggttcaagatttgaagggtatgatgtttagcataataatgttttcactattttttctttggggtacatataatagttagttacttgtcagctaatggtgttaaactgctattatattgttcttcttgtaggtaatataagagtgtactgccgaataagaccatttcttccaggacaaagcaagaaacacaccacagtagagcatgttggtgaaaatggtgaattaataattgcaaatccctctaaacaaggaagccacaggctattcaaattcaacaaagtatttggtcctacagcttctcaaggtatagacttttgtattagtctcaaataatttcaagattcttattctgttttcatattttattaaattggtcactctgccagcactataaatgagacatattgtatgttaaatgttaacagaggaggttttcttggacacacaaccattaatccgttctgtgcttgatggatataatgtgtgtatatttgcttatggtcaaacggggtcagggaagacctatacaatggtacgtaatttgattatattttctcataatttatgcacattttagtttggctgaacatttatctttgttatatcagagtggacctagcatatcatcaacagtggactggggagtcaactatcgtgcattgaatgatctttttcatctttctcaaagcaggaagagctccattgcttatgaagttggtgttcaaatggttgagatatataatgaacaagttcgtgatttactctcaaatgagagttcccagaaaagatatcctatatctgtcttctgtttattttcatttatgtttctggtcaatatttgtgaaatacaatttgccttaaaggtgcctgcctgctgctctgcttctttgtatgcttatttttgttgttttctttcaaattattatgtctactcctctttgttttattttggcttcttttttccttaacttgcacacacttgggatttggagtacggcccaaccaaatggattggctgttcctgatgcaagcatgcatcctgttaaatcaactaaagatgtcctggaattgatgcatattggattaatgaaccgagcagttggtgcaacagccctcaatgaaagaagtagcagatcccacaggttttattctttttatagagtttgtatttgctattatcttgttcaggatctgatatgctttgttttctttctaatctccattcacttaaagatcaatcctatatgaacatggattgtagtgcctgccttacaaatattttgagaattttattcgggtctgtaacaatttccatattgcatgtatgcttagttgtttggcatatttctgttttcatttggttgtttgtgttaaaaaatgtttgtcttttttgctctctttttatattggtttcaatgattcatttctgatcatggtgtctatctaacaaaatgatgcagtgttctcactgtccatgttcgtggggtggacctgaaaactgaaagtattctacgtggtagtcttcatttggtagatcttgctggtagtgagagggtagatcgttctgaagcaactggagagagacttcgggaggcacaacatataaataagtcactatcagcacttggggatgtcatttttgctttagcacaaaagaactctcatgtgccctatagaaatagcaaattaactcaagtacttcagagctctttaggtacatatagtttttggtcctcagttgcaaaatattatgatacttctgtctttatgtgttgtatgcatttactttctgttttcctctagttttattgatgaattcttataagcttttgtttttcatccccaactgcaggtggtcaagcaaagactcttatgtttgtacagctgaatcctgatacagaatcctactctgaaactataagcactttaaagtttgccgagagggtttctggtgttgaattaggtgctgcacggagcaacaaagaaggaagagatgttagagatctcatggaacaggtcttagctttatttcttcttaaacttgtagatttatatatgccgggttttcagcattatgcctgaattctagagtgtgttgccatatattcaaaattactattgtttcgggttagatgatttatcatatgatgctactacaaatgtagctaaaatttcaattgtatagacatttggaatgttgttttttcaataataataaaggccagggttagtttacagtaagtcctactaatgcaacttttgttcatttacttctaatgattttcaaaaatccaatcatctttaatctatatacgatgcagaaggtttagttgtgtttagtcaagtgtttcttaagtttgggatgaatgagttcatgtgtttaaccttggtgcgtggatctttgactttcgagctcctggctgtagattttttctttcaaaatttgggtcataatattattactacagtagctctattataaactgttcttttgctttcgttatactagttgtcactagtgaggactacccttgaccccaagcttttgtctaaactttatggctcacactagctatatatttctagttcttgttttattccagctacagtaaacccttttcccgcttggtaaccataacttcagatgcttgctgtcaaatgtttgacacctttctattactcactgcaattatttattggatatctttcaggtggcatcccttaaagatgttattaccaagaaagatgaggagcttgagcagatacagaaaactaatgtcaatggtttgaagcgcggtatgagtatgggcactctaagatataggtcttcatcgccgagaaaatattcggtggcgacacctcgacagagcaaacgtttgtcaggagggaaaggatcagggccaagtgaaaaaaattctgatatggacaactgctcagaatttagtgagaagcattctgaaagtggttctcagcagtcaatggaggacttaagaaatcagaaagaattctcttctcaaatgaagcttttaggagatgcaaatcagaacataaatgaagactttgatcttttgggctttggggatgcagattctgaggagagattaagtgacatatctgatggtggtctttcgatgggaacagaaacggatggttcaatagccagtgttgtggagttcactctgttccctgaatctacaaaaacatttgacaatacgaaatctgagaatgcacaaactgaacaaagtaaagccgagaaggtacaaacttcgaaaactcaaactgagaacaacaatcgactggaaagaacacaatcggaggtcatagacaagtgagtatttcctttatcatctactgaacattttgactgtccttcttttggttaaaaaacacataatagctgaacgcacttactttttaaaatgtgttcaagtacctgggctatttttacaattctttgttatctactgattacacttgataacttttctttggtctgctatctgatttcttggttttgggagatctttcatttgacatagctagttaatatcttgtttatatcttactccaatcaggcaaactataccatctagacttccaaagcctccacagaagccattgtcagtgaaatcatctcgattgtcattgaccaccagaagttcatctaaggttttgtcaggtatgtatggccacttcaatttatgttcccatatttgccttaagagtaagtaatgttaattcaaccatccattttccattattactcatatccaacattgttgtactgtataaggtacgtcaggtgctaagaaaccaactgtaggcagctcctcagcctcgaaagctgcttccaaacgatggcagtaatcgacattttcatataggaacagcattgttagacctttgatttcctatctttttgtgtggtgcattgatgctaggaacatgttatagtttgttgttttttgtattccaattctcttctgttgcttccatttgtctgatatttgaagaggcaatgggaaagttgtaaaatatgtaatgtaatttggttcttattgtttttaaatatatattttatatttatataacaacgtttaagattagttggttttttcttagttttttgaactggaaccaaatgttgattttcttaagtagcagttgagaaaatggccaaatgggatggttaagattgtgatttggtttgataaagcattactattgacactagataaaaaatgtggaacatcatattgaattgaggagctatgtaccttctatcctaatgtatctaatcaatgatttcgagtacaaatgtgattgttgtgcatttaaaagatgacaattataagaacaatgcagcttcctttatttggaatatttaaattgaatggtaggatcaggatccaggaagctgcactacataacacgttcaacataattaccaattacagcactacgcgtgttccaaaaccaataaggtcaatacttactgtacatctcctaacactggaacattcctcgcaatttcatcttttaactacaaccacacacctttcattgtctaaatcttcattgtgcttttcgataatgatatcagttggtaagatatatcatttcctttttgaaaatatccaatttcaatgcaataattgttgtaaaaacttagtagccgttgacaggtaatgcaaaaatgccagtgacagaaaacaagaacaagaacaaaaatcacggatttagtgtattagagaagaactttatgttcatgagtcactcttctttagttgtttaatatctcaattaagttaaggtaattattatatacactttctttttattaatataattaattactttcgaaatttatgtgtggtgtactttgtcattaatatgaactatatatgaattgggcatgtcattcatattttgaggagatttttgttgttggttgatattgacaaactagtgctatttaataagtgtttatttattcaaattgtttttgttataccatctccaatattcttccagaaaaaaataccatctccaataaatcgtataagattaggctaaaacaatgctaatgctacccaagattttgtaattatgattggtgcaatataacttaaaagatcaacaaaaagtataaatatattaagaagtggtaaagaagctaaataaaaaatatatatttattgtggtgtaaaataagattgctgaagccctatttagccaatgagcaactgtttatggctattgtggagaaatattttttgaaggaaatatattaattatatttatatatgaaaaatcggtgatataaagtagggtctttcaaaagtggaacaagtgttaaaagtttgtttaattaattcaatattaatgaacctagaaaagagagttgagagttggaacgaacttctaactagaattctcaaaattttttgggaattcttgactagtgctgagctaactataatataaagatctttttattaataagatccaaaagatttatcatatgatatattttaatttaaatttaatataacttttaatatatgctaaatttaaaaaatactttatatcaccattaaagtattgttttatcaaatgtgttaaaatataacaataaccactttcacaccacttcactaaaattactctgattgcagttgtttggtgaagatgaactttaactcaatatcttaattaatataaatactgtttttttttttaatttccctgctctttgatttcttattaataaataaaatataaatcaaattatatttaacttggttgttcgtgattcattcatttcataagaggagtcagataacaagaaccatcttggaaggatccagtatcccaatgacttcgtgtccgggtcgattaacttttccacgacaaaggtaagtctatcaccgtgccccagagtgagagactccagaggcaaattgtttttgacagatttttgacatgtcgaggtaacctctaataacaaggacaacttttacaataggttgcctcattcattcatacatcaggtaaaatagatttccacaagtataaacatggggatccaatccataaacctactactttgacacaagacgtgtgagaaatgacaatatactcatggtaatgcagggcccttaagcctatgattacgaaattagtctcattttagtcatgtaattgctctattagtgagcataatagggattattctgacccataacttggttaggactaatcctcgcatataaaatgatataatttctagttgacaaatcaaaatatgctgccaaaatcgttacagaccttttatgttgtaagattttcgatttattgttgtaaaatctacacatttcatcatttttgcttttttctttttacattttattctgtatttttgagtttgtacccgaaaacttttatagtttcacttcaaattatatcttacttattatttttggtaaacttaagtattaaagaactataaataaatttttaaaaaatgtactggagtaaagaaaaattttaaaac

SEQ ID NO: 238998 - DNA, 1489 bp, Cannabis indica
taagtaaaataaaataaattaataaaatgatatactcctttttttttcttcttttttttttggtgataaaaattatatacctacaaattatatatacaaacacagtatgtttatatacaagttgctatacatatatgttcatgatcacaagatcaagtatatacaagagatgtcaggatgaaagggggattaaaaatataatacaaagcataagattattaactagacttgatatattatcttggagtcatcttttacggaaaacaatcttaccctcagcatcgtgaaataagagaggtacaacttcatgaggagggtcaaagcaccatacttgaggcttgtccaaataatggcccattcgggctaatttgtcagccgctctattcccttccctataaatatgagaaacaatacaactacttagctttggaataatggagttgatgtgagcaacgtgcatttgtacatcgacacatttaacctgtcttttctccacaattatatcaagcaatgtcttagcatctccttcaagccaaacatggctccaaagaccatattccaacaccaattccaaccctcttcgaagagcaacaagttcggcgatgttgctgttggcttctccaatggattcagcataacccattaagaattcagccttgtgattcctgatcacacctccaatgcttgctttattattcctgcagccccttttgaagatccatcgaaattcagttttgcccatcccatttcgggttttgcccatgacacaggaacggcttcggccttcttcttgctagatgatgatgatgatctcagcccaaaacgaaatccattttgtgatgatattacagttattaattgtctttgttgacacctccaaagatctaatcctaatccaatcatgatgatgatactaattattaataataatagcaattatatatataatagtacgtacattatttacagaaatgaagtgcagtacaaacatatggatcacgtaattagtatacttgctatcatattagatgatgaagttgagtggagcgaaagcaaactaaaaagacccggaatattgctaaaacaaggcagcatcttttatattatatagagagtcgccagggaggttccttttcatgtaatttataaagctttcaatatataaccgcttattattatctctacaaaatgctaagtggtgatagtgtaaattaatattgaaccctgcacataatttaatttaataaataatataaaaagttaatgacatattatctgcctaagtttttttaatagatcaaattgtaactgcatatattataggatattcttttattaatatacaatatatatacattaaaattacataaaaatcgttgttattaataataagttaatctcaaggaactctcactcaacaaacagtcaacatatatttgtattaaaagttgatatttaatgacataatagtaaccttggtgtaatggtt

SEQ ID NO: 238999 - DNA, 1291 bp, Cannabis indica
aggagtctcgaatcaaagcacctataccagtagtttcttttgaaagatccacggctgcattgacattgagctttagatttcctacctgcagaggtgtctaaagaattggttcaattgatggaggtaaagaccatggggctgctaagatttctgggccatatttcacctgagtagaacggtagttgtccatgtagtttgctacaaacaatattaaaagctccctagctgccttagctctttgcccatgagccactcaattcttctccgtccaaatcgtctaaagtgtacatataatttgttctattttgtagataggtttactagagagaacttgagcaataagagcatagattgatttgtggaaagggtttgaagcagaggcatcaggcaacgtgatgatggagtgagtgaaaaggtagagtttagggtgtgtaagattgggtccatgggaaagtaacagggatcgaaaaaaccagtgttgaagcagataaaaaccatacaaaactagaaaaagaatggagaaaattgcggaagggatgaagattagatatgcaggaacagttacactgagatgcagaatttgaaacaagaaagaaaagaagaaaaggttgtcaaaaaactaaaggagacaggtaaaaacccataactgatgcaaaacacacattaaacaatttatcatctttttttaaagaaaaaaaataataaccctagagcatttatactgtaaaatgatttaggttaactcgaagtatgttattttgttatactcatatttattttggtatttaatagaacgttttagtccaattttcatttataattgtgcacaagaaaattattcatacgcaataaaatatttattttattaaattatgttatgtctgtttcagttctacttaattaacaaattgcttataggtacttagtactttgttggtgctaatgtggcatgctaacagttggatatcaattggattagatcatttgttggatatcaatctcaaaatctaattaaaaatcgatccaatctaattatatttatatatgttaaaaaaatttattaattttttttaattgaatttgtaacactagttgttttgtgttaggggtgagcataaaatctagaaaatcaaaaaaatcgttcaaaccgacctaccgaacaccgttagaaccgaaactgacgaaaccggaaaccgaaaaaaccactaacggttaaaactgccactagacggtcgattttttttttttggaataaaccaaccgaaaaaaccaaaaccgaccgttatacata

SEQ ID NO: 239000 - DNA, 4757 bp, Cannabis indica
gatgttaatgaaacatacttgttattaaatctagatcctggtaaaataaatccaacaacttgttaagatatgatcaattgggtaatcaggggattagtgtttaatcatccttatgcatagaaggggctgagaatgttctattttttgttatgcttttggctttatccaattctgttatgattgtattgttttgcatatcttttccctctgtcagctggacagagtatattcccctgctgtaaatgattgtaaccctaaagctataaattcaattcgtctccctcagtctcatttgagctgagcatttctatttctcaatagcattataatctctcttggtatcagagccggcataggccactgccatgtctactggtagccaaactccacgtcgaggagaacaccacacaggtgtcgatgatggtgcaaatcagaacaccccaggccagtttagctccccttagatcaccactggtaatgttcagtatggcgctcaaatgggatctgcaggcttcagcaacgcaccctttggaaatactcttacacaaccattttctatcaaacttgataggaataactacacactttggagaaatatggtctcaacaatcatcagaggacatcggcttgaaggatatgtcaattgaactaaggtctaccgtgcagaatttatcgctattcctggaggtcctgaagagtcgactgacattttcgagcaacaactaaatcctgactatgagcgttggatcgtttgtgaccaactcctcatggaatggctttacgggtccatgactgaagcaatcgcaacagaggttatgggatgtacatcagtaagaactctttgggttgctttggagaatctttatggagcgcactcacgggccaagatggacgatactcgaacaaaaatacagactatttgcaaaggaagcaaagccatggtggattatttacgacagaaaagatcactggcagatagtttagctcttgctggggatccttaccccgaatctcatctaatttcaaatgttctaagtagcctcgatgcagagtacttaacaatcgtgtgtcaacttgtagctccagctgaaattggcttaacctggcaggaattgcaagagactctgctgagttttgacagtaaactcgaacgcctaaactttctggtgtctaatggaaagaattcgaactcggctggtattggtccctctaccgcgcttgccaacaaacagccaacaggtcgtgggtatcctaatcacaacaacaatggtcgaggaggcagaggttttggttacaacaataatggtcaaggaagaggcaacaaccctagacgtggtcgagggagaaatggaggaagaaataccaaaccaacttgtcaagtgtgtggacgctatgagcattctgctgcctattgttacaacagatacgatgagtcctttatgggtttcacaccaggaggaaacaacacttttgctcaagagaaaaaggaccctagtgctttcattaccacacctgaagttgttgaccatgaagggtggtatgccgattctggtgcaagcaatcaccttacctctgatcaagacaacatgaccaacaagaccacctacaatggtaaggaaaaactgacggtaggagatggtaatcaacttgttatctcacatgttggttctggtatttttaaatctgattgtggtaattctttgcatttaactgatgtgctacatgtccgtaatattgcaaagaacctgattagcatttcaaagtcaactactgacaataaagtttatgttgagttttctctgatgtgtgttttatgaaggatctagcaacaaagatggtggtgcttcaagggaaacttaaagacgacttgtatcagttggaaggtcacactactcaaagccaaacttccacaatcggttcacctttgtcgagtcatgaactttctggtttttgttcaaatttgtttactggtttagttgagtctagttcacagcctcattttaaagttaatcaaagttgtatttcctccaaagacctatggcataggagactaggtcacccttcttcaagggtattgaatcaagtgctgaatagtgcatgtgtaaagacttatgttaatgaaaatttaatgttttgtgaggctttccaatatgggaaatcccatgctttacctttcaaattattggaaaatagagccatatggatttatgggggcctgctcccgtaatgtccaacaccaatttgaggtatcacatccactttgtggatgactttagtagatgtacttggctttatcctctcaaagccaagtctgatgctcttggagcattcattcagtttaagacaatggttgaaaacaaatttgactgtaaaattaagaagctacaaaccgattggggggagagtaccaagcctttagcaatcttgtcattgagaatggaattctcttttagcactcttgtcctcatacttctgaacaaaatggtcgtgctgaacgaaagcacagacacattgtcgaaatgggtttgaccgttcttgctcaagcccatatgcctctaaggtattgggttgatgcttttcaaacatcagtctatttaatcaataggctccctacacctgtgcttaaggggaagtctcccattgagtttttgcttaggaggaaactggaatataagttcttaaaaagattcgactcagcatgttatccatgtcttcattcctatcaaactcacaagtttcagtttcactcaactgtgtcaacttaggatatagtgagtttcataaagggtataaatgcctaagttccaatgggatactctatatttcaaggcatgtcgtgtttaatgaaaaggaatttccattcgaaaatggtttcctaaacaatttcaaaaaggattctgaagttaatcatccacttcccagtacctggtttcaacttcccttccaacaaacaacttttcacgagccaaacaatgctccagccgtgccttcaaactctgaaattcatgctgatacaaacaggtctgagcaaagcaacaccacatcgccatccttgaggctggaccaatccacgaataaggtaaatctctataataatccttttgtcgagttgaacattgatcgatcagatacaatagatgctgatatgacagtagcacatgatgtcttgattactacacaacaagataatgtcactactgccactactcagccgtgccatccactgataaccagatctaaggttggcacctttaaaccgaagacttacatagctcaaaccagatggcagggtgatataaccgaaccacttactgttcaagaagctttggctcatgaggggtggaataaagcaatgacagagaagaatatttccttaatcaaaaataaaacctggaagctggtgccgagattgaaagacatgtatattgttggtaacaagtgggtgtacaagataaagtacaatgctggtggatcagttcaaaggctcaaagctcgtttagttgcaaagggcttccaccaaagaccaggaatcgatttcagagaaacgttcagtccggttgtcaaagcatcaacaattagagtggttcttaccatagcagttgcaaatgcatgggatgttagacaacttgacataaacaacacattcttgaatggtgaactagaagagtcggtgtatatggaacaaccccaaggcttcgaagacaaagaaaaattggattatgtctgtaagttggaaaaatcgctctatggtttaaagcaggccccacgagcatggtatgacaagctgaaaaagactcttctcaaatggaattttgaaaattcaagggctgatacttctctctttctactgaaaacacccaagtatgtcattatggtgctcatttatgtggatgacattgtcatcacaggaaatgacacaaatgaactaaattggttcatacagaatcttcacaagacctttgctctaaaagacttgggagctcttaatttctttcttggaattgaggttttcagagatgaaacagggatgtatctatctcaagggaaatatgttgctgaattgcttaaaagagtggagatgaccaatattaaatcttgtccaactcccatgacacgtgggaaacccctgtccctgcaagatggagaggagttaactgatcacactcaatacatgagtgtaataggggcattgcaatacttgacacacacacggccagatatcgcttttgcggtaaataaattaagtcagttcttgaagtgccccactactgctcactggacaactgcaaagagagtgcttcgctatttgaaaggtactatacatcacggcatacacatctaatacagtgacaaacttcccattgttggcatgcagattgggcatgctgcccagacgataggaaatcaatatccggttgctgtgtgtattttggtgaaacattgataacttggtcatccaaaaaacaaaccgtggtagcacgctcaagtaccgagtcagaatatcgagctttagctcagataaaggtagagataacatggctggaatctctggttaaggaaatgaggttcaacttaccttccacaccagttatctggtgcgataacatgatcgccatagctctagcttcaaatcctatataccacgcaaggactaaacacatagaactcaatgtgcatttcattcgggacagagttttacaaaagaaagtggaagttagacacataccaacacaagaacaagtggcagattgtctcac

SEQ ID NO: 239001 - DNA, 3109 bp, Cannabis indica
tatttatataaattataaaaatttaaaaaaaaatattagtgcatgttagtatagtattgaattttcaaggcaaaaatcaatttccttcttattttagtgcagctttcctctgttactaccattaaatctgcttgtgtttcaggaaaaaaaaaaacatgtttgtacgaggtgaaagtactcaattgatagttttcagatagaattttgggaaaattttgaaaacctggatcattagtcagcatatattgtgtaattacaattggtaggacatttaattattgagttagtgaccaaacaaaacacttcacatcccattcatttcatgtaatttaacttttaacttcgttatcataattcttacacaagcaatatactgttaatgttcgtgaaaagcaactgggtcgagtgttgagctgggcaccaagtaagagaagaaaaaaaatggtgtgtatttattgacttaacaaagtgaatgagtttaagtggagggttctaccagacttttcatctctagtattttttctatttgcgtcaacttgtttgtgaccaaccctatattattaaacacaaaaataagctcaacttgtgatcatttttgtcctcaaaacattattttatgatcaacttgatgataatgttctttcctttttcttcttcttctttctattcttgaattttcatatttgcactctaaaaacttcaacttgtccacttaaatatattaaagttggacaattttctccctttgtcctttctgctgtaaacaactccttttctccactaatccctatcgctatctcatttttcttaccttgtttgggacagtcacgtggcaaatattatttgattaatatatcataatatgatacgcaccggtcttcccatctcattttatatatcccttgattaaggctttgaggctttttcatgctttttaacatttagagagaattatgtcaaacaaatatcatctaaaaatgaaagctttattttttctttctaaattttcaagatataaattaaccaaaaccaacatgcaatgatgcaaagcaaatcattgccagttgcggtgagtgtgcaaaagtacttgtatcttctacagtataagagagtatgtatagtaccaaaactaatttagcccaacttggtttgggagagacaacatgagaagataacggcaaaatgtaaagaaatatataaaagaaaagggaccccacaactttggaaattttgtcaagttgctgaatcgaaaagccatgggtactggggagatgggggttgagcctggtcctacaacctacctacaagctttcaaaccgaaaagttgattgtggtttggtactgttgtttgtaggaccatccttcattcatgcatgctcatatttcaccatcacattaactcccatataaaaccagacaaattatacttttttttaattatattaaaaataaaaagcagtccctatggaataacacacatctcttactcctcacatgtggggtcctttcccacgtgctgtaggcctcacccctcacccactttacattcatatcaaaggacttataatattgcccaattttccaataagctacgaaatcagtgcaactaaattgttattacactatgtttgaggttcacttcttctgactacttgtaattttgtatcattttgatgaagtaaatgcttactttcttttccggttcgaaaaaaaatgcttactttcttctttttctttgttaatatattcaattaataatatcctaacagtaaaattaattttttattcaatgtataaatgaaatgttattgtaacataaaatttaactcatattatattttgtattaaatttcacaacgttaaatttagacctctttgtatattactattgaaattcacttttacggactaaaaaattcctatacaccacagcttttagccaaataaaatataatggagataaaatgcagtagcaaaataagtaattagaattataataacattacatttaaaaaggattaatgaaaagaaaagctaaacagtacaatcgaattcgaaggctttagacaaagctacaattactaaaccacagcagggacatgaatgtgtagagtagacaacactctgtggccccattgccccagcagtagccaatgtgaagttcaattcaaatcctactaccactaaacataaaacaaaaaaaaaaggcaaaaataccctattgtttgcctgtaaaatgtgatttttcttaaatcctctatataataagctggaagcagaaaagatttttccttttgttccaactcattcgaatcaagctgctgatataccactagagcagtcgttcgaagaaacatcgtgaccagacgaaaccttttgtttccttccatgtcgtcggtggttatcgcttgctcctcctcgaactgcccctcctcctactaccctcccctccctcaaaccccgccgctgatccacctgtctttattggattcatgaaaacataccaaacagtaagaatcctacagagctaatcgaatttaaaattcttttgaaactatgtttacattacatatattcaatattttcaatatgaaagtgaataagatataactagcaaaatagagcatatatagggtctaactaacccctacacaaaagctctgaagatgagcagcaaagcctgaagaagaatcattcccatttgtcctaattccattgttcatatcggtggagctacgtttattactggaacttgaactttcacaattataagatgcataggacgtcgaagatgtcgttgaggtttcgcagtaggaagtactattgcttgatccaaatgcatcattgttcccttgaaacatatcttcaaatagttgctgcaattcttcaaaggtttcttccccactttcctgctaaatttaccacaatcaaaataatgtttctcttctcttgtgtatattttcctatgatttttcattacatgactaggcagattaacaaacaaatttgtatgacagaaaggcaaattgatccaacatattcatgggcccacactttgcctttgctacaaaaattttcatacgcactaaaaaaagtgaaacttacaaaa

SEQ ID NO: 239002 - DNA, 2893 bp, Cannabis indica
ttaaaaagagtgtaaaaataaaacaacaaaatatgggagtgtagaaagagtgaaaattttgtaaaagaaaacacttcgttttaaggcatcaatcttatgggattccatcttgaattattattttgcatgtgtccaaatgattagaaattttctatggagtttaaactctcactctctttttcttttcgataatttttatataatatatttgagtacgttcctttagattcccttaaaatatggcaccaattttaccatttttttactaatgatgcaaaaaataagattttaatatgtatgttctgtcgttcaacattgtggcagaactttaccatgtcatgttctctattttaccaattaccatttagatttgtactcttttttctcatttccttttcattttggtatgaatggcatggcactgtcgttttcttatcttggtttttactctttataggtcttgatgagtataatcctaatccccatgtgtgcatttcataatttatataatataaagtggtgtatttattggccataactatcacttttgccttatatatcaatcaaacgcatgcattgtcttttttgatgagtactgctcgattcttaatatcattaactattactatatagtatatacgcatgctgctataatattataaagttgtatatgtgtataaaactgagatgttttgaagtaaattattaagaatttgtaaaaaaacatagggagcatgtttactaaaactacaatttacatcttcataattaaatctactttcatataaaaagatttgagttataatttttctacttaccgaaaaaacagagaagatgttaccaagaaagattaaagtaacacccctaaactcaatcacccaatgaaaataacccaattaaccctttttcttttctttcttaataatcccatttttgagaaaagaaaattgatattcttgtgatgggttttagtctcaccactgtcaacagacatcttttcaagatgaggtgcatttttggagggaaagggacaaaagatggtgtgtatgggagaaaaagaaaaagggtattattgttaagttttgatttggagattaataaagtaaacattcttaagttataacttacaagtttttttagaagcatttttaagtgattagtactaatcaatgctcttcaatatgcagttgcataatattaatgaatttggtagtacaactagttgagatgggccatgagatgagatgagatttgaatctgatattattattattgcctaatattagtgacatttcacattaggtggaggtcacattcatttgctccccatacccaattacataataaaacatggtggaaccaactttatcttactatgaccttaagattctttcttcatactctttttaccctttttctttggtattatcaacttggtgggtcatatataaatatatgtacagattcatgttttcttctcatcaagtttctttcttatattcatcagaaaaaaaaaaagaaggttctttcttataagtagtgcttatcttaactagattgttcatgatcaaggtgattacaacacaaattttatctaataattgatgtaagtaggagtgcttattggacgtgtttttcgatttatttagattcaatctaattatatattggatactagattttaccatacgatatgatttaattaatttgagtcatccaatcgatttaatatttattagatgctataatgaatcggttcaatccattgtattttatatatatttattgattcaatttaggttcattcaatattttagacttaatattttttagagcgaattaaattcatccaatattttaaattcaatatgtattggagaaaaaaatagtaaaattttaatgttaatatttatatacatatgtattttacgtataataatataaaatttaattacttattcaaactaaataaaaatactaattaatttaattggatattagatgtattaaattttcagatattctattcaatatctgatctgatctaattggatattaaaaaataatatccaattcaatccgatcacaattaaatatttaatattaaattgtaattaaatcgatcagttcctattaaattgaatcgatttatgctcaccgttatttctttcactttggagtttgtgccctagttggaaactattgtgttatttgaacatgagcactaatgcacataagaattgtgcaaaaatattctaagtgtaaatgataaaattaatgttaaagtaataagttaaaatagattttttttttaaatgttattttacaaaaaattatttaaaagagtgttccacttccacacaagatgtaaatttgacattaaaaatatttatttaatttgcacaccatttaataatttgtgtaaacttaattacaataccttatcatattcattactatcttttagtgtaaatggtaatttggtggtccaagcattttcaacttagagaattagatgctatatatatagatatagtagtatatacttacatatactgtgaagttttagagtaagataccacttttatatttattgaactcgtggattaaatttttttatacttcagtaaatattgtagttacagtagatattttatcgatttttttttaaaagttatgaatattatagtttaccattggaggtagaaccaagcagagacatgtacatgtggggttatttgccccctacaattttttgttaattatatttttaaatattgttagaatttgaggataagataaatgaggttccatctcaaaactaattggcaatggaaggagtagcccttttatcttatatatcacaatttatttcctacacattagcaatgtg

SEQ ID NO: 239003 - DNA, 2449 bp, Cannabis indica
ttaaaaaatcacgtaatatgcctatgttagttagggtggtacatcacaggtagatgtgaaagaacaagatgacattgaagatcccaagtacgaggaaaactaagaagagtataaggcatatgatgatggtagctatactaaattaatggcgttaagacagaaagatgttgaccacgaggctgagtaggaagtgtaaaaggagcaaaatagaaagatgcaggagatagtgatcaccatgcaaagaacggttgaagttgtaggcatttatgtgcatccaaatgtgggacctcttcgacaagacaagatgagagaaggatctcctcagccatcaacgaattagaggcataagaatcaggaaccaagcctcaactgatacctttccaaaagtccccaaaaggcaaaccctacagccatttcgaaaaggaataaaaaggctcaagatccacgtaaagttcactctgatctcctttaagggaaaggtcaacaaaggagcaattttcctaagggaaagaatcgtcatcaatatcaggaagaccaaaaaggtgtatccgtgcatcaagagtgggaggagagaaagtgaaaatttcaaaaggatcctctggtcgatttaagacaaaaactcaatgccaagccctgtgatcttagggatcgcttagagtgaaagaagaaaaccttatcagtctcaaacaacacccataatgaaggaatcctaactgaactcactattctcccaaaggatatagctaaggtctcccaaggaaaaaggggagatgattcagagtctgaatgcaacgaccgagaaccttgtacgagaaacatacttgaagcgaagctcccaaagagtttcaaaatgtctgaaataaccttatacatcgaagacacagattcttgtgataacttgtcaagattattcaactgcgtgacgacagtcattacagtcagtaatgacgtaaaatgcttgtgtttctcgtagtcactagggggatcacctgaggaatggttcaaaaaattggagtccaaatctatagacagttggaataagttacagactagtttcagatggtatttcttaactaccaaaaagattaattttgaagtcaatgacctaaccaacattaaataaataccagttgcgacgttgaaaattttcatcaaaaggtttaaggaagaagctttaaaaaaaagtggatgatggacaatagttagcgttattacaagctggtattcagacgtgactcctttttcgaatgagattcagcgagaaggagctgttagcctttatgacttccaaaaagggctcaaaagtatatcagcttggaggaagatattaccccactcgcggtcatggatatgctctcggagcacagtttccaagaatcatccttcctatcacgccaaaaacaagtaaagcagctagtgtgcaatttttagaaccactaagatatttgcataaccttgctcttaccccgtctcagtccaattttaggacaccaagaagtaacatgactctggggtgagattatagtatcccgctcaatccacaccgtcaacagtaagtgggcctgaagctcctcagacctcttggagtaagaggtcatcaaaaggaagcacgtggaatgaaagtaagaggaaaagaaacgccacaactcccagtatacttatgattaaggctcaaatttgtacattttaagccattatttatgcatatataattaatataaattaagtattctgtggttttaataataaatttatttttgttggaaatatttaatttattttaattttgtgttatttttcagatttgaccaaagtattataatagaacctcaacccaattggatgattgatcaaaagcccaacatctatttttaattcacatgaagagatggtgctggatgtttgcacgttatcttttgaaggcccattagttaatgcctaatgtggagaaatagtccatatcaactaagttttttagttgactatctcatatgactaccacaaagaatgcaacaacaaaaacgtgtctctttctttgccaacgtcattccatctgacgggagtaactagctcacgccacctgtcccatcgtcccccattctctccaacatttccttacacgaatggtcccattttatccattgtgttaagctttttgtgccatttatcccactaaatggtacacgaaaataccatatttgaggagcaaatttgcactataaaaatgacccaaatctattgtaaaaggcatcagattttagattagagaaaatacactttgtcattctatttttcaatcttattactattttatctatacttattttagtgacaaaaatgagtgtattagaatagtaatattggtgaggctagagtgtagattttgtaattcttatttctattattgatattgattcttttgtgcttcatctccatatctcatttatta

SEQ ID NO: 239004 - DNA, 2162 bp, Cannabis indica
taaatgatcactttatttgggtcaaacttgaaatagcaatacactaatatacatatgagcccttgaccattttaatccaacattactttctcatagtttggctaattggatgaccgtttttgctgcttctattttgtattgatttccaatattattgatttgatatgtgcagattgcagcatacctaatggtcacatccggggctgctgttctcgaaatagtatatctatcttacaacggggataaagaagtgtcatggagtgaggcctgtaattcatatggaagattttgccatagattaaagttggccttggttttacatgccatagctctttgctgcttccttgttttggctctcatttccgcttacagggcttttcgcatgtttgagcccccttctcttcctaataaggaaatggaagaaccaagatcttgaatgcttataaaggggtttctttatcagctgtaacttcaaggtctttgtattttattatcttatttcccttccaagttagtttgttctgatgggtttacgatgttagaaaccgaattagtgggcaatcataaaatgatctttttcggttagcaaaggctgtacgtgaagctgcatttaagacgcaaaacccccatgagttataaatttcttccttgccttgtatttattgagccctataaatattaaatatatatagactgtttagttaaatgcttgtaactattcttttttagtattagtgttttatataagcacattttgatttggtcttttaaatctcatagaaaaattatttaaatacggacaaacacctaactgagtaatgaagttagtttagtttgattacatatttattaaatatttcaactttgatttaaataaatctgcttctttatttgttttggtggggttggttttaacattttcaatttcctcacctaccaactcggcatggttgataacaataatatatagtatagcctcacctacttgtcactagaagcttaatgatcaccaaaagacagcccttcattttgttcttcctcttctcgtcatggcaccttgcccaggctaaaattggaatagtgagactgcaagcttaaccttataaacttataattttacttcacctttaaccagaaacaaagaaaaaaatttacgaatttctttctaaaaaaaattataatttaagaaaaaatatcaattaggataattatttcagaaaaataactgataaagattaaataaatgcagagactgtagaaattgggatttcattcaattagaaagtcaaaagtaaagtaataaaattaagaataattagcattttttttcctaaacttccagcactacctgattttgccctctaaaatatacggtttgttaaaagttttctttaaaatataacaattacataattatgttcctttattttgagttctagcatttttatcccctgaattttgactaatacaacattttgcccatattttttttttaaaaaataattttaaaaattataactttatttttcaaaagtaattataatattctattaactaggtaatatagtgttttttcccgcggccattataatatttttttagtataataataaaaaatatatcaatataataaacaataaattaaaaatttattctaatatgtaataatatttaaattgcttgttgttgcccttaattttgcctaaaatacgtggaccaatgcgactacgacacgtggatatgaaaaatatgactctgagatgaatcaactaaatctttttggatcaagagtatcaacaagaaaatacctcccgaagaagatatgggagctccacatactcccggaagtcagagccatgataaggcacctccgggaggtactagactccatttaaacagtcacctcacatttattgccgcatgggagaagacgtattgaaactgccataagtaataagtctgacggcgaaagccctctactgcagctattacgctatgattaataagcctagtgacggctactttatgaggaatcacatcaattaagaagggataaaggattatatccacctaaccccaaagatacctatggtataggtcatgcatttcctattttgtatctgctaggaatatgtgtgttggatattattttaccaggatct

SEQ ID NO: 239005 - DNA, 3458 bp, Cannabis indica
ctggtgttgcttgcgaccaattgcaccagagagtagtgggccttgatctttctgggcttgggttgtctgggtccataagcccacatattggcaatctctctttccttgattctcttcaactccaaaataaccgtttcacaggacccattcccaacgaaataacaaagctttttcgcctgagacttctcaatgtcagcttcaatctcatcaatggcgtcctaccctcgaatctaaacaacttgaaagagctaaaagtcattgactttacttataacgacatctcaggaagactccctgaagagcttagtctcttgacaaagcttgaagttttgaagctcagacagaatcatttccatggcggaatccctcagtcatttggcaatctttcatccctcactgtcttgaatttaggtaccaatacccttagcagagacatacccaatagtttgggtcgtcttcataacttgaaggaactcgatctcaccattaacaatctcactggtatgatccctccatcgatatataatctcacttcattagtaaatttggctgtagcttcaaataatctctggggcgagataccgtacgatgttggggttaagcttcccaacctcttggttttcaactactgcttcaataaattcacaggaaggattccagggtctctacataacctcaccaaaattcaagtcattcgaatggctcacaaccttctcgaaggtccaatcccaccaggtttgggaaacttgccatttcttgagatgtataacattgggttcaataagattctcagttctggtgacggcactggcgatggtctgagcttccttacttctttggtgaacagtactcggttaaagtttttagctattgatgggaatggtttggagggtgttataccagaagccattgggagcctctctaaagaattgtcaaaactttatatgggaggcaaccgtattcatggagagattccccattcaattggtcgtcttaaaagtttgactttgttgaatttaagttctaacttgatcactggtgagattccaaatcagataggtgagttaaaggaagttcaagaattgtgtttggctgataataagctttctggggctattcctaggtctttaggagagttgaaaaagctaaatagcattgatttgtctggaaattctttaaatggttctgtcccaactagttttgagaattttcagaacttgctttcgttggacttgtcaaacaataagctcaatggaagcatcccaaaagagtgtcttaacctccctagtttaagtactgttttgaatctctcaaaaaaccttttgagtggacctttgcctcaagaagttgaggacctaaaaaatgttgttacaattgatctttcccataaccttttgtctggtccaattcctaattcagtcaagaattgtaagagtttggagaatctattgatgagcaataatagatttgtaggttcaattccaaaaggtttagctgaagtcaagggtcttgaaatgcttgacttatcagcaaaccaactttctggctccattcctaatgatctccaaaacctacaaggcctcaagttattaaacttatcatttaatgacttggaaggaatagttcccaaagatggagtgttcaaaaacctttctagtgtccatttagaagggaataagaaactttgcctcaaatttccatgcctaaattcaaaatcaacttccactagaaaaagattgataaggttcactattataggtgttttcacagccttaatactcatatcattatgtttagtacttggtttattgttccatctcagaaaaaacaaatcagccaaaattagaggggacaaatcttttggtgaagtagatcacaatgttcaacatcagatggtctcctatgaagaaatacgtcgatcaacagggaattttagtgaggaaaatcttcttggaagaggaagctttggctcagtttacaaagggtatgttaatctaagagaagggttagttaccactgcagtaaaagtccttgatatactacgaactggatcttcaaagagttttgttgctgaatgtgaggctttgaggaacgtgaggcatcgaaatcttgttagattgatcacatcttgctctagcatagactacaaaaaatggattttcttgccttggtttacgagtacatgtgcaatgggagtttagatgattggatcaagagaaaagaacgaaagaaaaatggtgacttgttgagccttattgaagactagatgtggccattgatgttgcttctgggctagattatatgcatcatgattgtgaaattcctgtggtacattgtgatataaagcctagcaatatcttttggatgaagattttactgccaaagtaggagattttggtttggccaggttgctgatgatggagaacaaagagacaattcaaacttctattagctccactcatgtcttgaagggttcaattggatacatacctcctggtaagtgtgtcactcactcattccttatactcttaattgttatactatacacacaatacatttagattatatgagtatttaaggtttagatatttgcaactttataatttttaactatatgctagtttgttgcaccttctagttccaagttatggtctttataaaggaagagaagagtggccttacattatcaactattattattaacaactcaatctttataataattttttttacaataaaactattttgataattacattatgtaagtactttaaatgtctgcagagtatggttttgggcagaagccctccacaggtggagatgcatatagctttggagtgttgttattagagctcttcacaggtatgagtcctacacatgaaagtttcacaggagagttgaacttgatcaaatgggtagattcagctttcccggaaaatttgatgcatgtaatagactctaatctattacaattttctgagaatcctaacaataaagatcatgaagctataataagtccagagaagcaatgtgattgcctaagcagagtaatagagatagggctctcttgtgctagagattctcctggtgagcgcatgagcatgagagttgctcttaatagtctgaaagcttccaaacataacctccttaaacactcaaatatggattgttgatttgtttcatcaacaactatgtgttttattttcaagtattatatttgataatgatgtttattagggtgttaaaaaaaatatatacaatatatatatatacacatataaggatgaatggtctataattaaaattgagtatctacagttgtaaaattatattatattggtttttaaataagaagaaaaaaaaagtaatattttcttgaaattatttatgttttaaatgttttttttatatatactctaaattataatcaatttaaaacgtatccttgattgagccgt

SEQ ID NO: 239006 - DNA, 2379 bp, Cannabis indica
tcggttgaccgcgagataaatcggttgagtgctgctaccctccatgtcaagcattgcacttccttccagttctttggtgattcgatatctatcagggcttttatcttttctgaattttcctctattcccctttcgttaaccatgaagcctaagaacttgcctgacgagatcccaaaaacacacttggcgggattaagctttattagatacttcctcaaggtggtgaatgtttcatcaaggtctttaatcaagtctcccgcctttcttgacttcaccaacatatcatccacgtacaattccatattgcacccgatctggttggtgaaaattttgttaatgaatctctgatatgtggccccagcattcttgaggccaaatggcatgactcgataatagtagagccctttatccgttatgaaggatgtgtgttccttgtttgctgggttcatggggatctgattgtaggctgagtacgcatccatgaagcacaatacctcattctcgttcgtggcgtccaccatctgatctacacaggggagtgggaagttgtcttttgggcacgctttattcaagttagtgaagtccacacagacccccacttcccattcagctttgggatcgagatagggttcgacacccacagcgatgagaaggcttctcgtatgaagcggtgcaggtcgagtttgtctacttcttcctttaatgtagcatatcgcaccgagtcgagggcctgtctattctgctttataggtgttgcctgtgggtctatattcaattggtgagacattaccgtgggatttatccccactatgtcttcaatgtccccaggtgaagacatccaccatccctttaacatactgttatagctcacatttgagggcgacgtagagtcctctcccaattttaaccacattcaaggggtgttcgaatatcacaacttctttggtttcttcgtaaggttctgcacgaacctcctccttaacccttgggtcaaagtctgccttagctctttgctgtgggcctccttgtcgcatacaacaatttccatggattcgcgggctctcgtggctatcctgagggacatgtgataacactctctctccttcttctgttaacctcttgctgttgcaactcccctgagggttaggaacttcatggctaagtggtaagtggatacaatggctttcaagcagtagagcgagggtgtcccaagcaccgcgttgaaagctgttgggctttccactacaacgaatgtggccatcactgtcaattgcctaggtcgctctcccacgttgagggggagctcaatcatccctaggggatgcatagagtccccagtgaaaccatatatgggcattgtgtaaggcttcaaatccttcatactcaaccccatttgttctagagcgctccggtagagaatatcgaccgaacttccattgtctacgtgtactcgatggaccctagcattatccagctatactactagtattaacaggtcattgtggggaaaatgaatcccacgtgcgtcctctttggtgaatgttatggagtaactttcctctttcgagtttttcaacgatctttgttccaggctcattaccataggtggttgtctggcctccttgggatacctgtccctccccttgagagtggctcctcctatcctaagccctccagagatagtcataacatctcttattatctctagagcctcacaagggttttcttgtctttccccttctcgtcccctctcttcaaggcgtctcttctccccctgatagcccccaagtaccccttttgtattaagtcctcaatttccattttgaggtgggtaaattattccgttgtgtgcccgatgtctttgtgaaatttacaaaacttattagggtctctcttcaacctatcctttctcattgagggtggcttcttgaacagcacccggtgttcattcgttaggaagatgtgctccctcaagcatgtaattctggtgtaataggtgaactccctatgctggggcttctcttctctcctaactcccttctttcagtcattcctgcctccatcaaactctcttttccttcgtggttcttcatgtgcacgggggttggtcgacccaccgagctcagtcttccctttagtgagatttttcatgaccgtcctcaacctggatatacttttttgccatctcgtagaagtcctccaagtcttttaattcccttttatgcatgttgttccacaacttactttttggactgacgcctgcagcgatggccatcttgtgctcattcttggtcagccttcctaccctagtcgcttcggtattgaagtgttgtatgtagctctaaaggttttcaacatctccttgcttgatattctcca

SEQ ID NO: 239007 - DNA, 8503 bp, Cannabis indica
aaattttgaagaattaaatattcaagcagaagcgcagggattatcaacaactactacatattcatttgcagcactaaataaaaaataaccagtggagagcccaaaaacgatggcaacaaaaacggcgccgttgaaggacataaccgacagcattataaggtaacccatggccgaattcacaccaaataggagggaagtcgcaaatcgagcgtggatcgttggagatttgaatctgatgcgccgatcttcgaggtactgatagagagcggagaagaggaagcaggcgagtaaagtgagaaggtaagcgatggtggactgaatcttccatgagtcgactagaagagtcatgtctttgccccaataaaatgtcatctgcgttattttcttctttggttcttccatggggaaaggaaaggaatattctgtgctattattattagtattattatactggagaaagagaggttttgtctacaaaatttaggtgtatttgttgtggaattcagtcccaattaatctgccattatacatatttcttgatacgtttttgtttttctcttttcttgaaagaaaacagatgtcaagttccaaatcaaaatacgtagatacgtgtgccatatatatatatagaaacccgaaaacaccccttaagttcaaataagaattttacagtcttcataataaatggaggtttttaatattactctagtaaaaattgtattgaaaagagttttacatcgtctaataattatctgtaatgtactttgaaaggaatttaatgaaataatacaaagcaaagttaaagtttgaaaaaggtaatactagattgttacgactattcagttgattatccgaagtggagttaagtaaaggtagagttgaagctgtagaaaatattctggagataagtttggtaagctgaacttttgaaattttgaaactaaatttatgcacagaaagtttagaagaaaagcaatgttgaatttggatgaaagctaacttgtccgactttctttacaatattattctcttttggaaagaatatattgactaggaaaaagttcaaagaatcaaaatggaaattcagaattaatttagctaagcaaacattcaagtatccgagtctaacatcagaaaactaagcaaaaggacattctcatgaaatcacaagcaacagtccaagaaatatctatatataatgtatataaaagttagatcaagggatgatctatcacaagaaattttagcaaaagagatggcatcaagtgtatacttttttgtttttacaaagtgtttcgtcttttaaactaagtttgggttttttacatatatgctgctgtacttgatcaatcttactatagggtttgattatgcctgtagtcacgatcagttatatctatctctatataatggggaagcatcgtagttgtcttatttggtcgattaaagacgacacatgtaagtatttgcttcagtaatttgaatagccttttccgaacaggccaaaagtttgaatagcaacaaggtaaaaattgacaatcccttaattaaagacaaggctacaagagttaaaaaaaccattctaaatatgtatattttgtattaacatggcgtgttgtcaatcatcaaacgcagttacttaaacatgagtaaatatcaccgcatgccatttataatgttgacaaatctagtcaaactaaatactttacaacacaaggaaatttcctccacaagcctctctatgcattttctatatatctgttgcctaaactcagaaaatataacttttatagagaacaagtgacatttaatcaatttggaggaacaagtgacacaacgcccattgatgtacttatcctgaaggagagaaatatcacatagatcattatgagaccaactcctaacatcttactggggcgcatattattcctgggaagcacaacaagtgcccaaataagccccatcataagaaatcccattgtgaaaaacaaactactatctcttggaactatgtatgatccaggtctcttgttcaaggctccgagcaacagcgagatccctaaaccagctagagtgttgaacataggaccagcatagcatcctgacattgctatctgtacaccatctcctccattaattgcaagtgcagtatttgacattagatcacccattgagtttccccatgccaagacagtcaatccaaggattgaagggttaattccaaaaattacacccaaggccaccagcaaagcgacaagctcattagcaacaatgtagaaccagacaatgctcataaagaatccgccaaaaacccatggaaataaaaacctacgcgggggctgatcagctctggtgtgtagatatgcaagcacaccaaatatgccaccaagaacagcacctgtgacatatgcaatatctctactcaggtttccaatattttcttgggtgctccataacaaagccagagaaggggtgctaatgaagcactggcaacagcatatccttttgaccatcgctcttcctcaacaacaggaattgtcaatcgccttgggattgtcaatggcattgacaggataaataataacttggaacaagaaagtttcttctcatttacaacttcctcctcttcattccatccccacaaagaccttggactatctggattagccctaatagcctgatttgaataaattgcaacatttgaagcccacatccactgtggcaacttattaggaagatgtggtacatcactttcagcatcggattcaagtagtgaagcatatacagagtcatcctcttcacttccatcggaaaatatacttcctctgacaggaagcaatggtgttacagcatccagtcttaatttccgagcatgtttcctcaaaagctcattggcagcaacaacaaatgcataaaccacataaatggaaataaaaactattgctcccgcaacagaaactttgccaaccatcaagatgatggcaagcgacaaaagtgtaagtagaaagaaacaaatgtctctgatgaagcatttcttatcaatttgaacccctttctctgccacacaaagagatatgatacccacgactatacaagtaacgaaaacagcaccacccaagacactattaaggcctacttctccagcatcctttccaacaaacgaagcaatgctagcaaacacatcaggagctccattcccaagtggaagcagagaaactccggccacagttgccggcaacttcagcagacaggagagcttttctaaagaacaacaaaaatagtcagctgccgtatttcccaacaggtagaacaaagcagccatccaaatcatcaacacaccatatcctaaaatgctaaatttttcacaatcacaataaaagaaagcaatgtaattgaaaaaaccccctgaagtacattctggatgggcagtcaagtattcacagtggctaccataacctttgtgatttaacaagccagcacacaatttgatatcactgagcaatagagcattggtatctgatgcattactggcgacactgtaattcgacgaagctccctcaacttgggaaattctcctacgtataacctcataccggccaccctgatcgtgtaaaccacctcctctgaagctccgttgagaaggaaaagaggaatacgagttacccagaaaattaatcggggtgaaactgtcatgcgtatagaataagaaaaacaacgcaagagcacaaatgccattgaagaccccacgaactcgagaattcatgacacccaaaatcattttcagcccaatcccggcactcagccgccggcccctctctccagccctaaatttcttgaactgattggggactcaagttggtcgagaatcaagaaccgcggagtaataaatagccagaaattgaaaccctagtaccaaaatatccttagcttttcaaaatcaaaattcgaaattcgagagggacaactgaaaaatttggttggttgtgcccaaaaatgatcacgagagggccaaattgaaaagatatcagcacaagtcgtgttgtgtaagtaccttgaaagagaaagaagaaaacaaaagaggagctgcttctgggtagcttcttcaatttgcttttgtttgttttgaactgccattacccgtccaacaattctaaattggtaatcaccaactatctgaaacagacctaacactatatacaaaataaataaatataacagaatattatctctattcaattcgaaagatatgtaaatttttgttgtagaaaaacaaaattaatcaaaaggaaagcgaagagaactgaccaagtacgtgatccagggccgtagcttttgtgatgagagttctacacagtcacacatcttctgcttcttcttccgctccggctccacaggcagaaaacaaaagcttttaaagctttagagattctgagactaaagacgagctatgacaaaatccccaattttggagaagaacttctcaattaagaaacggcttcgttcacgtcgattgtataataatgtagtaaataaaaggctaatttcatatttgaccgtcacactttaatttgttattgggctagaaacgacaccgttttaataagaaagaagagaatgaaacgacgtcgttagtggaaagtgaaagaaaagggtatagtgagccgagaagagcgcgaaaatgaatcggagcgggagtggtaacggagaaggcttgaaaaaggggacgaattagcagagtgaccgagaagagacgagagaatcttcgaagctgtcgttggaagatgatgaagaagtctccattgccattgcagagctcatcgagtcggaggaacgacaaccatatttacggcaaagaagctctggtgaagctcttgcgctggcatttcgggtatgcggattttagaggcaagcaattggacgccattcaagctattttgtcaggtctgtaattcactgttcctcattcacatgcgtgcttaaccttttcctatttattgtggaatttttgatacccatatatatgttttctctttacctactgtagtatttgtaacatgatgatgatgatatatggtactcacccagaaagtagtttagtgaataatgatatggtttttataaattttttgaaatgtgaacttttttcttttacattgatattgtagggagagattgcttctgtctgatgccaactggagggggaaaatccatgtgttatcaaatccctgcactggcaaagaaagctggaattgtgcttgttgtttgtcctttaataggtgagcgataattagtcccttttgcttaatttgacacaatttaggtggagcttaagctacatattttgctttctgattgaacttttgatggtcttaaatgacgggagacgcttctaacttctttacattgtcttttgattccatgagcagcattgatggtaagcatatcaaaactttccaactgcttgttgtatttccatcttctgaagattgagattcagggaatattggaatttgtgtgagatcaggaaaatcaagtggctgccctgaaagagaaaggaattgctgctgaatatctgtcgtcaacccagacgtcatctgttaaaaataaggtgaaatgtgttaactttgatatcttcttgttatatgtgtacctatatatatatttatgtctaaaagtttgagatagaactcttgtgtattggtcactatgacgaagagccttcagaaatttgttgagaaactgttagtaaatttacaaaattaggaggctgcccaggaccaaggagattaatgatttttattaggtgtttgtattgttttgtttttagttttggttcttattcaaattaccatgttttttgggtagtacttactaagtaatggaagacaaaatttatcttgtgattgagaatactaaactcccatttatactctgtagattcatgaagaaattgattctggaaggccatctttaagactactgtatgttaccccagaattgattgcaacaccaggatttatgtcaaagctgacaaagatttgtgccagaggattactgaatctcatagccatagatgaggtatgaaatactattcataaccttcagctggaaattattgtgtataactttacctcttctggagaatttcaggcacattgcatttcttcttggggacatgacttcaggtttgtgaactgtgataattgtaaacattctttactacctagtattgcacataatgtcagaaaccaaatagaaagtgcaattaatcctaacttctatgagaggaccggatatcaaatttcaagtgctcttttgtcttgaatctatcaagtgctctcaggggcaacgtatttctgtccacttcttctttctctgcatgaccatgtttgatgtgtacttttcattctgtaaatcgtaaaattagttccacttgatcagtttcctataaattctacttatatctttttcatgccacctctggctctgaggaaagaagaattaaaaagattagattctggcagggacacacttctattgtatgtagtagagctttcatcttttttagtgtttgagagttaaatgtaactattgatctgtgaaaaatggcaacggaatgtccttatcttgatatgtcgattgcaaaacttttatggcatcatattttattgtcttttaaactaaatatttgaaacaggcctagctaccgcaagctttcatctttgagaagccactttccaagtgtacccatcctagctttgacagctacagccgctccaaagtgagtcttgtgaagctctagttgtaattcctttctatgtaaactatgggaacttaattatttggatagtacagagactaaacaattaatcattgagtcatgatagatagttcattgattatccttttgttttgcagagttcagaaagatgttatagagtccttgtgcttgcaagacccattagtcctcaagtcttcttttaatcgccctaatatatactatgaaggtgtgttttgcttccagacttgactaagatagagtttgttcgttgtattttagaataaattgtaataaaataattcacactgaggaagccacattcaaatgtcaacaggctctcttgttgatggaaggtttcttctggttattttgaaagttgatttttgcaaggtgtgaattgctgtcattgtttacttttctacacatcaaatgatatttttctgtgatacagttcgatacaaggaccttttgaatgatgtctatgctgatttgtctaatctactgaaatccgaaggagatgtttgtgccattgtttactgccttgaacgtacggcatgtgatgacttgtctgctcatctatcaaaatttggcatttcttctgctggtatacatatgattttgcccttgacaatttgcaagcggtttcacttaacatgtgctgatgattctgcttgttctttttcttttccttttccttttccttttttacctttctttcagcttaccatgcagggttgaatgataaactgcgtagttctgttctagaagattggatttcttctaagatacaagttgttgttgctacggtggcttttgggtaagattgtatatgagttattcaatttattcttcctgcattttttcctataattttctgcttctcttttgttggttttctacttctgttgtttgtgagcttaatacttaacatgtctttgatccatttctttattaaagtgcatctaataatgtcatagtgaaataaaacttgaattaacggcctaatcaagttaagtgaggtctctccgtagctgatgactagaaatgtgaagccacttgaggctagctcctgtggttggatgcctcatgagactagctcaagttgttgggtgagtcttagagactagagcatgaactgggttcagatcctaatagggaaaatttataatgcaagtatacgtctcgtatcaattaataatagcgcataaacacgagtatcatcccacgaaaactattaccatgtaccaataattatttttctactttttatttggcaaacaaaaatttgagaaaatattattaaaactaggaaaacaatttaactataaagtaagcaaacaatgattatgaatatcaataaatgggaccttagttttatcatcaacttgtcaatctattattttacttaatttgttttacaatttcttcttctaattttaatagcgggttaactaaaacaaatcgtattatttttcaagatataagacctcaatctatatttaaattttctacgtatctgtaataaatttcaacatataaaagacattaagaatgaaaactctatttgctacacaagtcatacgggtattctcgtccaatatgtgacctatgtctaaacaactatagcatattcaactctcatctcactaatctcgaattgaaatcataaaaacatgcaaatagtgattaagtattcacgagcattaaacataaattatatag

SEQ ID NO: 239008 - DNA, 5038 bp, Cannabis indica
gtaaaacatattccaacaaatacttggaatagaaatcaaaagaaaaagcctgatctgattagtgtgacacaataggggtacttaaagaaagtcataatgaagtttgagatgcatgaagccaagctagttgtgactcctttggctcaacacttcaagctttcaaaatatcaagcacctcagatggaggatgaaaggagacacatgggtagcatacaatatgctagctgtgcaggatgcttgatgtatgccatggtatgcacaagacctgatcttgcctatgccatgagcattatcaggagattcattactgatccaggactaaagcacttggattctgttaaatgggtgatgagatatgttaaaaggtctttaaacctaggcttagtctacaaagcaaacagaagaagaaggtgtgaagttgagggttttgtagattcagcctatgctgactacatatatacaaggagatccctcataggctacattttcacagctctaggtggatgcatcagctggaaatctaaccttcaaagagtagtagttttgtcttctacagaggcagagttcatggttgccactgaagcaataaaagaagcaatttggttaaaaggcctcattaaagaacttgtattcagatcagatgacataactggccactgtaacaatcaaagtgccctgcacttgatgaaaaatcctatgttccatgataggtcaaagcatattgacataaaattgtattttattagagatatcattgcaaagaaggagattcaagtgaagaaagatctgtactgattataatccagctgacattttcataaaatgtatcactcaaaccaagtttagacactgtctaaacttggtcaacatcaatgaaattagatgagcttatcattccttgtacaagagtcagcctaccctctacttgttatctaagtcttagtgtctataccaaggtaaaattgttgtaatatggtctagaaactaagtcatagtattgcttagttggcacattctctcatctaattactaccactgtctcgacagatagttagttaatacagttatgcctatatatagacataatagtagagatctcaatacagttagagatccagttattggactcatgtcacatgttcttagaaaagttggtagcttgtatagaagagttattctttcatagaggagggttgtaaattgagtgttgatgtatttgatccagttactcacagtgagagaattaattgtaaggagttatctccattgttcttgagagctgctatcaacttgtaatcaaattcaagttttcatgaatgggaggaagtacctccatggctgaatatttttctgcaacttgatcgagcatcaattaagttcttgttttatgatttgtcaattttgttgttattacttgtttagattgatttgctactgttcttgattttcttaatttcttgattctcatatatgtgattgtttgaatcacattaaataatttttactgggcttaaataattatttttccaaagtgagtggtccaaaggataattcagatttggcgggcttacctttggaaaagttcaaaggattcaaatgggcctagtaatgtggattggacagatttatgcaagttgaagggtagtcttggattcaaggatatagctctttagaatcttggagctattataaagcatgtatgagcgatttccgttaagaaagacaatatatgggttaaatgggttaactcaatgtatataaaacaaaagaaggattggttgactatgatgctccattagatgctagttggtattggaagagaattgttcaaaccaagcaaaatatcaaatgtatgttctcaaggttagagttttagctttataatttctctattgctagaattttgttcaaagttgaatctgaatccttccccaaagtggcagttctccctgatttgggaccactattgttctctcaagcacatgtttattatgttgttcactatcaaaaagaggctagctacgatagataggctaatgaattttggaattgttctaagtttgattgtctaattgcggtgttaaagaggagatcatgagcaccttttcttttagtgctatttttcttctgttttgttgggaacatgttgcaagtggacaggtatgaacaataaaatgtctaagttgaatggtttagactaaaaaatacaaatatgggaaaaataagtgctaatgataggaatgggtgggaacttcataccaagcttgtaattaatagttttgctttcaagttgtaagttgtaaatttgttgagatcaatgcaaaagagctgattatccaaaaataatatttaatttgcatccatttatcaactaccatccatcacatctcgtttcacataaaataaatagaatatgatggaagaactacgttactgttgatgttatacttcgaatagtattattaacaaatcatatactataaagagcacaacttaataatgtaacaagttcaaagaaaaaaaatattaattattcaacaagctagttttgttgttgcacaaagtaaataaacatatataaaaactaaaataattattaatatacatcacataaattaatttaattggggtttttttttttatgaaataataacttcattgaaatattagcattttgaatacaaaagggcttttaaatcagcccaaacattatgctcaaagatgctacaaccagggaggaattgagaatatttagcaatagcatgaggtactcgatttgttgatcatctaataaaacgtaagtgcacattatgtaaagaagataacaaagactgacaatcctgaataagtaaaccaaaattggaggacatggcttggttacttcgaatggcttggacagaaagtaaactatcagtttcaatctctatattaagccagttcttgctcttaatccagctaagagcttctttaattcccaaggcttccacaacctcagctggataaatgcctccttgaaagcatgtcttggcttatattaacctccctgagctatctcttgccactaaaccaaaaccatatgaacactcttgatgaaaaagagcaccatcaatattaatgttgatttgattcaaacttggttttatccaaaactcagacccatcactattattttcaatcaacaatgataatagagtagaatttttctgagccttcttccaatggtcaaaattaacagaagctgaagttataacatcatttacaatggaggttcgtttatcccaaacagcttggttacaggctttgcacaccacccaacaaagcatggcagcatgacaaattaggccaatatcagtgattgcagcagagctcaaactaagtaccaaacgacgctgagatatccatttttagaggtgtacagaacacaaaccagcaagccttaacaaaatcacaagtgagcaggacatgtgtggttgttttagcatgagtattacacagggcacatagctgaaacctgcacatgtttggtgacgagattaagacatgtaggaaggcattcagagatggcacgccataaaaagttaatgactttgggtgggatcttcaagtgccataatttttgccaaaaaccagggttattggggcctggattttttggtttttgctgttgcagtagcaaataagcactatagacagtaaaaagtctcgatcgttcctttgcgcaagaccaacatcctgaaccaagaacaggtcattaataacattaggatcccatctttgatcatcaacttgaaacagagaactaactgtgttattgtatagaccaagatgtgtagaggtaatgaatcagttgtccgaacttggtaaccatggctgtccaagaatgttagtagtagcaccattgccaatgacacgaacaacacctaaacaaaccaagtcttgagcaccctaaatgctacgccaaacaaagcttgggttatgtccaagttcatctgaaaggaaattagaattaggaaaatacctagctttggacactcttcccacaagagaattaggtttacacaacaagcgcctaccttgctttgcaagcatagcaagattaaaatcatgtaagtgtctaaagatcatgccacgctcctcctttagggcagccagtcgatcccaagacatccaaataatactgcgaccttagttttgagagctatttgacagtggtgtatggggccaatgataatgagggaaggagactattatgggctgacctgtgtggtttgagaactaaggaaaattggcttgtaatgggcgatttcaatgccatattagccaaagaagaaagagtgggacatagagtttgttatcatcctgatgcagacatgcaatgtgtttaacagtgtcaaattgaagatgttaaagcaactggctgctactttacatggtctaataaacaacaaggaagagacagaatatgttcaaatattgatcgaattttagccaatcaagagtggttggatcaatatccaaatgatgaggcaatgttcctaaatgaagggacttttgatcacactccagccattttatccttacatccaagatggagaagcgggaaaaaaccttttaaatattttaggatgtggtcttctcatcctaattattttaataaggtttcggaagtttggcacaaggaaatgaggggaactaggatgtaccagttgataagaaaattgaaggagttaaaggctacacttaaagagatcaatagagaaggattctctgatgtccaggcattgtttgaacaatcaaaagctgatcaaaatgacctgcaagataagctcccacatgaccctttgaatgctgatttacatgaagcagaatcaaatgcccaagagaagtataatgctgctgttaagaattatttctcctttctccagcagaaggccaaggctgcttggattcaaaaaggggatagcaattctgctctctttcatgcgagcatcaagcagaggcagagacaaaaatagatcttgtctattgttagagaaga

SEQ ID NO: 239009 - DNA, 5022 bp, Cannabis indica
aaaatagattaagtatttgtgctgacaaaaaaaaaaaaaaccaacaaaacaaaactcttgaaatgtgttgacttcttattattaaattacaaactagctcccgctattttggcatgttgtggccataagtataacttacaacaacacagactcatgtattacaacggaaacgcctttctgacacgtgtatcacaatgcgaagcttcaaaagaaaacaattatgtggatttttttgaattgtgttactatttcttacaattaaataaatgaataattcttgctattttggcatgtgcaggccacaagtattactacaacacaaagactcatgtatcacaatggcaacgccctcagattcatgtatcacaatgggaaccccccagtgcatcccaacaagttgcaaatcagcaccttcccaacattgcttctgaacgtatatccaatgtgaatgggaattctgggtatctagaacagaaggatcaattatctgaaccagagaggtgcatgggatgtggcgggtggggagttgggcttgtgcagatgtggggatactgcaatcactgcacaaggtaaattcctggttccctgaatttagttaaaatgaaatggtcagggcttctcatattatttaaatctaaagattaatactgcattccaaaatggttattgtagctacattagagttttgttcatgggatgatgatttgaattatttagtgcatgtgttgtcgccgctgtttttgtgttttggtttttgtttttttctttttcaaattctctttccagattattcctcaataacattttaagccattttgactcaaatgctctcttgggatctacattcagactggattctactgtgttttaggctgactcgagtgaaaggaaaaaagacaacttttatggagaaaggtctttaaaattaatacaagtactgtaatagttctcatgtgagggtatagtttttgaagaataataataagaagtcttgtttgccagccataacatggttaatgttaaagggcctctcttttttgcattgcggaaaggtgcaattgaaagtacaagaggggtaaaatataaattgttgataaaaggaaagcaagttgtaccagggccagcatgaatttttgctttttcattattattcatcatgatcacgtttcccaatttctaatgatttataatactgttagctgattgcttctgtcgaagtacgttggtgctaacaggaaacatactattgcagagtatttaatcttccgcaaagccagtttttgacaccccatgcaaataatcattatcaagtttgcaaaccagcagaactgaaaggaggttctgaaaaaaaggcctctattcagaggtactgtcatttagtgtgtgtttttaataaattttatatgtcttctccctgttaaaccaagatatatctgatttcagcggttgaaatgtttgaaaactgaacatgatttggctattttttgaaaaaacaacaaaaacaaacaaccaaagaaacaaaacaaaaggacaaatcccttctcccatgtaatacttgttttaattgatggcgaaaagatgacaactggacatgaaggggtcagaatgtcatggactgcaatacaaataaaatgatgtaaaatactaaacttcatcagaatataagcaaacaacaggcacataaaagtttactaattcacactcagttgtttgagggctttggttttggtaaggtaaaaatttcacctatgggtgtctcccgggttatgaggttgaggggcctaactgaactagagcctggctggggtggaagcagtaattcaaatagtgattgaatttcttcttggcgtgaataaccaagtataattgttaatcttctgtggaaggttgttacatgatatatatatatattcaaaattttctgaaactaaaggaagctgttaccttgccagtgtatgtagatttttgaaccatttcttgagagaatttgttgatttaactctggctttttaggtccaattggaagcctccgatgggaaaaggaaataaaagagagagtaagaaacgagcttactcagaggatgatgagctggatccaatggacccaagctcgtattctgatgccccaagagggggctggtaagtttcaatttcaagtattctgtattctttctctattcctgacgatgtgcctgaatagttgctgttatttgcagggttgttggccttaaaggggtgcagccacgagctgccgataccactgccacggtatggtcactgccctggtttttaagtttttcttttatcttagaaaataaatgaataagggtaaatggtcttaatcattaaaaagtagtatcctttatatctttctcaaaaatttgctgctcacttttttcatgaaagatattataattcatgttgcagagctttctttgcttctttatcgccttatttgtatcctggctatacttatattcttaatacatctctatcctttgttttaccgaaattattgtatttagccagagaaattattcttgcaaactggtctagatttcataggaatttcatggttatttccttatcatatgatccaggatgacactaattgaatgataaaactaatggcctcgtggggttatcttccttttaggctatagtaatatttaaactgctttgtacctgctgtttgtttttagctgttgcaactgccaatgcaaactctttaccatttacccaatccacatgaacattatgaattcagttctttatcctgaggttttcgagctgcaagtaaagattttctatatttatgtgaaatttcagggacccctattccaacagcgtccttacccatctccgggagctgttttgcggaagaatgctgaagttgcttcacaaaccaagaaatcaggttcaccctttacacctatatccaaaagaggagatggtagtgatggacttggtgatgctgattaagaagccatttcaataaataatatgcaaagttggaaggcaaatgtgccatttgtttctaattgaggaaagaaatgtaatcacaaacttccagtattataaatatcatttacttgaaatccatttttccagtacttgttagtgttagcctcgtatttggttagatttcacggccttcttttattaaattcaacatgtttgtgaaagctaaaagcaatgatcacagcacacatagtgttcggcttcggcctctttagagaccgaagcttaggctttaaattcagcttgtttctgtatagctatgattggtatgagagagattagattgtgggataacatcactgtcctgtttgacacttaatacattgggaaattgctttatctaaaactccagataaaaaacatcttgtataatgtcactattttaaaaatatgttattcaatcttttctaaaattgtttctcttacaaaatttggagtggcaaaatgtgttttgacacatgtaaattttataggttagggctagaaaaattagcgttgcaacttaaattgcaacaaaaaatcgtatagaaatccttattgtaattagcgctgtaactactttagaaacccaaaccgtaaatttgaaaaaaaagttaaaaaaacagtaataacaaatatgttagtaaaaataatagaaaaatgttaaaagacatattagtggtacttagcactctctaaaatattatatcactattggtgcatttaagtattgagttttatacaatttaatgttataacttttatgcaatattgctagctaattgtaagacactattaatgtctaataaccatgctaagaccatctccaatgggagatgtaaaaattgtgctatatttggtacaattagtaatttggtggtaaatttacactaaattttagttttgtgctgtaatgcacaattgcaaaattttgatgtaaaatttaatatctaattaatgttttattaaaaaaaaaaaactaataactttataatcaattttattattattttttttaatggaaaattcatctttattaaccattaaactccgctaccaaaagaggtaacaaatcagttggaacagactccaaaatgaaacgacgatcaaggtataaattagcggctctagcaaagctatgagcaaccctatttgctgaccgtttaacaaaataaatagaaacattagacaattcacttaataaagctttacaatcattaataatgctaccaaacaaagatatcatattagtagcactctgtaaagcttgagtcacactgaggcagtcagtctccatatgcagtcctatccaccctttctctttgatccagctaagggcctctttgacccctaaagccccggcaacaacaggttgaatgacaccttgtttgagcaaagagcctccctccacgaatagacccttgtcatctctggcaacaaaaccgattccaaaactgcgacttccttcaaaaattgatgcatccacattgaccttgattctatttaccggtggaactgtccaacactcagtaccgtcacctgtctgtgaaccagaccccgacgactctaatccagagttctgagcatttctccattgatcaaggtaaccttttgcgtacgcaacaatattatcagccgaaaagctcttaccattccaaacaagatcactccgtgctgcccaaatcgcccaacaaagagtgaccaacaagcatttctgctcaatatccaacaccttaaaacaatccatacaccagttgagaaaatatgtacctattgagcaaatcgttacaattcccactctgttccacaccagttgaactctttgacaagtaaccaggcagtgcacaatggtctcatccgctctgtgacaaagaggacaaagaggacaaagaggacaaagagaggagacatccacatgcttagtcctcaactgtgtcaaagttggaagacatgccataccagccctccagagcaaattcttaacttttggaggaacttttaaactccaaagtttcttccaaa

SEQ ID NO: 239010 - DNA, 3134 bp, Cannabis indica
gtaaaaattaacccaattttaatatatatttttttgggtaagtttcccaaaattattttcataaaaaaaataaagaatctacgagatactcaaggtggctttagtcattaagccgaatgactagccaagacgttaatgcctgcatcggaacgaccctgagctgtttcagtatttgcaacaaaaccctaataaaagaaaaaaaaaagcgccaaataaaaaaaaacaagtgaaatatttctataactcacaacagatcaagtaagacttcctccattaaagaatcccaaaccagatcttccaactccaaatcaatctctcccatttcctcatccaaatttctccattttccatttctttccatatccctggtgtaagcctttcttccctccttaacctcccatcccaccaaaacttctctcgtcggagctcccaccgtccaatccactgctgatttcaccgccattgcctccgcaaagccctttgtcgatgctctctcctccgccattcgctctctgaagaattcgaacattaatttttcggtcgcagtcgaccatgtcgtagtaccgatgtttttggtgagtttcgtaaccagttcccgcgctttttgatcttcgatttcatcgtcgcttgattttttaatcttaactcgatcgtaatcgtctttgatatctgacattgcgattattctcttttccagatcgactggttccagttgagtgaggttctcgagccttcgaatcttgtgctgaagattctgtttctttcctgcaaattcaagattttcggtaagtttttcttaattaatcaacttgcacacatatgtatgtatagagtacaatattaccttccaagtgagtgactttgctattgaatggagagttagtctcatcttgatcatcgtcttcgaatggacaatccaacacagagacgggactgaattgttccttatcttcttcatttggccactcctgaatataattcattataatcaataaagttaaaaataaataaattaatgaaagagagggagtaaggaatttttctcaagaatatctttattgtcctttttagcacaaattagattcaacatgatttgattgagatgatgataatgtcaaataatgtcgtatgggctcaacatgttattctaaggctttgtgaatagcatccatgtacatgtgctagattttagtgggatggtgatgatgctttagggacttacacctttttaattatgttattaaaacaagcttgacgcctctatgatatctaaattcccttgctactaggattttgaaaggtttgtatcataggcataagccttttggttccttggttaaatctaaaaaaagttcttttcgtttggaagaatattttaaatcaggtctatctggaaagttggcgatggtaatgatatcaaagtttatgaagtcatttaggttccgatgtcttcgaattttattgtgttgtcacctaacctattcggtgagggaattacggtgtcccattgggactacttgaattgatcaatggtctttttgctcttgatgaagctacgacaattatatctgttccttggcctttcttactgactcgagatagattaatctgggagtatgataattctgacttctattctgttaaaagtggttattggcttgttatacgcaacttcggtgtaggtcgtgcatcctcctcaattgggttctctggttgggggaaaaaaatttgttctcttaatcttcctcccaagatgaaggcattcacttggcatatttcttctaactggattcttactaaatgcaactttacaaagcacggttattgacaaatggtgtatgttaaatctcagttagaaactacccaccatgccttatgggggtgcccttatctagttgaatgtcataaagtttgagatatttctttggggatcctcttgctatttgtcacgttttgtatgatttcattcataagttttttgatcctttacttgtggcctctttagagttgattttggtgattattgcgaatttggtttagtgtcgtgattttcgacaactctcctagtgcttctctctcggttgggagcttgcagtcctctacaaatgcatcttctagttctgtttgggtgttgtctggtagggggacagggatgatcaattcttgatgttgctctcgacgcttccattaacaaatgtggtttggatatagtggttcgtgactttataggtgaggttatggtttttgctgtttggcacattttgggaacctttttttcctaaaatggcggaagatttagctttaaaaagtattgccagctaatgtcgttaattgagttttcagaatatgatatttgaaactgattatttaaatgtggttttagaaatttaataaccaggtttgatttttgtagatttaagacagtttttttgaatttcactgagttttcattctattctagatctattaaggttgtttgcctattttttttttctttggctaaatatgcattgtcagaggttattagcaatgtgtagtaacttgattatccttcttggaatttttcttctcaaatatatataactttatatatataaaccaaaaactaaattttaaatattagaataaatagcaacataagtactcaaaattttaagtttgtaaatggtataaatttaatgtttatttttagcggcataagtattcaatatttgtaaaattataatttttttttcttaattttattagtataaatctgttattatcttaaacatggtacatataagttttagattctatattattgggtctagacataaacatgtaatatcagttataatttagctggaaaagtttacttattattcgagactaggttggggtgttcatccaattcaattcgcactattttgctcatagtgcatcaaatccgcattaagtgcggatttatattttggatctaatctaatccgtaaaagtacggatttgatcgattattttggattggttattttttaatattaaattatttaatatgtatgaattttttttacataactagcaacaagataaataaattattgttattttatgtctttaacataaatgaaaataaaaaaataacaaataacaaa

SEQ ID NO: 239011 - DNA, 1443 bp, Cannabis indica
agaaaagttgggtcatcaaataaaaggtttatggggagcactataaaagttactgtacgagcaagtgcgtgtaaattgttagcaaattgacgcttagtgatagtccaaggccacttgtggtgaccttgaaatgcctcaatttggttaccaaagattggagttgaggcacttccataattgtcaatgccccaatggtatactcctgaaccaagatcagccattacatacccaaccaagccagccacagtgggctcgacccaaatatgcatactagacgcacccactaaggacttagctagagaaatgagcaccgttgtgcaccctgatgccaaccacacacgatgcaaccatgtggacttaagacttgggtcattggcttgaggtggggttttgcttgtagctagaaattgtgtagggggcacagatggtgattcgatcactaatcgatttggttcaacttttggtttagaagatgtggtgatcaagcaatgtacccgagtgatgactctaggagaagggcgtggatgaaagtagtgatgagagctcaaagggagcttgttttggttaatgatggacattgaagagggttcctaaggtaagataaagtaatgagaaaatggcctaaataaaatgaattttatatggtattgaaatggtggctccaaattaagatgacatttttgtggtgttcctacagtatgcgtggtgtggtgcaattctctagaaaaaggctggtagtgagcaatcaatttgtgtgttacataatggaacaagtccccaaattatatatggtgttttcctatcctacaagtcaagtggcaaccttttttaattaaaatggaccatacgatttggcctttattttattaattaattttgctctttcatatttacggaattcaagtgccctatagttaaatagttatataacgtgtatacacactacattgctttaaataattctattttcaaaatttagaatcgtggttatccaaaaaatttattctaaaaccataaaaataataataacaaaaaaatgacatcgttattatttattttcaagagttttacttattatcaattttagtcctaacgtatttttttattagaaaattagggtataagtccttaaaaattcatgtttgatgcacataagtttccagctttaaaaattgacactaataatccttaatgtcacattttttgtaagttcgtaaatacccaattaataattccgtttgttatttttaaatttgctacatattaaaaatttagtgatccacatcataaatattatttgaaaattaaaaaaagatatatttttctctcttttttttaaaattttttttttcttcttcttcttctcgcttaatgccgattttcgcgtgctaaaccggttaccaaaaatccaccaccaccacttagggctgagcatcggtcggt

SEQ ID NO: 239012 - DNA, 3762 bp, Cannabis indica
aaaaaaaaaattaaaaatagtaatgcataattgcatataattttaattttaatatctacagcacacgatactattaaagaaaataataatgggatagaaacaaatattattatgattatgattttgtgttatttggtcctaatcgtgccctaatgttctctaacagacacgtggctgtattatatacggacatttaaatacttaaaaatagaggtataatatattatgattggttaataatactttttaaaaattaatatattcaattatataggatgagatatatttaattttaaacacaatttttagctaaaatagagaggagaacttaaaaaaataagctccaattatataaaaaagctgacttagttctctatttttttgctaaatttttctaatagtattttaatcaaagataatattatttttttttattttataaaattaattaatagttgacaaatttaaattataaaatattattaaaatgatgaaatattaattaaagtaagaaacataattagagcaataactatactattttaattaaaaaaaataaagaatgctattaaagataaaaaatattagacagtactaatacattttaataataatattgtgaactaaaaacaccgccccatttaattaacttagctaaaccatcatgataatttaataaattatttttttgaagaaaaatttaataaattatttgattattcaaagtcttacatatatacaccagataccatatatattatatattaatatataatatgaagagatcatcagttggtattaacaatttattgttaattaattagtcttgataaggtgacaaactgaggatgtcattaattattatattttaatttactcaactatacatgatattattattatatgtaattaattattcgattagaaaatagtagtgtgctgtgtttacgtacatatatgattagtacgaaataatctatattttattcaagctttttgtgttgatattaaatgtgtagtaaaggaggaagaataagtaagtcgttgaaatgagttatgatcattaattcattcttttctgctagaaaaaaaggtttttttttttgttaaaaaaaacacaagagagacaaagtaggagtaattatgtgtttgttgatcagttaaaataacatcattgaaaaatagtgaaaaaaggaaagaagaaataaaccctgtgaaaattaaaagatctagtctagatttaaaatgatgaatgttattgaaatttgagttcaaatatttataacacgtgttcttcatttttcttcacatatttaatgaatacaacatctcatgctccaggaccagtacccaagttttgactattctacaaaccaacaaataacaatacaaagtactttattttattactagctattaaaaaaaaacaatggttttttttttttcattcgatttagtaactaaagaatgcatatattatgtgtactttttcttcaggaaatatattatgagtacttgggattatatttatttacttaccatatatatatatttaaaataaataggatctgtcaccttgaattataattaaagttttatctaatttttatttttaatttttgtaattttttttctaaactatcaaaaatcattgtatacattctctctagttacaatcatttcttcaaacattttgttttagtaggctgtagaaaagaaaaaaaattaaacccttatttaaaaaaattagtatttttaaaattaataaaaaatgtgtaatttttaaagggaatttttttaagaatcccaaggcttggtgggtcttaagcacaggcctaactcgtctatgcttgggcctacgtaaatctagcctaactcaagtgtatagacaaaaataagtatataaatagtagtctaatatcttatggacacttgcgctaatcttaatctcagctatgcaccttaggtatggtacaaacaaccctatatgtgactagctctctagaatttaagaacttgtagattgggtactcagtattctatccacgaggtagagtggtcaatgacatttacctcagcatttgggtattcaatacaccaagacaagttatggggaccactctgtgttcctctatttcttaatatattgttaacttagccaacacatctgcaaatgcattctgatccctagagacctgtcgggtggtatatcttttaaaattctaaagtagctcctgagtcgtgagccttggagacagaagcagtcatctttcctcctttaatttgataatcccctgatatttaattcacaactatatgtgtgttgttgtaaacttcaatgttctagaatccaacttccttggctaaatataaatcaacgatcattgtttcgtgctccgcttcattgttggagaagacgaattcgaatcaaatggcactttgaagttggtgcccttgaggggaaattagaattattattccagctccaacacctctttccgttcgaagtttcgtcaatatagacttttcaaatcacgtgcgagtcttggcactagttctttcgtatcgtcgtcgatcctagtacgtttccacaataaaatcggctaggattgacctttaatttatattattggttggtactgaatattgaattggctgagcttcatgactcactgaaccagtctccttaagagttttggtttttacaagacttaactgagagggtgatttgtgaatatcttaatagcacgagtctaaaactacgatcttaacttcagactcataccattaaggtatatgtataatttatttacatattctaataaattatgtgaatatgtataattgtatatatattcttagagatattacctgtatcatatttaatactaataagttagattttaaatagcttaagaatgttaaataaatacttgtactatccacgtacataaactattttaaaatgcaagaaagagaatatttgcaatgatataaatagttatggaaaatttggcaaataaaagaaaaataaggagaaaagtctacaagaatcaagaagaaaaattatagatattattttttagtagtacttagtgggttgtaatgtcgggtgaagatttgaaaatattaaaattagaaattattagcatacagtctatggctctatgttataatataatgagtaacattatattaaaaggaagtttttttattttttttcattttttacacttttaaaacagttttttttttttggtatttttacgaaattctacattaaaatctttattgtaactagcactgcaattactttagatatctaaaccgtaaatttagaaaaaaaaattaaaaaataatatataaggtaattttccatattaaattattatgtaattttattaatagtaatttgtaatttaattgtgatattttttttaaaaaaaaaaaaacaaaattaaaattaaaaaaaaaataaactaattaatcgttcatctaattctcaaattattttacaaaacaaactaaaataaactgattgcagcatcacacttatattcagtttactccactattcaaaagacacaaaaataaacagtaaaccataaatatttttacatttaatacatatgagacaatattcttcaataccgaccaaaccatacttaaacttagagaaccgacagtcctagtcagagaaagaacaactaattgatatatattgagtacaccttatcaaggacggacccagttaagttattg

SEQ ID NO: 239013 - DNA, 5021 bp, Cannabis indica
ataatatttatattttatcaaataaaaataaaaagttacccataaatttctcataaaccaagaatttcagttatataggcacactttatatagaatagatatactcatttgatgatattgtttaatttaacctcaacttcaacacatgtaaatgaaatttataaaaattaatgaggtgtgcatggcttcaaatattattagcttcaatgataaactaataagagttcgtagaattattgtgcatgtatgtagcttattacatttccataactccatgcacgcatgacttaatactaagttgtctaagaaaatattataattttcacacgttatctttgaaaattataggattcgttgttctatttgctcgtttattcttgttcgcggctgggatgctattttgctcgcttgggatatgattctactacatgttgagaatcatgagattccaactcaaaacccattgatgatgagtggagtaatccatgttcttatatatagttcaatatatactttcacgttaatccatgtgggagtgggacaatattctctaataatcttataattatatgtttgtaatttttcagaatttgtagtatatatgtttattgaaattttgatgaatattttaacaaaatatagaagtgtcctagcgtgtgtaatgtggaaagagtctcatatttttgtttataaggtgcaactttaacacttggatttgggccgaagggcagcctgaatgtgccatcactaacaaaccacaatgatccttcggtatgaaattttcatatataggtatgaagggaagatgatattaagacaagcaagttacattgattatatttgtaagaaaattgaagatgaaagatgctgccaatggatcaatgcccaaaaaatatatgaaaaggagatggaaatggttagtagatttattactcttcaaacaaagatagcatagcatcactaacttcttatgtattttttttactaacaagaattgtataagttggaaaggtttgtagttgtcttaatcaccacagaacctgagtttatggccactgctgaggctttcaaagaagcaatatgacttccaaggcattattctacaatagctgaagttattaaagaagaaaaggtaaaattttgtcagataaccaattttcaattcatttatattgaaatccagtatataatgaaaagaacacacacacatagatgttagattatatataagagagcagattgttcagcttgaaaaagttctgaagacaggagagccttgttgatatgggcaagtttaagcattgtctaagtttccgaaatattgacatttctaagctcatccatttagaactttcctacttcaaattttgatgaatgaaggttgaaattgttaaataatttcctaaacacattgatagaagacactgaaactaaaatggcacctcagacatggctgagatgagatggctaagattgtagacagcgactccacgagcatgcatgctgactttccccagcaccttgggcctgaagaattcctttcgaaaaatgtttttaagggattatttataggttacctgttaaacacctgcactacacaaatggcaaaacaatttcagtcgaaaaaaaaggcaaattatgttgctaaaacttgtgagagtttatttaaaaatatcaaaacaacatcatagtgttatgtaattgcttactcgtacgaaacgatggatgatttcatagtcataatggaaagagaaattaacaatgttcctttgaagtgcactcactgaacacctcttcaccattttaatcacttcctccttcaacactcttctttcttcttacattttccatctgctaatatggtaaaatgagcttcttgcacaaaccactagccgaaatctaaagcaagcataaagctatccctgaatgtatgaaattctggttcagaacttagagtctctatttctgttgttaacaaaactaggcagtcatatatcagtttagattgaggatgtaagttatcgccaaccgtgaactcatgaacaatgccattaacctcaattgagctacaaccaggagtcttctccactcctctgtccttcatcattttccgtacctttgctgcctcatcccacatatttgcttccacatacatacttgcaagcaggatgtaattcccactatcataaggatccaactcaagaagcttataagctgctctttctcctattagaatatttttatgcatacgacaagcgaaaaacaatgcaccccaaactacagcatctgccttgattggcatgttcttgataagctcttcagcctcttccaaaaggcaagctctaccaagaagatcaaccatacaggagtagtgtttaccgcgcggggaaagatgaaatctggagctaatttgggaaaaatatttgcggcccttgtcaaccaaacctccatgacaacaggcggataaaaccccaataaatgttatttcatcaggcatcaaccctgtatcaatcatattttcaaagtaagaaatggcatcatgtgcttggccatgagcagccaaaccacaaatgatagccgtccatgtcaaggagtttcgttctggcatattctgaaacacctgaagtgcctttgtgatgtttccacatttggcatacatgtcaactagagcagttccgaaggaaacataagaagaaatgagatgtttttcaacgtaatgatgaatccatattccgatatcaagagctccaagttgtgagcatgctgataagcaaccaaccatggtaatctcgtcaggctttatgttactagcctgcatctcatggaacagggctagtgcctctttaccacgcttagcttggacatatccagtaattagtgcattccatggcacaacattcttctctggcatttcaaacaaaagctttcgagcaatatcaaaaaacccaaatttggcataacccactatcattgtagtccatgagacaatagttttattcaccataacaccaaataattcttcagctgattcaagatcaccacacttcacatacatatccatgagtgcattgcccaaaggggccgttaaatttaatccgtttacttcaataaaccgatgaaattctctacctttattcaaatcccctagttgggcacaagaagaaaccaacccaaccattgtaacttcatccgccttaacttgattcgcttccatgtcttgatacaaccgtaaagcttcagatgctagtcccgcccgagcatacccattaatcaaagaattccaagaaactaaatctctaacaaaacttttatcaaacagttcgcgtgcttcatccaattctccacatgaaacaagcatatgaatcatagcattgtgaacaaataaatcagaacaaaaacccaattgcaacacatgcccaagaacttgaaaccccatcaaattcgactgcaacaaagcacaaaccttgagcagtaaaggataagtatacttatccggccgagacacgccatctccaaccatcctcttatacaaaacaacagcctcccacagtgattcactctccaaataccctctaatcgctacattccatgaaaatacatttgggttttcagtgttgaacaaaattctggtgccgtaatcatgattcttcaattgggatagcgaacaaaaggcaataaggcgactggaagcgaatgggtcagcgatcaagccagtgatggtcatttgagcttggatttgcttcaaatgagaaatggatttggaattttcaagaagagcaaggagtggattggcttgaacaagggcatgagttacattccaattggtggcgggtttgtgtttgtgagatggaattgaagagcgggtgtgaatgagagaatgaaatgggtatgagaacgacgttggcaatcggcgatgagatctgaggccgccgccgcctaaccccgaaaaggccaccgacgttggcaacatgcaaaattggatgtaaagattttatggaggcatggttaagtcaaacacaacaactacaaaacaagaaaaagaaaatcctcaaattcttgtgcccctcattttcaagtcaaataatccatggaagacatgttattataagaacaaaaataaagcatctaatatacctgaagattaaaacttttgttcaatcacatcataaaaaataatgaagattaaataagtaatctatatcaagtgtttaagggacatataaatggtatctcaaatacaagttcattactcttctcagtagctagtacattgttcttcaaaatttcaataattgtgacaatagttattatcgatgcccgtgagatgaagttaaaatcaaaatctttataatatgcatggcaatgataacatatagcatgaatgaaaaatggtcaaaggaactgtacccattccgagagaagaaagctcggcctcattgtgtttcaatgttgctatatgcccctctgcatcaaaaaaataagaaattcaatcacaaagccttatctgaatttctgcaatatgaagaatcaaatcttggaaaataataagctagttgattggaatttcatatcatttaagtgtcaacagtagccaaaagaagaatataatagctaatattgatattggagtgataagagaacaagttaatggctattcaagagaccaagctctctcccaagagctaaagctcacttgactaaatgattcacaccccgaaccttttctaatacccttgtatatatactacctcaataccccattacaatgacccatttaccctcattatttaataccctaaggcctaacactagttttcaagtattcaaacaaaggctgaggcctgagacaacagactacctattaatttgatcattgatgggaaaagtaaataaagaaaataagtcaaacttgattaacatacattgaagatttaaatctttaattcttccgtttcaatatttatcgaaaagccagcaaaaggtgaaagcaaacaaaataatctaggcctggtttttgtttc

SEQ ID NO: 239014 - DNA, 920 bp, Cannabis indica
ctctctctctctctctccatatcaactttttttgtttatgccacgtaggatgctgacatggcaacaaaagaagccggcttttgcttacatttacagtagtaagaaagcacctgtggaaagcagacaactctacttaggtgggtcttttgcttaaaccatacgaagtatatattatcagctttcatcaccgtccaacaccgatgcatacagcaaaactccaaagtcagccaattattctttacatatataaatatatatcatgccatttcattgaattccatcatgtggttcacagtacttgtctatatacaatatattatatttatatgtggggtatgtctgaaaacttttctggtagaatgacaacaccccaatgtccagggagattctttgactccttcttttacctttttatcttggagttggagtctccatttttttttaaatgttttagcattggattggagtgtccattttcttgtgcttgagttgagttatacatttttgttcattgagattgaaaacaaaaccgaagtggcggcgccaccgaattatcaaatgttgctatcgaaacagtgtttgacaaaatactacctactttcttggcaagattgtattgaagttgatgataataacatatttgtttacatttatttttaattttttttggcataatatcttattgatcggctaaccaatactttaattaattaaagtgccaaatacaagtggagaacttataattattgagaacttgacaccaatattgccaaatattacataaagtgtcaaatcggttttcataaaaaaaaaaaaaatattaagttacatattttatttaataacgatagaaatcgttatcggggctccaccttataagagacacaacactgagtagtagggctactcataaaatagtc

SEQ ID NO: 239015 - DNA, 9556 bp, Cannabis indica
taattaagaaagctaattttccagcatatagcaattaattaactcctcgaccccaacccaaaagcaacaacccgcagtcgaggagttacaggagatacctatccacctgatagatccaaccaagactacctacatcggcatgggacttacggggaactggaaggaccaggttgtaagcttgttaaaagaatattttccggttttcacatgggaactctaggatatgcccagaatagacccaactataatatccacaaactaaacgtgaacccaaattacatcccggtcaagtagaaaaggaggaagatgggagcagaccaaaacaaagctgtaaacgatgaagttacaaaaatgctagaaaatgataccattgaggaagtacaatatcctacatggctcgccaacccggtggtagtaccaaaaaagaataagaagtggagagtatgcatagacttcactgacttaaataaagcctgccaaaggacagtttccctttacctcacattgatatgataatcgacgctactgcagggcatgagttgatgagtttcatggatgccttctcgggctataaccaaataatgatgcaccccccgacagggaaaagacatctttcatcactgagagaggaacgtactgttataaggtaatgcccttcaaactcaagaacgccagagcaaattaccagcgaatggtgaataaaatgttctctcagcaattggggctaaccatggaagcttatatcgacgacatgctagtaaaatctaaagacggatccgaccacgtccatcacctccgagaatgcttccaaatcctccttgtccattcaatgaggctcaatccagctaaaggcgctttcgccattagttcaggaaagttcttaggccacttggtaacacgtcggggagtggaagtgaatccagatcaaatagaagcttttcaggcaatagggcaaccccgaactgtgaaggacatacagaaactaactggaaaaatagctgcactaagccgctttatttcgaaactctatgataaaagcctgccattctatgacctacttaaagggaactgcaagtttaattgggacgaaaagtgccaacttgctctggaagcactaaagatgtatttgacaactccccccatcctgtcaaaacaagagccagggaaaaccttgcttctttacctctccctatctcgatatgcgaccaactcaatgctggtacgagagcaaggaaaggcgtaacgaccaatatactataccagcaagagcttctcgggagagaaaagcaggtatctagtaatcaaaaaattggcctaggccctaattatctcagcgagaaaactccaaccatactttcagtgtcacacgattgcagtaatgacgtcgttcccattgaaacgggtactgcataaacctaagatattcgggaggctgatgaaatgggcggtggaactaagtgaatttgatatgcaatacctccctcggactgtaattaagtgacaggcgttggcagatatccatcaattgggaaggcccataccgcgtgatagggtcgacgggcaaaggagcatataaattggctgctatggatggaaccgagatgacgaggagctggaacgcaagggatcttaagaagttttttgtataataaatataactagaactatatgttactctgtgtaagaagggatatgaataatggaaggaaaggattaatcagaattgagcatattataagacctttcacgaaagccaaaaggtaagaaaccgaacgagccgcattcacaaaaataagacagtatgaagtaaaagacagataatgaaagtgtgaccagaaaactagtcgcctccacggagttagacaatgcaaaaaatgtgtgtacatgaaaaagagtaaattcgcaagcacctaaaaattacacaatattaccaaataaaatggagaaataagaatgaaagcgtaaaagtccattaacaaaataaaggttgagttacataacaccctcccctaacactatattcaaagtttttgaacacagtataaactattttcaaaaactaggggagtagtggcaggataaacactatgcgtatacaaaatttccatgcaatatgtacccataccaaaacgccattacaaatacaaaaaaaaaaaaacacatacaagtaaaagtaacaaaaaatagaatttctttgaagcagcacctcctcaaaagccattcacataaaaaaaaacgttctcgttgttgaaaggccttacgcatggcgatccatccccgacggttgaaagaagtaggaggttgaatgatctcagaaaccacccgaggcgactcttgagggaaggaagaagcagagatgcaaaataccgatgaagaatcataggctaagtcattaaccttttcaacatcctcagactgagcagcaactccgagttctgggtagtaggctgttatcatctgagtcgaacttccctctgatgcttcaagagcttcttttatctcttctataggggtcaaaaaaggatgaaaaactacgaagggacacaatgctaaaggtggtgcgggttcaatgcgagaagaagcgtaagttcccaggccaaatgaggcatgctcaaaacagggacaactacagacctttgaaaagggcatttggggaatggggattggttcgaaatcgcaaaaactcaaataagggtttaaagataagaatgcagggtccaaaggttgcaaatctgagaatatattggaaaaagaaggatggtcctttgggtgaggtacctggtctttcagtaggaaagccatgttttaggagaaaaggaaccttggaaaacaagtacctaaatgaaaaatctaaaggaagcttttgaagaaattctttagaagaagtgccgaggtttaaaacatatttatagacaaaagtaagaagccaacatgcattaagaaaagatgccacgaggttgaacacgaaaagcccactaaaagaccaaaaccaagacacgtgtcagctaactaagcatacctaaatcacgaaaagcacttctaggagtatatatgtccttccaattttcaaggtgtctcttccgtcttttaataaaagatagtgaaataaattaaaaatgtgtagaaataataacaataataatgctaagaatgaaaggacatttaccaaaagaagaaggccaaaagttccatttataaagaaagcaataacgtttacaaaatacagcagaatacgtagtaccacacaagatttaaaattaaaataggtgcatgcaatatcaaaaagagaactgcgcctaaagacactgaggataaaaagcttttaacaaaaaaaacttagaacttagaaatagtcgcggttagggtgatgccagcacataatacataaagaaccagggattacaatggaacccctcactacccttttcatacaccggcgacaacctataggaaatccagggtgatagaagggaaccccatccctaacgcattcttccttccacctttcatttgctaggcgttcacgttccaaatccgcatcccaggcatgacgattccttgctcacatccgatgaaggtcgcgacgacgctcaacatgcaatcgaagagcatgaaactcatagatgagacatttcgccctttgttctcaaaaaaattttgaagccactcctcgccagaggacgaagacgcaccattacgactagcgcaataagcccgcatcatccttccaacaatggcctcaccaataggccgatagcgatatgaaaaagtctcagggcaagtaggggatcgatccctgacgtcaaaatggaatccatccccacttgaagattgaggaaggggagaacttggagagttcgacatttttgcaaaggaaagaaaagaaaaaggaaggatttctttctttaaaaaaagacagaggaaaaatagagagaggagaagaagaaaaaggatgaaaaaaacttaagttgtaatgagatcagtgaagggaaatgcgtgtttaaataaacttgtgaaaaggaaggtggaaaggtgaagccaccggtcaccaagacattaaatgtcaataaatagacatccccaggtgtcaagataccttaagaaaagatcatgcacataaaaataacaataataaagacacaagcaaaataaattaaggcatcagcctaaataaagatccttacaaattataaaatgaaatacgattatcttaaatggtttactccttatttcttaaaactaaaaaaatatatataataacaatacataataataaaaaggggtatgagcgttctcctcacaaaagcagctctcaagcaccgtcggcgtcatcatcttcgctagcctcgtccgagtccgaagaagtatccacaagatcctcgtctctcttaaactcggcatacctcttgaaaaacccgtccaaatcccacgaggtagacttaccctctttaaactcgaagtagagtttaaaagcggattgataacttccactaaggaatgctttcttgacctgtttggttagaactttgatctcctttgataatgaacttttctcatccaccaaagccttctttgcctgatccgtcgccttctcagcttcggacaacttatcatttaaagaggaaatctcagacttcgccatttcggttgcataaaggagagtgttgcgctcttgagtcaggacatccttttccaaattcatcccagacagattggcctcgagggaaacgaccttatcactcaaaccctgcttctcggactctaaaagtgagcgagtaagatccaaactctttttctctaattcaaggctgtcgactttactcttcaaaagcctattataaacctctagaccttagaaagagcatccttcattgcaacattgactatctcgtaattcttcttataacgggagtaaccctttaccagactctccttttctctatccgtctgtagggcgaacttcatagcatgggcacacctcaaggccgtctgataaaatacacccagcagttaggactgaacagataaaatactctaaagaaataagtcaaaaagtaaataaacttggataaactaccttaattcccgaaatagcagtatccatcaaaattgaatcccgtcccttggaaatgtaaaagtcatcatcatgctttctgacggcttctaacggagacttaaaatagttttcagccgactcctcgaaagggacatctttctgaattcggaaggtagaaatttcatcccactcgggttggcccttgaagggatggatagctaagggtggggaacatcggctggtagggaaggctgaaggacgaaccataaaaggagaaagagcaagctaagaggatgatggagaccctaagggaagagaagaagtttgagccggagaagacgacaaagaacccaggctttggcccaaatcgattgcagaaaggttctcaagatgggaaactttctatggatttgggatttccatcggcaccaaacccctagaagcccctctagcatcaccaacgtccgacgtgatctctggggggacattaagtagtgtcccgatggcgtcgttagtgggcgagtcatgctgagatgacattctaaggtccgactgattggctacctcaagctccgttgttttgctcttcttccctttgcctttatgtttaggagacttcgccatgagtctcttccgccgggcagcggtttgagcctcgatttcttcgatagtcatctcacacaacctcattttaggcagacgagggtaggtctctgcaaggtgggaatgatcctcagaaaagtctatcaaaactggttcgggtgtttgttttaagtgcttcaaagcgcattttatgaaatcaggccaaatgaaataagaatgataaggagtgtggatacctagggagatcccgagttcgataggcccgatggaggactcgattaaagcatcgttggagagaaggaacttaatcgaccgaaactttgggtccaaggatgtgaccttacaaactttctcagtaaagatatctctgataacggtccacgttgtcggcggaagctgcacataaacatcatcgtcaaaacaagctacaaattacttaatataaataaagacaaagcaaccgaaacaaagaaaaaacaaacaaacaaaagacaacaatcgtcggaaacaaactcaatagggcctttagcaaaaaagaacttatcattccaacccgtatgagaggtccctaagttggtaataagggcccaattctttcaaggccgaagatggtaacgcccttgctcactctccatcaatgagtaaaaatgaacgacgtccgatacctcccaccgaactcccgccttatctcccaaaactatcaaacctaaaaggatagcccacacgttaggaagtaattgagcaggagcaatggagtaatgaaaaaggaattccttagttaacttaggaatgaacagcctcagcttaatttttgactcaaaccaataggaatgtaaacatagccactcgatttgggggaatcggccctctcgtccaacttagggagtctaacttctcctcccgacagaaagccacgggaagatactaaggaatcaagttccgattgagttaaaactgacagaagactcgatttgaggtccagataagaactctccaaagtaggttgttttcgcttagtcttcttcagaggaggaattgccaaagtaaccccttcggaggggacagcttgaccactgatacctacaccatccccggagcgagaccggggaacgattgaaacactaccaagacactcaacttccgggtccgcaggaacatcgacattctcgtcctccatggaaggggtgtcagagactaacaaagactcaacgaacccgggagtgatactcgaggaaagagaatcggaaactggagaggaaacgtttggatgatccacatttgccattataaaataaacaaaataaaagcttaggatttgaaatttatctaaatgattgaaaaagaacccagataaagggaagtagccaccctttcactcagaaatgatgagaaaaagatggagccacatccctggaacaaccacgattagggtaatgccggaacaagaacaacggcgaaaaaggcaataaaacccagaagggagggggttgaatcaagaatcaagtgctaagccccattaccaataaaccctaaatgttataatgacctctcctagaaattaagagtcttccttgttcaaaaaaaaaatgaagaagaagaaggaaaaagaagggggaaagaagagagatacagaaagataaaataaaggagggtaattatcaaaaataggaaaaataattaaattaagaaacagaaagaaatatatatatatatacctgggagcaatgagattcaccacaagaaagttgaaacgagcagcagagagggatcacatattagattttcaaaattggagatcttatatccaagagtgcgcggccaaaacatagaaggaagttagaggattagagggacatttataagaaggaacgattcctaatacaccacgatcacatcacaaaaaccaccatttcttataaaattgtgaatttgaaattaaaagaagacaaaagaaaactgacataaaaacttacaaaatcgtcatagatatgatagataataataaataaatacacacatatatataaatacacgtacaaagaataataatccttaacagttccaaattatgcataagcataaatggaactggggagaatagtatttggggggaaaattatgaacagaaacccaaaacccaaaacccaatgaaataaaataaaagtacaaaggcccaaataaattcgatacccgaaaacctaaaacccaaataaattaacaaaaataggaaagacccaactttgtacggcccagtcgggaccatctcccgatttgtgatgatcaggaaaaaagaccaatgccaacagaaattaggatgaagaaagatgagggattagagcttactgtctcagaccgacaaaggaagacctagacgacggatagattaaagaaagagagacccaaagagagtcttccgtctaactcgccgacggaagactcacttcctaaaaagtatagggcaatatagagcgcgagcagatcagagtgttaaacaaatgctttcgtcggaaagaggcaccaaaataaagatcggcattgcgatcttttcatttacctcaggtaggaaaaagagttccgtcggaaaaaggctgctgactaaaaaggtaagataaacactccaagaacaagacgcaacaccaccggactcggagaagatcaagaatagcagcgattatctaataactagacgtgtggcaaagtagagagagtagagagaaaagacacacgtcaggaagagaatagattaaaaaaataggccatccatgcaatcatagaacgtactatataaacaagaaaaagactacgtaaaagggatacgattaggaactgaaaaagagaggactcatataaaaaaaattgcgactgttcttggctaaaacaacatctctagatcagattattattaagttttattttgacaaaaaaattagttcagggtcctatttttacaattttagaaattacaaggtctattttatcatttaacaaaacagagggtccaatttataacttttacagaacacagggtccataatggtatttactctttaagaaataatattatggtcttagaatagtaatttatacaattttttaagtgttcatttagtacaatatattagattattttctatataataatttatagaatttatattgtgatcttagaataataatttataattttttaagtgttcatttggtacaccacattagaatatatgataaatatatcttatattttatcaaattttagtgtatattatatttttatagaatactatattaaattttgatttatattattaattgtatataaaatacatatataattttcaagtctacattaaaaaatgtaaacatatagtactatttaaaatatgacatataatataatagaaaaatgggtgcactcttaatgggtattaactatgaaagtaatattagaaaattttgactttttaagcttcatttttctatcaaattagaaaaatctctcattttgacattatatgggctgtggttgttccatcggctgaaaaaaaaaatcaagaaaaaaagctttacgacaaaaaaaaaattaaaaaaagttgagtttaacttaaacattttgtatccaaacatatttttgaaatagtgtaaaaagagattttttttatatttttttaattaagtagctaaaataagcatagaaatcaaaaaatttcttttattattcctcattggatcaaaatctaatagtttaaaattaatatttatagttgagtttgtttagtaaccatcaatgggtaatacccattaagaagtattccatatacatatatgtattataataaatacaaatattataaaataatttaggaattattacatagaaaatataaattgacactttat

SEQ ID NO: 239016 - DNA, 1627 bp, Cannabis indica
gagcttgtttcaggtgttgagaaaggagttgaattagacaatgtgcttcgaaaaacagggatcatggggattgtgaatggcatggatgtccaagaatggaatccttcaactgacaaatatttatctgtcaaatatgatgcttcaactgtaagatcatcacaaaagaaaacttctataagcagcattgctttgtgctttctttatttcctttggcgaataacttattgtgtaaactaaacatgctcaggtcagggaagcaaaggccatactaaaagaagcgctccaagcagaagtaggtttgccagtagatagaaatatccctgtaataggtttcattggtaggcttgaagagcagaaaggttcagatattcttatagcagccattccttatttcatcaaagagaatgttcagataatagttctggtaaaaatcaaggctgaaaatcccttaatttttctcatgtatgatgctacaaaaaatataattttttttcctttagatctaataatctcctgcaatgtgataatcgtgttagggaactggaaaaaagccaatggagaagcaactccaagagttggagacattgtatcccaacaaggctagaggggttgcaaaatttaacgtccctttggcccatatgataacaggcggagctgatttcatcttagttcctagcagatttgagccttgtggtcttattcagttgcatgctatgcgctatggaactgtaaagactcgttttgttgtagaaaatttctttgtttttttttttttcttagaaagccctttgctgttgatttcactatctgcttctggtgcaggtaccaattgttgcctcaactggggggttagtggacactgtcaaagaaggtttcaccggatttcagatgggcgccttcaatgtagaggtaatatcatatttatatccactgttctcttgagtttcataaacaaaaacattacctaatgagttcaacctttggcagtgtgatgaagttgatccagcagacgtgcaatcagtggctaaaaacgttataagagcccttgctacatatggaacttcaactttgaccgagatgataaagaattgcatggctcaagatctatcatggaaggtaagaagaagagtattttctagtgaagataaacaaatgatgagaacatttggacttatattatatataaattatggcatgtcacagggtcccgctaagaagtgggaggcaatgctactgagccttggcgttgatggaagcgaagatgggatcgatggtgaggaaatagctccaatggctaaggaaaacgtagcaaccccatgagaatcaaagcttttccattccacttgtttgttgacttaaactagattgactccataatcaataactgttaataaaataaatctcacttaaaaatatggtcttcgttattgattattgcatcactattaaattcattctataaaaactaactgcaacaaattagaatattattgaatagtacaccaaaaaaatcctcgtattgtgtggttataaatatatatgatattttatgtatttaaatttacattaaatatccttacaagaaaaattaagattaaaatattcttatataaaaatatctacataa

SEQ ID NO: 239017 - DNA, 3112 bp, Cannabis indica
attgtgtggtttaatagcacatcatagtatgcaaaagaaagtgaagtgtgtaacttgagagtgtacctaacattactgtttttgaacatgaaattatatctaatgttgtagctcctataccgaaccttaatgttgagttttcgaatatgtttatacttaacattaattgaatacatattatgttgagttttcgaagtacaattgaagtaattaattaatcgcgtatttagagaacataattttaaatacaataattagtttatataatatatttttgttaaaaacattaattgatattatgtactagatattttattagatttaaatttggggtcatgattttattttgtattggtgttttttatagagattttggtaaaaatagttgagtttgcacctaggcctatatttaatattttttaaagtaaattacatgatttacatcatatttactaactaaagaggccaagtactttttttttcttttctaaatagtgcgaagtgaacaaaataaagaggccattttgtgtagaaccctttatttttatcactagaccgcccttggtgttggtgtgcttgactacagaattactcaatagaactagccgtgatttcttaaaatgtcaatgttctattttcacaaatcatgtcaatcactccattttttggtttattatattagtattattttttaatttttttttatagaacttggttgtattcggggccgactgaagctatgggtgagtagggcttatatttgaatcctcttagcaaagaggtgtccattgttttttaatatccatttccgattttaaaattttatatttttacaattttcttttaaccattttcacgtatatgacaaattaatcttcttttgctttcttcatgttaattctttagcttgatggaaaagcttgtaaaactaattaactaattaattcttaactgctgaagttcattgatgcctacagatagccgtactgtggatgcctatactatgataagaaatataataatttttatgttgcataattttacgtaattgttttattttgctaatttttagttttaattttagtgtattggaaacttcaattactttttgctaaacaaaagtcaaattattgtattttggccaaggaaaccctcaaacttgttaagatgtctctagttgtagttgctacatctgcatgtagagaataaaactatgatttaatggtagtgctcaaaatatttcacattaaggtcctctaacctatgatttaagaatatgacaaaccaaagaagatattgtgcactatatcgaatgactcaaacagtaccttggaaaggattgtgctcgggtgattctttactcttgcatttcttctttttttcttttccttatatatatatggatattggatgcttcaggcacactttgggatgagtgctttgttgctcaatcccagattcagttctatatttgttctttaggaaaggtccagtgcttatgttgagggctagtaggtacacttgacaaatctaagaggtggagggttttaactgttttcatcacattgctaatgacacatatcttgctatgtaatttgtttacgtgatgtcttgcaggctaagcctaacccgaatgattttggggcgaagaggaaagctacaacaccacctgcattggatgaaaatgaggaacctccatttggtatgaaaaagaaacctaaggaggaatggagttgtgcactatgccaggttactgcaacaaacgagaaaaatttgaatcaacatctgcaaagtaagaagcacaaagccagggaagcgagactgttacctaaaaagaatggtaattgctccatcaatgtgccattgaagaaaactggtaatccatcgaagccaccgatgaagtgtactgagactagcagtgctttagaagtgaaggctgatgaaactgcttctacactggagctgccagactgcattgttttagaagtgaaggctgaagtagaagagaaaccccttgagctaaatgaaactgctgagaattcggaatctacactgcagccgccaatccctgaagttgcaaatgaaggcgagataattgagacagtgcaaactgatggaaaggcagtgaaggagaaaaagaataagccaaagaatttccagttctggtgtgaaatgtgtcaggttggttgttatagtttaaaagttatggatgatcaccaacaagggaagaagcacaagaacaagctttgtttttataaaccaaaggaaacttgtgtagttgacttgacaactaatgtctcatttgttgaaaagcaagacccgatttcggaaattcaagcaaaggaaatgtttcaagtcccaaaagtggagaatcaagctggaagaccctaatgtagaaaatcaagtaaatgaggagactgatgatgatatctcaaatacagataaatcataaccaattctagagcatgcttagtaagttcattgggcgagtgttaatgtatggtgtagaaaaaagtttgactgtcgttgtgtctttattgttccctatactagtggtgttgaaatctttatagaattaatgtgcatcactagctagttagagattaaattgttgtgtagtcttctaatgctcttttatgacttaacatgtagaagaacaaaaatgtttaaaggagaagatgctatgcacgtcattaaaaaatacgtgtctaacatgccccattcgattgcttgaaagtgactaaaatttaatttaaatccttgaacatgacataaactaaacttgtttagtaggtatggtatgtatatgaagtcattaggtagaaaatgatgtaagcgaaagaaaggttgtgaggtttcgacattggtggtggctgtaccacccacccgtagtatcaattacgtttaagcaatattcatttgtagctggttattgtctttctacttggatttttagaaaaggggatcttaacaacttggctaaaaaaatgtaacaattaactaataggctaattaagatttttactccttgaatttttacatgcatcaaattatgcccctgaacttttaaggtcgttaaaaattctccttaaactattgaaattgttggatt

SEQ ID NO: 239018 - DNA, 1602 bp, Cannabis indica
tttttgggtggtagttgtctctctctataagattacttcatgatcatggttttgaccatcaatcatttccatgacttatttgactttcatgttacaggactgggttgctattcttgaagatgacgatccggatgattctgatgaggcacttggagactgggcaaagttggagactatgcgtgcctctcatcctatgttttttgccaaaacacttgcagaggtattcttttcttgtaaaaattttggttgtgtaacggaattacatgcaggagttcttggcatattgttttacatgatgtttaggtagtttatgctgttgcatgattaaactattattgactgttgagaacagaacattctttagatatatacctatatatatatgcttagttcagagcttcattttagagttgcttcttttttctatcttttaggttgtgggaacatatagtttattgtattaattttattttttttttccctgtattttaaggttgtttcagatggctctaaagattggatggagcagccaccagctagtctagctattcaaggccttataagacctgccttaattaaggaacatctggtcattcggaaacatctatccaacctagagagcgatgatgctgcaccggatgaaaatgttggagaatctgtagaagataattcagaagaagatgttaaaattaatggtcatcaacgtgaatctgaatctaacaatgataattcaactgggacagaagaagaaccagagaaggatgacatcacaacaaatggggctacattttacaagctggagatgattaaaattcagttattttcagccaatggaaatcaggtacctttttagtggtttaagggtgtgtcatttgactatttgggcttctaggcaaatttcattagatatgtaactttggttttcatgattcatgaaaacgaagcagaatgtatactcttaggcttcgtttggttagaaggaatgaatacataagaataaaaatgagaatgtgaatagaaatagaattaaatgaaatttaaaatgcataaaaacttaataaaaatataattaaatttttctcatcatgtattgaaatagtttttctttcgatttcaaaataaaataggtattctaccaaaatggtggaaaggtcatttcattaaaataacattacaatactttaatatacaaccgaacaaaggaatagaataaaaattatttcctttttattactaaacaatttaactatttaatgataactaagtctttaaattgtataaaaatttaacattactaattttccataaaactcatagaaggcgccataggtacataaagatagatcgattactaaaattaacttgataataattttctttgttacttatatattttgtaaatttttaattttatataaactgttaagttttaacataaaattttaattaaatgattaaaattgatgattatgcaaaaagtgcctatataattttttttttttactttatagatatatagatggatatttataaattattgtgcatatttatatttttaattattttaaacattgtaaaaaattttaaatatttattaaataa

SEQ ID NO: 239019 - DNA, 1528 bp, Cannabis indica
aagggggaagttgaggactctatttcaaaaccagaggttttgagatctagcaagtaaggactaatgagtcgtttcatactcaaaagtatttttgagatgagagaggtgagttgtgccgttacttttcctgtggccccgatggttaacatatgtgtacttccctcaagtacatggagaagagtcgaagtacttgagcaaccaattcaactctcttcgtacttatgatcctagacgctgcaagagctatcatccaaaacattgtagtggtatttttgggtgtaactagacggatctgttaaaatgacgagtactaaacgaacttataagaatcttgagctttgaggactattaccaaaattttttgaggttgaagatttgcctccatcaaagtatttttgggggacttatattgtaatttttctaatatatatatagggacatgattttgtcccgtgatgtactttcacagaatgtattccgtgatgtacgacagccgttagatgagggagttatttgatctgagggctggagttgatctagaggtaattagggttaaaaaatggtaacgtactctgagacccatctatatatattccacacatatcttaaagtatcatttaggtatacactctttatcttttttagttttttagttttattttttattaaagtgtattgtagttatttagaattattcataaatttttataaaatttaaataatttattgtgtcgaaaaataatataacgttaaaatattttgttccatacatgattatttaaaacttgatttccaatatttttggtaaatttataggtagttctagaaatttttttaaaaaaattataacatatgctaataaaaaaaatcttgtgtatcgaagtaatatttgataagggtgtatagtagtatagatatttttcctaaactataatttagatccatccagaacacgaaacaatataagtttgctaacttttatatcagattattatattatgtaatatataatatataaccgccagctagctacaagcctgaatgaagggcctaaatcaaaagaaactgtttgagtgggagctgcatggaaacatcttttaatataatcaattaattaatatgtattattcctttaggcagaacaccacacaataacattatactaatacttcttcttctataaatatatgtatagtgcatatgtttagtttattatactctcacacttagcaaaagcacatacaaaaccaatattaatcctttgtttggtatttcgacagttagagaagagaatggggaattgtcaagcttctcgttcatccgataatgaagcccatattccagctgcttataacaaatattcctcatcgcagccaaacatgggatatggttacaatacaggtacagccaaacaagctccaactactccgcctcgaaaccaccggaaaccggccgtattccctgccgtcatggattgcaacgaggcggctcagcgctacggtggtgttgtgatctctgagtacggtgg

SEQ ID NO: 239020 - DNA, 2120 bp, Cannabis indica
agcccttttcagctggttttgagctgggcctgcaatgtttgaagtaacgaaaacgacgtcgaacaaacgtccagccgtaagagcgcagatctgagattttcacaaagtcaagggtattctcgggtgactcaaaaaaaggcagagccttaagatccacgtttccattattttattttatttgcattttgacccctaattctccacaggcctaaaaccatttctatcttttttgcccttcttcgtcctcagttcctctgttctccaacccccaaagtcgaaatggcgaaaatgccctccgtctgcttcctcttcctcctcctcgtctccgctgctatggcggagatcaaaaccctaaccatttccaatgacgcgaggtccatgatcctcttcgagaagtttggcttcacccacaaaggtcacgtcaccatctctgtccgtaaggttatggtcgattctccttccaagatcagcatcgagccctctcgcctcggattcttccttctctcagaggagtctctgcttcaggttctcatggagatgcagcaagatccgcagttctgcgtcctcgactctcactacatcacccacctcttcaatttccgtgagctttccccaccgcctctctcctccttcaaccaatcgtatccggttaccgcccccaacgagtacagtttatttttcgccaattgcgcccctggaacgtccgtctccatggacgttcgtaccgaggtcttcaactacgacagcgataactccaaggatttcctctccgccggcctcacccacctcccatccctcttcttcgtcttctcctttgcttatttaggcttcctagggttttggatctacatcctctacaataacaagcgctccgtgcataggatccatttcttgatggccggtttgctattgatgaaggctctcaatctcatctgtgccgctgaggataagcattacgttaaggtcaccggaaccccccatgggtgggatgtgctgttctatatttttcagttcattcgtgtcgttttgctcttcactgtgatcattttgattggaactgggtggtcgtttttgaaacccttcttgcaagagaaggagaagaaggtgttgatgattgtgatcccgcttcaggtcctggcaaatgtagcgtcggttgtgatcggtgagaccggaccttttatcaaggactgggttacttggaaccaggtattcttattcgttgacatcatttgctgctgtgctatcattttccccattgtttggtctattcgatcgttgagagagacttcgaaaaccgacgggaaagccgccaggaacttggccaagttgacccttttcaggcaattttacattgttgtaattgggtacttgtacttcacacggatcgtggttttcgctcttaagaccattgcggcttacaagtaccagtgggtgagcaatgcggctgaggagattgcaagcttggccttttatatagtgatgttctatatgtttaggccggtggagaaaaatgagtactttgttcttgatgaggaggatgaagaggctgcagagctggctctcagggatgaagagttcgagctgtgaattgggtagcagggctttcagtatttgctgctctgcaaatgcagtgctgcgtggatttgagaatagagattgatcgaagaggatgctgttcctccttctacttgtaatattttctccctactttactttactttgagaactttaatttcaagcatgtgtaactgtatgttttgatccatagaattgtcatctcactatgttgaattgcctatactcagctctgcttcacagagtgttcatatagctcgtcattcttttgttccctttttgatgtatgacatttttagtaatttgtgggtcgctacgccatttttaaattgatcgtgttcactatttcgtttataggtttttgttaggcaatgctttatgattcttgacctttttttcttttttcttttgcataataatgccagacaattgctgagttttgttcgtttttttttttaagcttatcatgcacgttgttgtgatccaatacaacaattaaaacaaatgtaagttcacataaatgtgtttattattagctttgtgca

SEQ ID NO: 239021 - DNA, 3100 bp, Cannabis indica
atttccgtgtgacaatatttttataaaaattaacccaatttttgtaagtttctcttatactataacatgaatattttcagtattttctttttcttatttccttcctttaacagccaagaaaagttgacatttcactaaaatctatgctagtttggctggggctggaattttaattacacgatgatgtatttcagtgtattaagaaaagtggattacaatcaaatataataaaataaagatatttgaacgcagttctcttcggattgccaagtgcctactcaagctttctttaacaaagcttcacctacatggaatttcgctcttaattttcttcattgactagatagtagttaggctctgttctgtgatgtgtatcttggattcctaggagggagaatacagcagcccatttaaaagaatgataatgctttttttttcttaactacgaaacttttatgactcaaaaataagctattgtgtgagcaaaaaaaaaaagaagttattatgagttttttcagaaaatcatgtttaggtggcatatgtaattgttctagccaaaaagaaataaagaaggaaagaaagaaaacgtggcatgacatgttgtttgtattaattgtaacacatgtcacatttggtaacacgtgttccgaaccatgcaacaccaattgacaacccatgtatctgttatccctattctccgtcctcataccattgctatcatgttatgttcatatcattaattttttcttttctgccataaccgaccagaagggcataaggacgataagaaagaaagcatgtcgaagagctggatacaacaaggctacaccaagttatctaatattctaggcaaaactattccaaagaagcaaacctttacctttcccgtcctagagggccaccctacggcccaacaacatgcagaagtggcagcccaggcccacgattccgtccaaagaaaaacaagtgatcttatcaaagagttcaaaatatatcgatggaatccagaccttcccaacaacaagccccaccttcactcctactttgttgacctctcaaactgtggtcctatggtaaaaaacataactatagtatatatttatgtgtgtggtacttttccaattttttagatttgcgtgtgttgtaggttttggacgccttacaaaagataaaagcagagatagattcgagcttgagttataggaggtcttgtagggaaggaatatgtgggtcgtgctcgatgaatatcgatgggaccaacactgtggcttgtctgaggcccattgatacaaacacttctaagcccactgttattactcctctccctcacatgttcgtcattaaagatttagttgttgatctcactagtttctaccaccagtacaggtaatactttatcgttattatgatattaatccgatgatttcccaattacaatttcgacacttcataaataatccttacaaattttactcacaactttaattgtgactaaagtaaaaaataaaaattgtaattaattagaaattattattgttattttatgattataataatttattgtgattaaatatatttatattttaaataaaattaaatttgtaataatttatatttaaatattatattttacgtacaagtaataattttggtgtgaataaaaattattttactaaagaaaaattatatattataactaaaaatttatcattaaagtagctattttcagtgtgaatacacataaatttgttatcaatacttctaattcatccatataattaatgtaattgtaattcattcaaaccgaattaattagtgaaaaaatatatatacaactataactaaaataatttttttttcttattggataacaaaatttagagttaaaaaaaatgtgcaaataatttttatagttatcttttatagggtaaatacttgttataaattaaaaattgatatctttatctggtttctgttaccttattacccgttttctttttaattgtagtacccactacccagtgattagcgggcggccgaagggtgtcatgcccccccatattaaattttatataattttacatgtattggccccactaaattggctccgccattggtagtagccattataatacattcgttaatggcagttatgtatatatgtaggatgatagagccatggctaaagacaagaagagcaccaaagaatggtggagaatacttgcagtcaccaaaggagaggaaaaaactagatgggttgtatgagtgtatactgtgcgcttgctgtaccacatcctgcccttcctactggtggaaccctgaacagttcattggaccggctgcacttcttcaagcttacagatggataagcgataggtatataattaattaatgcattcatcaatatcatgtatatgaaaagcttttattattaattaattatttggcagccgagacgagttctccaatgagagacttcaggcattgacagaggaccatacaaagctatacagatgcagaagcattaagaattgcacagctgcgtgtcccaaaagcctcgacccagccggtgctattaggaagatgaagaccaagcatttgctttctcacccagtacagttgacggaacacccaaaaggacaagggctgtaaagcctatctatcctatatgtataaatataaattaatacatagtcaagcttgctatatacgttttccgttttgtattgcgtactttgattaaaatttaatgtacgcactaataagttaaatgggtttgatatatactgtaatttttgtagatcaaaacattcgtagaggaaaattgttagcatgtttaaacataacaaaatttgcttactgtatatattttagttagagagagaacgataaattttctcagaattagacagtatcgatcagctttataatataatagaaattttggttcaactttttattttctctttgcaaaagttaccttgacattaactggtaactctaaatatctttatatattaaaagtgtctatttaacgacatttcttgatttaacggcatttcttggtttaacagaatataccttaaaaataaaagaatat

SEQ ID NO: 239022 - DNA, 3396 bp, Cannabis indica
acctaaacctaggtggttacctataaatagatagtgatgactcacactcaaacttaacagtttaaatgaaattcactttcagaaagttgagcctcctattctataccatagccgccaccctcttcctctcttttcttcttcatattattcaaccttgagtgatagagtgagtgcccacatacatcaagtggtatctcaatcatagtgtggaagattttgaagaatccaatcaacaagaaggagaatcaggctcaagaaggagagaaaaagttcatatttaggatgttaatgaaacatacttgttagtaaatctagatcctggtaaaatattttcaacaatagtgtgcaacaatgtgataatgaaagaaaatgacaatcacccagtacactcaagtgtacaagaacctgacaataatacagaaacaacaactaaacaacttttatctgctttaaggaggggatcaatttaaaaatatattattttggttgatgtaagaatttccattggatttagaaaaaaaatctcgcccatgagcaacccaaggatcctcccaaatttttgtatcctttccatcagaaatcattttgtagtctccttttcgtaatgtcttgttagcctttaccacattcttttagaaccaggaatcagagtccttgtagctttaatgaaggagatttttacgccccaaaggtacttagcctccaaaatcttgcaacaaagggattgactcccggttagcaaattccatcctcatttagtcagattggcttgattcatttctctggtttttaaaaacccaacttgccataatatttaggaatgcatagtttgtcccacgccttgaggttgagtccatgattccctttctcacaactccactagaaatcacgcaccattccatcaattctagccacaagatgactagaaagcttggtagtttgcatgtaatacataggcatggaaagacctaaataaagagataagttgtgaggaaattagcttggcgaattccataagatggataaattctccctacttagcccccattgagacaatcattaagagtagtagtagagatacattggttgatccagttgcaaaataactcaaggccccaaaactctcaagaacaaaattaacgaactgccagctcagcttgtcatatgccttaacaagatcaatcttaatggcaaaacaaccttctttaccttttttcctcttaaatgagtgaataacttcttggacaataatattgttatcttgaacattttggccaagaacaaaagctgcttgagtcgggcaaatcaatctaggaaggattggcttgattttatttgcaataatcttagagatgaccttacataacattttaaagagaaataggcctaaactgactcatccttttgggattcacgactttaggaatgagcaccaaatcggtagtgttgacagccttacgcatatttccagtttgaagaaaatagacagtgcatagtaatgcctgaaaaagagaactgacatcccatctagaccaacgattttatttcttcccatagtaaaaagagtccttcttatttcatcatcagtaagaaacatgacaagatcttcatgctcatctatcgaaagacggtcatgaatgaggccctcaaaattgggcacctgagacaagttgttactcaaaaaaattccactccaaaaatcaatgaattctttcctaattaagtgacgcctagtaacccacacatcattcctatccaacatactctcaatagaattatgtcaagtggtagcagacaaaaagaagaatttggaacattgatctccatctttaagccacgagatgcaggctctttgttttcagtaaagagctttcctttccaaagcttggttaatggaaccacgaacctcacactcctctttccaatctctagtacctgcaggcaacttctataggtgattaagaacatgtttggcattatttttctgttttttagtttcaaaaaagtatttttaaaaatgagaaaaaaaaattatttttaaagttttcaaaacacaagtcgagtttggctaatgttttcaaaaataatttttatttttaatttattttattttttaaaaaacacttgaatactttgagaccctgatatgaataagacccgaacaggacctgaaccccggacctagacccaaacactaaccccgaccccagactcaaaaataggttgggactggatccggacccgaaccccaacccgtacccagattcaaatctggacccaaccctagcccagaccttggacggtcgaatccaaactcgacccggacctcggaccaagacctggaccaagaccttagacccagaccccgaacccaaaatttgggctccaaacccagccctaaactcggacttggatccggacacgacccttgacctggccctggcttggacccaaacccagtcctagccttggccctggcccgaccccaaatctcatcccgaacccagacccggccctagagtcggaccctggagccaaaatcggatcccaaacccgaactcgaaccctaaacttggaacttggaccccaaacctagatctggacacggccccagacccagactcagcccaaacctgaaccttgacacgaaactagcccgaacctcgaacgcagattcagatcttgactcagactcagaccaaacctggccgcagacctcggcccgaacccagacccaaacccgaacctggcccggaccccgaaccaggaccaggcccggaccccagacccaaacccagccccaaactcagcccagaccccgacttggattcggacccgacccgaccctagacataggcccgaacccggactcagaccccaaccctgcacccggaccctacccgtccccgagctctagcccgacacgaactgaaaatgaggagagagaaaatgatgagagagaaaataatgaaagagaaaatgattagagaaaaaataatgagagataatgatgagcgagataacgaggagagtgaaactaatgtgagaaaataaagagagagaaaaaatgtgagaaagtgatgagagagaaagtatgagaaaataatgagaaaaaatgatgagagagaaaacaataagagagaaaataatgtgaaaaatgatcagtgaaaaagtgatgaaagagaaggaggagagagaaagtgatgagagagaaaataatatgaaaaaatagttagtataataatgtgagataaagtggaagaaaaatattaactgaaagtgaattgttttataaaacataaaatattattttgttgttcttaaaattcttattttttgtaattttatttttaaaaattattttcaaaaaacgaggccaaacacgcttaattattt

SEQ ID NO: 239023 - DNA, 2368 bp, Cannabis indica
tttatcctggtgtattttcattagtttccgaatttctaatggtgaatttgctcatattaaatcatgaagagacatgtagatagagttacgtatgttaaaacactgttttggtttttaatgtttcataaagttgcataatttcataacagttgcataaatattttgctaacagttatttctctacatattactattaaggtacaagtaatattgatcagtgacaaaaaaaaaatacttacaaatagttttttacatatacagattcatattttacattttttagttgcaattaagttgcacattagttggctcgcaatatatataactgttgcattacagtttcaacagcacgatccatgcttcatgggattaaaacctttgtctgatgcaaccttcggtcaatcacccagcaatcacccaacaacctttgtctgattgaaactttcgtctgatacaatcttcgaccaaccatccagcaacattcgtctgattgtgtaagagatattttggtaattaaaagtacttaggtataaatattgtccacatcttatagatatatatatatatatatttttttaaataaagtgtcaatttgtatttttcatgtaataattccttttattttcaagaaaaatgaaaatttttatttacccttccaaaatcaatataccattacaatccgcagaaacataccaagcattctttgaacacaaaataaatgccaaaacccaccaacacttttgcttaatactaactcagtgatagcataatatgaagaagaataaagagcttcctggtttttccattggtgccagtgatgaagttgagtttattcctattttcacttcacacataataaacactatgctacaactaaagtaaagaagaaataaagaagaattctttgaattgttactaaaaacattttcatgtgagcacaatctgtagcagtatatattaaataatatataattccaatatttaaacaatttcttaattcattacaaataacattttaagttcaaaaagccattcactacaaattcaaaaagccatccatatcctaatctaaatttcattgttaatgctaatagcaaaaaaacaaaatgttttgcccaaattcagttctaatttcaataccatattaggaaaatcaacaactgaacactttaacactatgctatataaatagaagctgttaaatatcaacaactatccaaaattcagctgttgaaaatcaaaatacttccaaaagctatctaacaacatcaaaattgttgtccttctattccattactaaggggtggcatgacttctgaagtattggtttgaatgtcatttgctgccataattaacaatatattagtgatcagtaagaattacagacaagagagtagcacacaatacattaattaggtattgtgggacaaaattgtatattagttgttaataacaatatatttttgttgttgttatttattatcccaaattttgttcacctgacgtggcatgtccacgtaagccaagactgaggacacatggaatacaaccttgttaatagcaagacaaagtctccttacaaggtatggcaaaattgtcaagcaataagcgagaagagttaggtgagccgacaaggagctgcactaccatgtcttgcccgccaaaggggagtacataggttggtcaggatgagcttgtatggccgattagagttttagaccaaggaagggcccgtttgactaaggaaacctgacctctgtaatgaaaaggtctacaaaggctggaaatcatctgcaaaggctggccaccacctacaaagtctagctaccacctatgaaggctggccaaaacttgccaaagcgggtaggaacatgacctgctagaccttaacaggaacatgacttgccaaaccctggtaggagtatggctgaccaggcctcggtaggaacatggtcggccagacaccaacctgcagacattatgtgactggttagcctgcacctgccatgtgcatggccgaccagcttttgcctggcaggctcttagtgcatagctttcatccatggatagtaagttaagcaacgaaatttggccttgatggcccacaaaaatagggagaaaaaattggaaaattccttatttttaaggataatttggtcatttaaagtttattaattaattatttatatgtagctttatttattttttagggatattaaggatgtaagctctactatataaagagaattagcttacccctaattggctaagtcctaagtctctaagcctcactaaagctctcaagctttaagtttgaaatcctaactctctttccctctcttctacacgcccaaggctctctctctct

SEQ ID NO: 239024 - DNA, 2042 bp, Cannabis indica
aatatccataatctataactctgagcttattatgattgttttatctcttacttttagaacacaaacgttgtaagtggacaaatcaagtatctagtctattgcatggagaatgcaataatgaatctaaagtcagaccaggagcagatggtatggttagtcgattttcaaaactggaacacttctagcatttcaataaaggcgactcgggaaacagcaaatgtcttgcagaatcactaccctgagagattgggttttggaatcctctacaatccgccaaaaatattcgagtccttctggaaggtgcttatttcttatttcactttgatatcacaccgctattttatctttgtatttagttctaatattatttacgttttctattactcgagctgagttttaggcaaaatagcttcgccaagcacttccccgttatcccgtccattttttttattattaacattgcataatagtttcttttctacaattctttacaaaataactttccagggatattaattgagctgtgatttaatgctgaagaagtagataattagggatagtgtcttgttatggtttgtatgaatatctcagtgtccaaagttttgttgttgacaaagttatgatatatacctttttgagtgcagatggtgaaaccatttattgagccaaagacattcaagaaagttaagtttgtatactctaacaaccctcaaagccagaagatcatggaagagcttttcgatatggataagttggaatcttcatttggggggcgaaaactcagtgagtttcgattatgaagcttatgcacaaagaatgaaggaagacgagaagaacatgtctaatctcattaactcccgttcttcctcaccatccctagtgtccgaaacacatcagctgtcagaagcattggcttccgatctaggttctgatggtgacgaaattaaatcctcatccgatgatgaaataatcccttctgatttggtactcgatgatgagaagacaccggaccgatcagagctacacaatgatggtaaagatgttgtaaatagcaacatcaagtagtatgcatttgagatttggtttaaaggctggaaatttacttattttgaggagtaaaattccaaatatatatatataatatatatctgtaacctccacaaactaatgcacaagtgaaatctctcattggttttattggtctccaaatgagattttgtaataactcaaacaatgtaaataaaactacatatttctttcattttgattatgaaagtgataaagatatgggatgatgttgattgagaggtgggataaagcatccccaaactcattgatcaaattcgttgatgttggtactaaaattcttcccatgttatgctaatggtgtcatatgtagttttataaataattatatgtttggattattttttattataatggttgtttcgcatcctactaatatatactatattttttacaatctttttttaattatatgatttttttaattaaaaatgtatgcaactctaaaaaaaaaaaatatatcacggaaataataagaaaatgacataaaaataagaaaatagcataaaaacaacatgtaaataatataaaataataagaaaaaattaacatgtcgaaaaataggattcaaaccggcgaaattcttttattttatacgtatatgaaatatagattgtttgaattctatttcctgcgtgttaaattttttaaaaaatttctcaaaattttatagaatgtcctaaataattacaatgtagtccaccataaaaagatttggattaaaaaattgtctcaaataccaaaacaaataaaaggtgcaactgtgaacccgttttagagggtacattgtacaatttttcaaaaatatttgataatctattcaacaaatgtatttttgcaattttttggttaaatatgaaataattcaaatattttacctggacaatggtaagcctaaatccagtttaggggtaagttgaaaaatgtctcttttattcatcaattaatcaaattta

SEQ ID NO: 239025 - DNA, 2947 bp, Cannabis indica
tatatatataatatatatataagattcatgtccctaagtccctttactttgagcttcataaattcctcttgagaacatttcccttttgttgatgtggacagtagtatatatatagagagagagagagtgagtgagagacatataatgattgtacatagtaactcaaactcagaggctgagtttgaggtgtgtgtcaaaactcatcaccacaacacaaccaaggccctccacttttacccttttgccttaatggatcaagaaactaccatcattgcctgcgagggtcgggcgtgatgagcaaaatctctactataacttcactctccaaagacatgtttacatattggctcgtcaaacatgcacatatattataaacagcatgtttggtaatattgttgggagggacaagttaggagacaagatgggatatgagcaatatattggttttgctcttaattatgatatcatatatatatatataggccatacagcatagcacataaagtcgtttgaggaatcgaaaattaagttatgattagagatccggctgtccaacctttttaggggttaaaataaatcaaaaattgtgaccgaatttctcctatctttttagcctgtcatttgatattcggtggatatatatatatataaatcatgcatgtatataacgaaatgatctatgattggaatcgttacgttagatataacagtcatataattactattaaataatcacacaataaaattttaatatggagaaaacttggacttattattaccaaactagcaagattattattaatactgtggctatacaatgataacctactttttttaaaaccaaatttcaagaaatggggtacgacggctgtaagtttctgcacacaaaaatgacttttagtgcgtgatataggcaccatttgcggtcatgattttgacaaccaaattaagctcctaaatggtaaatatattacccatgactcatgactttgcattggattcttggtcaagaaccactcaacttagagacgactccttcctttcgatcctctcatttgattcacaaattgtatctattaataataataataataataataatcaacaacgagaaaaagatatatttattcttatatgccaagctatatataactagctcatctctttaattggtttggtctggtctggttacccactttcattagtagtggttacttttccaaagtcttttttttatttgtcctgaagtgaaacttttcatcacctattgatttatatatgtatattaattttctctaagacaaagtttccaactttagacgcaagactgttttgatcttaacctcaacaagaagatgttgtaataactaataagattcaattaatcttatgtaccaatcctcaaacagcatcatttaccgctaaaatctttgctcatattccggcatgagtcggtgcctgccttgcttgctactaccccacccacccaatataccttcaaaagtactaaaaataaaattaataattttttttagctttacttcattcatgactctagcgactattaattaatccctgtgtgttgacttgttgtgaacaagtgtcagaatgtgattggttgataggataataatatataagcctggcattaataaattgagtaaggggaatcttggctggttggtgattttgtcagcaagattgtgttcagggtagatatacataatagaaggaaagaaagattagattagatgtagtgcaatgcaatgcaatgcaaagcaaaatgaggcttcacaaggcccaatgtcttcaagacaatacatatatgctactgctgctgctactggctactgcagcaactgctggtacaggtgtgtaattataaataaatggaccatagagatagaaattaatagatagagagtatgtcatccatgtatatgtataaacattaatatatacggtactattactatactctgcaattctaagtaattcgtactatatcacctttgtttttttggtcgaactttcacggagctgccaagtggctccggattgttgtccttagttgttttttgatttttgtttttttattactaaatggatttttatttcactttcttcctttattattatattattttattaaattatatataaatatgaaattttaatcataaacatattattttaatgttaaaaaaagaaaaaaaaaattggtgtagtctatagtgtcccactaaaatagtgtgatactatagactccgacatatataggatagcatttagtgttccattggagcaattttgtgtccaaactccacttttaaaattttagtattctattggagaagtccttaagggtgtgtatgggttgggttagccgcagagtcatctcaaacagtttgaggttcttggtgaaaaattaaaattggatcttttataaaaaaaaattataatgcaatactttatgaattcatttttttttaaaacaaaatacttaataaattttaaaatatgcaagaattttaaaatcgtatgtattgaaattacaaaattttatatattttttttataagtgctaagtatatatttacttttatgaatatttattatatatactatacattatcaaaaaatatttattttatatatagggatgataaaaacaagagcctttaatatagggatcttatgtaatgattcaagctgccatatgcttgggtcgactctaattagccgggttgagactactttagtgggccaacccaataaaatcggcttattaaattctaacccatttattttaagttttttgtataacccaacccaaattatcatggattgagttacaacccttactttttaaagttacaaaaattacaaaatttaaatatgaatgttcgattaattccccatataagtcaacctgtaacagttaata

SEQ ID NO: 239026 - DNA, 3888 bp, Cannabis indica
atatatatatttgtatatattataagtaattttattttcgataaattatgtgtttcttctttgtttattttacccaaaccttttgtttaaaaatgaaagggcaagtgttcaaatagccgtcccacacacatgtgacgataagacgaagttgacttagataaattcaagaaaattgttgcataatagtaacaagtcaaacgaatccaaacaaattacgaaatggaaacaaaggaataatcaaatcaacaatgccaatagatttatataatttacgagttattaaatttgttttgtattctatatgtctaatgtaaatttcttggtcttcatatgatcatctctatatttatagctaacaaatttctcaccaaatatgacacaaaacacaatgcctcattattactttctcagtgaaatcattaaagccttcattttcctcatattcttctttatcggggctatctcatctccctataaaccaaaacccacctccattgatgtatggccaaagccaagaaccgtttcctggtctcaaccgcaagcccatctcctctctcccactttctccatcgcctcgccaagccaccgctacctcagggcagcagccaatcgctaccgcgcgcagattctaacggagcaccaccagcagctagtcccaccttctgtcgtcctcatcaatgtctccgcaaccccattgcaggccctcaatatcgatgtggccgacctcactgcgcccctccatcacggcgtcgacgagtcatacaacctttccatccccgcgagcggcagcgtcgcccgtctgactgctcgaacagcctggggagccatgagaggcctggagagcttctcccagctcgtctgggggagtccctcagtggtggcggtcggtatcagcttgtctgattcgccgctttttgggcacagaggactgatgttggatacctctagaaattattttccagtgaaagacatactgagaactatttccgccatgagtgccaacaagctcaacgtcttccattggcacataactgactcgcattctttcccgttgatggtaccgtcggagccggatctggcagataagggctcttatgggtctgatatgcagtattcgccagatgatgtgacccgaattgtggagtttgggcttcaacacggcgttagagtaatgccggaaatcgacgctccaggttagtttggggaaagttcctttcttaagagttccttaattcctttaatattatgttaattgcctgcctgctgctgtatatatttttttttggcaaggtttctgacagattacctgctagtactttttgttatgtataaattatagtttttatttttcttgatattagaatgcaatcaaataggtactgttaataatctcaattaattaattaaacataaccatttttctatttaagggtggttgaattttaagtaggaattacaaccgctaaatttattaacactttatttgttaaaaataaatattttggtgatatttgaaataaaatttgattaaaacggtgtgcaaggaataattaatgagaagtagcagacaaaattacttttacttttaatatgttggttcttacaaataaaaaagaatagaaattccaaagtgactggtattgtattggtatggatattccttgatttatttaatttaaacaaaaacgaatgaattttataatttcagctcatactggatcttgggcccaagcatatccggacatagtgacttgtgccaacatgttctggtggccagccggggcaccatgggaggatcggcttgcggctgaaccaggaaccggtcaactaaacccattaaaccccaaaacctacaaagtagtcaaaaacatcataaatgacatcattaaactattccctgaaccttattaccatgggggcgctgatgagattatccctaactgttggaaattagatccaaccatccaatccatgttatccaacggtggaactctcagtcaagtcttggagattttcgtcaactccaccttgccgtacataacctcactcaatcgtactgttgtatattgggaagacattttactcgacgaaaccattaaggttgacccaaaattccttccaccagagaacatcattttgcagacgtggaggaacggccataacaataccaaacaaattgtttcagcagggtaccgtacgattgtctcttcgtcggagttctactatttggattgtggccacggagactttacagggaacaacagcatttacaacatacagactggcacaactggtgatggtgggtcgtggtgcaatccattcaagacttggcaaactatatacaattatgacatcctttacgggctgagtaaagaagagtctaagcttgtgcttggtggtgaggttgcgctttggtcagagcaagctgatcagacggtactcgactctcgaatctggccgcgtgcttccgcgttagccgaggttttgtggtctggaaaccgtgacgagaaaactggaattaagagatctgcggaagccactgatcggttgaatgagtggagaagcagaatggtaaacagaggagttggagctgaacctattcaaccactttggtgtattagaaatccgggaatgtgcaacacagccaactagttaatttatacattatacagatacaccttttatttgtctttcagtgagaagtatttcattgttgccaaatatgtttagtggccactgttttccttatccatgcagagggtgaaagtttctcacttacactaaaagtgtggtatgcttgataagataggaccccacatcttcttaattccctctttttgtaaaactattgtttaagtgacgtccattaatttgtttttctttcttaccatgaatcaaatatcatcatccaatatattattataaaaaaaatagaagtgagtttgtaattgacgttgttctcatcctaaatataatatagcagtaaacaaaaaggtaactgaagaagaataaaacccgcgttagcatcacaatgattcaatatcatcactgtctgcaatagtcacagggagtcataccagatcctttaggttaatgtaaattatatgctagattttaagtaagtatagagtgagagtatattgggcaacccactaaacaagatgtgtatattttaataaaatataatatgatgacattttagattaataaatataaaaaagacatattttttaacttatctcgatattttttttatactagtcaaattttgttttggaatgtgactctaaatactatttttttatgtaatagttcatgtttcttttttttttttttttttttttttttttgaaataaaggttttatttttaaaattttgaacagtctaccctaaaagaaattaaaacaaaaaattactactacataattataagaagtactgacttttattaggaaaaaactcaatgatacattttgctaagcttcttatgtgtttaggcattcattagagcttttaatttttgttttttttatttactatgtatataagaaaaaatcgtcacgattacaataaaatatttaaatcttatttttcgcattgtaaattattcaaaatattctgaaaatttactagtaaacctaaataactacaacgtacacaatcataaaaaaataaactaaaaacctctcttgaatgtctaatcatgacctacaaaaatataagtgtactataaacttaccttttatatatatgtatatatatatagggagcttcttctataggagctccgaaaatgacctcatcggtgggagtatcttagaggcaatcagaacgcgtaacgtcaattaatgaagttgtgtttgtttgagcgagaaataccgattatt

SEQ ID NO: 239027 - DNA, 1847 bp, Cannabis indica
tatcttttgtatctggccttaccattcctatttgcttcctcttttactgcagggtgttttctgttaaattcagctgcgatggaacttatgttatttctggtagtgatgacaccaaccttagactttggaaggctaaagcatcagaacaattgggagttgtaagaatcacttactttatttatgtcctcactgttcaaactggatcaagcatcttgattactgctacgctactacggcgaagtggatagatttgataaaaatttgtaaataatgtcttaaatttggcaacatgtttttagccagtctgtagcatagctccaaacagtgtgtccaacttgttctttaggatgtttcttttgtcaagtacctactgttaagctctgaacttcaaaccatttgttactgtgcagcttcttccgagagaacagaaaaagcacgagtatcaagaggctgtcaagaaccgctacaagcacctacccgatgtcaagcgaattgtgagacatagacatttgcccaaaccaatatacaaggccactaatctcaagcgcaccatgacagatgctgaaagaagaaaagaagagaggaggaaggcacacagtacccctggaagtattaccacacagcccttgcgtaaaaagagaatcgtaaaagtagtagagtaatgaacagaagagcggtcgtttgggggcgtcttggtcacagaaaacaagagataagcccattttcactgctaattgagtgaagacattgcagcagcagcagcagtaggaaaacagtaaacggagtatgaacctgactttgtggcagatgctagcagaaaatatacgagggtctagcatggctcctggaatccaattttgtagtttcaacgaaaatttagtctaataatcatttgttgggatgatggtattcgtaattaaatagtttgtgttttgagtctgatgaagagacagtgggtgttaagactaaatgtatggcatgattaatgttttaaattcaattttaacgggggctccaccctcaggcaatgttttagatgtagcatagcaagtaggggtggcaaaacgtgtcattgtgtcgtgttcgtgtcatattttatgtgacctgcttttatatttcgtgtcaagcgtgtcggctcgttttttgactcgtgtttaattatctcaaccctaactcgattcgtaaaaatcgtgtcgtgtttgtattgacccactgtgacttttttgttattattgaagctgaaattgtaaagaaaaaaacccgctttgatattttttgtcaagcgtgtcggcccgttttttgactcgtgtttaattatctcaaccctaactcgatccataaaaaatcgtgtcgtgtttgtatcgatctattgtgacttgttttgctattattgaagctgaaattgtaaagaaaaataatagatttaagctccattagaaaacatatacatttgtatatatagtttgttatatatataataaaatttaataaaattaaaatatttttaatttaatattaaagaaaattaaatttaaaattttttagtttaacattgaatatatttttatataattatattattattattaatttttttattttattatatttaaaaaaatcgcgtcaaatttgtcacattcatattaagcgggtcgtgtcgtgttcgacccgtttttattttgtgtcaagtcgtgttgacccgtgtctagttttcccgactctaacccgtaaaattcgtgtcgtgtttgtatgccgtgtcgaaacccgttttgccacccctaataacaagttctatttccaatccaaaatattagagtattgatacttcactcgcaatttacatgaca

SEQ ID NO: 239028 - DNA, 4140 bp, Cannabis indica
atttttgtgcatttgtgaaattaaccctataaaaaaaataaaactaaatttttttcttaaacgtcgaatcaaatcaagtagatgatgcatcagtgcatctcaccaggttacaatgtagaagtacccaaattttacttattcttttcgaaaataccatctttgaaaaatatacatgtattcaaaatcaatgatcaaactaccccaacatctcacctaaattttcttccactgcaactgcagcctcacctaggagcttgactgtgatagtaaagtttacttttttattgtattttgggatgcaaattcagtgtacctggacacgcccacaattgcgggtcaagccttcgacatttctaacgttgtcgaagcaaataaggagaagaattgggtgtccttccaaaacacaaggacttattcctattgcggccgccatgtccacctctaccaccacacctgataatcaggtcgcttccaataaagatgggtcaacccataaccccaatccgccattgcaggtacctttttttttttacttctaaccattgattcaactgcatttcgattcgtattttcatgggtctttcttatatgcttgaattggaaatggggtttcttcctttctttcaataatttggtttcatgtttttaaacttaaactattgcaaatgttaccctttatcagatttgttctttttttatttatttattaaatcaaaatcacgtctttccttttgtttatggtctatgtattcttcaaatctggcttcagaattcacaaaatttcacctgttctctgatttacaagtcaaataagattcaaattgtgagagagaaaatcaatattttccttttgttcttaaaaacaatccaatcctaaccttaatatgagcttcgagttgctcatttattgcagtgtttaagagttattgttaacatgagttgttgttatagtttactgtttctcaaatatcatagtttagtctaactctaaatacggagagataaccttaatgatgattatggtagagcatgtctgtagtttgagatggagtacaccattgctatttttattcttaaatcaaagatttgctgcattgcttattcataaattggaagcattttcaggctctgaacactcttatttacttcatggtttcgtgcttgatgtcttgttggttttgtttaaataagtaaatattcaaaattagtgtgcttgaacctcaaaataaagggttcttccctattttgcttcatggttactatctgatgttatgaatcagtttctgctttttattggtttatgttctctagttaaaacaaaactttaataaagaaatagattaggattcaaggaagggagaactctacttataactctttacatgttaaatcttgccattcaaattactcatcatttgcattgttttttcatactatccctccttgtaaaagtaatagtttcttacttttgttgcgtttggttttatcttctttaattatgttttggtgctcggttgaaagacagaactcgatcgtgctgtaattgttaatcaaatgattgccatgcctttgtgctgaacttttctatgttgttactgtttttcttcttactgtaaatggtgtttatatactctggtagattgcaaagcgtttggagaagttcaaaacaacaatatttacccaaatgagcaatctagctgttaaacatggggcgataaaccttggtcaaggattccccaactttgacggtcctgattttgtgaaggaagcagcgattcaagccgtcaaggatgggaagaatcaatatgctcggggttatggagttccagacttgaattcagccattgctgagcgattcaagaaagatacgggtcttgtggtggaccccgagaaagaaattactgttacttctgggtgcactgaagctatagctgctactatattgggtttgataaatcctggtgatgaggttatcctttttgcacctttttatgattcttatgaggctactttatccatggctggtgctaaagtaaagggcatcacattgtgccctccggatttcgctctacctattgaggagctcaagtcagcaatctcgaaaaacacccgtgcaattcttctaaacactccccataatccaactggaaagatgttcactcgggaagaactcaatacaattgcatctctctgcattgaaaatgatgtgttggttttctcagatgaagtttatgataagttggcctttgaaatggatcacatttctatagcctctcttccaggaatgtatgagcgaacagtgacaatgaattcactaggtaagacattctcgttgacgggttggaagatcggatgggcaatagctcctccacatctggcatggggagtcaggcaagcacatgcctttctcacattcgctacctccactcctatgcagtgggctgctgccgcggctcttagagctccagactcttactatgaggagctgaggcgggattacaatgcaaagaaggcgattttggttgaagggttgaaagctgttggattcaaggtttatccatcaagtgggacttactttgtggttgtagatcacacccctttcggggtagccaacgatgacattcagttttgcgagtatttaatcaaagaagtcggggttgtagccataccgacaagtgtattttacttgaacccggaagaaggaaagaacttagtgaggtttaccttctgtaaagatgaagcaactcttagagctgctgtagaaagaatgaaggagaagctcttcagaagaaagtaaacttgttaatggtttatatttctttctcaaaataataaagtagtgttggacagccaaaattttatgtgttttgacttttggatgattgttcatgcataaaagcctccatggttattggttcatattattggaaaatgtttctaaacttgagagtggtattgtttgatagtgattaggtagttcattattttttttggcatgactaagatttttttaaccactatattacttgaatttttaaaataattcaagtaattaggatgtcgaaatcaaaattttaaccagcttgttgaatatgtttttgttttggcatgcaaaagacaattctaatcctgaattttttatattaaattattcaaaagaaaaattttaagttaggaatttcttgtacattatatttttttatttataatatatgaagtgactatggtaggttatgtaaaaaaaaaaaaatcatacagtcgagtatagtctaattgagatacttttaatatattttttttgtaaacaatttatgatggtgttaatagcctttttataattattttagaaattttagataatttacctcactcgaatcagagtaaaattgttattttcataataacaaatatagtatgagctaaattttatatcataataaatattatatttttttaggataaatagcggcataagtacttaaagtttcaagtttgtaagtggcataatcccaatgtttatttttagcgagataagtacccaatgtttgtaaaactgtaattttccgcttacaaacttaaaactttaaataattatgtcgttattaccctattttttatttactctattgccacatattaatgcaattgataactttttatatttttatttttatatttaatatgatttttatatattttcaataaaaatttaattttttgttaattttttacacatttctattataataaagtttttttttactcatagtgtataagaacacaattataaaatttatgctaaaaattacactaatttatttttctagccaaatttagcacaaaatttacactattaattaatttattaaagcacaatactaaaagtttacgaatttattgtttggtctgccctttgctctgtggcagtttgttctgttttttctttttaactgtaaagttcatcctttttttcaaatttttacactaataactgctcccgcctactgttcttgcaacattacctttcctcctcatcaaccttttcttctttttctgtttctgtttatctttcagtctggtttttccaattgttacttctactctgttgctgatttttctttaaatggattcctttcaccc

SEQ ID NO: 239029 - DNA, 3761 bp, Cannabis indica
aaaaaaaaaataatgtattatataattattaatgttgttattttgctaatttaatattttgatgatgttagtttgagtaattttttatagagaaattgagtatgtttccatgaaaagactattatggttgttttgcgacagtaaatttatgcattatgattgtaaatttaatgtgtttattttgctaatttaatattttgatgatgtcaatttgacaaatttttcttattttgaaaattttaattttgtgaataaaaattgtagaagggtaatatttttatagaaaaattgactatgcatctataaagagaccattatagttgttttgccaccataaatttgatgaacagtgtaaattcaatgtgattatcttgcaaatttttctggttaggttcgggttcggttcagatatgttgttgaagactactctgctcgatgtttatgcgaaagttggggatattgattgtgcgaggaaggtgtttgatgaaatgtgtaagagagatattgcttcttggaatgctttgattattggtttggctcaagggaatagacccaatgaagctatagctatgtttaacagaatgagagatgaattgggtggttttaaacccaatgaagttactgtcttgggtgctctttcggcttgttctcaattgggggcttttagagaaggagaagagattcatgagtatatattgatggagaagcttgatgggaatgtgatagtttgtaatgctgttattgatatgtatgggaaatgtggttttgttgagaaagcttatgaggtttttagttctatgaaatgtaagagaaatattgttacttggaacacaatgattatggcttttgctatggatggtaatgcccgaaaagctcttgagcttttcggggaaatgagggaatccggtggtgtgcaaccggatgcagtttcgtatctcggtgctttgtgtggttgtaatcatggtggattggtggatgaaggtgttaggctgttttattcgatggtagagttcggtttggagcctaatgttaagcattatggtagtgttgttgatttgatgggaagagccgggaggcttgaagaagcgtatgaaataataaactcgatgcctacttcgcctgatgttgtgctatggcagactttgctcggtgcttccaagacgtatgggaatgtagaaatggcggaaattgcatcgcagaagcttatggaaatggggtctagtagttgtggcgattttgttttgttgtcgaatgtttatgctgctcataagcgatgggacgacgtagggagagttagggaagctatgaagaaaagggatgtgaggaagataccgggttttagctacacggaagttgaaggcgttattcataagtttgttaatggcgatcaaagccacaagaaatggcgcgaaatttatggtaagatagatgagatacaattgaaaatgagaggctttgggtatgtggctagtactaataatgtgttgcatgatattggggaggaagagaaggagaatgctttgagtcatcatagtgagaaattggcagtggcatttggtttgattagtacaagtgaaggaacaccaattcaagtgatcaagaaccttagaatatgtggggattgtcatatggtaatcaaactcatttcgaagatttttaaccgggaaattattgtgcgcgatcgagcacgatttcataggtttaaagatggtttgtgttcttgcaaagattattggtaaaatttgataaaacagttcatgaagtttgagaagaatatattaaagtacagatcatagtttatacttttaaccaaattccctctttttaagagtttggggcaggatttatttgtttgatttcacagcattctttattgagattataaacaaatggaaggaagtacttggtaatggtgtaacttatcaaacttatttatcaatcgaaatttttttatgttttaatttttatacacttagtcttttttattttatttttttgttttgggtagcaaaatctccttaagtttatttttctttataaatttaacacgacaattaaatattatcgttaaatatcaattggatgtaacagtaaaatctcaaagttgatacagtagtaattcaattggtatttaacgataatatttaattgacaccttaaatttataaagaaaaataaacttaaggaggttttaccactaaaaaaataagaagattaagtgtaaaaattaaaatataaaaagatttcgcaataaattcttcttttttttttctttttttttgagaaatagtacttttggttttggttataaaaatgattgaaaaagacatgagttaggaatcacacaaacataccgattaaaaagcatcgtagtatttgaagatcaagaaaataagagaaatgctacaaggcatcaatagtatctctcttacgtgtcaatatcactattagtccaactaaatatcgtatctcatataatttaatgtaataacttttttaaaaatatcactagccaattacaaagtaacatgtctacagatgctaaccactgcccaataataatgttaagaaaataattatctttggagagtatcattaaaaatcattaattatcttttgaaaacattaatgattaatagggaattttttaaagcatggtttttttagttgttattagttaacatgtaaaagtatgcctgaaccatcttttttttttcacttttttaaagataattttaaaaagttttataaatttttttttttttggttgtaaggatatagaaaactttctacaatcaaaaaaaaaaacaataactttaaatcccaattcaaaataaataagtggcttaaaaatcataaacacagcacaacaatgattccatctagttattactttcttcttcatcttcttttattatattttgaaagaagctcaattacaaaaatattagctctaatacaataaatttagatactatttttcctttttcttttatactataaaacaatagattaaaagaacaaagtactcaaagagtttagtcataatagcctcaagaggccatcaagcaatttaagtagcataattaatataaatcaacatacaaaactacaagtacaatcaattgattctccaacaacctgaccctgtaatctaattgtcaaatcaacatagaaattaataatatactacacagtgaataaatagcacaattacaaagcacataaaagaagaagaacacatacacattatcaagcaaccaaaaatggaatatgaactctattcaatcccttgcttgagtctctaaaacaaagcctcatcaattttcctattagaagggagagagcttgaatcgatatggggacaaatgtttaaaagagacaaaaaaatcaaactactactctcttttaattggttttgcttcgaaacccccttcgggtctttttaccagattgtatggcatataagtgcccagaagtttatcccataatgggaagaatggctgagaatagttgtactttaagccttgaagttgatggtgaatgtcatgataagcagtgttattctggaagaacagatgaaagatattacctggtaaccagagtccacaatgatcatcgacggttttaatcaccgcgaagctgaagaaaatgactgctgtccttgcagtcatccccgagactagaaatgaaagggcccccccgaaagtatcgagtaaaaggccctcgagggggtgattgtaaagggctccgatagcata

SEQ ID NO: 239030 - DNA, 4972 bp, Cannabis indica
atatatatataaagatatataatgttccttttgtgtcacaagataagttgggccaaagtcccactaagctttagaagattcgacattgactaatttgattgcttgttgataaagtaattaagtgttatacagcgttgtcttgaggaaaagttagaactgaagaaacatcaaattgcagaatgagttcgagtggagagccatcctcttcagttggggtaagattttgaatatcgtttttttatcatgataatgatttgagctgtttaatgcctattataacgttttcatcaaaacaaataagtaaaatctaaacgtatcttgatcttgaacctattcacctactattattattattatgatcacaacactaatactttcttgtaaactacaggcaatcagaagcccaaatcctaaaaagaaagacttcactcacttcatttcacttccattgggaatacatcatcctgaattcgttaacaagctgaataaattccggaaatcaattttggaatggaaaaacttgacaggcatgagaatcgaccgatttctatttactaaaccaagatctcttcactttactgttctcatgttaaaactatcgaacgacgacgacgttgctaaagcttgagaaagttttgcaggtaaagttgagtgagaatttgatataagctgttgcctggtagtctctcacaaattattaacttctttttttcaggatgtctcttctaaattgatggaaaccttgaacaacaggcctgtctccattagacttcggggcctggtaagattaccaaaccttctaatttctaagttgtgtgctagtgacttcaacatttgataacaagaaattatccttcatatttttctacttttacagaaatgtatgggggatactcctttgaatagagcgcaagttgtgtatgcaccacctgtggtagatagtggcagtgaggaaagacttcttagtgcttgccgtatcctaaattctagagaaattcattacatttcattttatatttttgaagtaatagttcgataccttggttgttttcttagctttctgctttttagatgtcattatcgacgcatttgctgaagctggacttgttgacaaagatgctaaggacagattgaatttgaaggtatgatgttcgatcgaaatatgatataatgttaactctgtcaaccacttccatgaatgggtttattgaacatgttaacagcataatctttatttggaactagtatctattggtactcttcataaccaaagctatgaatttgggtggtgtataattccaatctgtgttacagtcaaattgttttgccacaattcagtgtgtgtggttcttgaagcttaattctaatatggaataccaaaaaacagatatttgttacacagccttaattatatcagatatgtacttgttgaattaactgtttattgtcttttaaattacagctgcatgttactttgatgaatacaacttttagaagatggtaccattaccttttgactctctaatatttctcttttttcttttcttaattatgtttacaattatagtgaatgcacagttttttttttttttttttgttaatgtaagaatttattattcttatgggctggatggccaaagcagggaaaaccccgattattttgatgcacagtccatttttgagcagtttggatcagaggaatggggggagtatgctataagggaagctcacctgtctcagaaaggtcggtttgaagacggatatttttactgctgtgcttctgtgccatttcctaaaacttgcaagtagagtaattttccaatccttcttttagaaaatgtgtttacttttctctttacttgattgtcaaagttttataaccctataaacatgtataatttgtatgtgtatgagtgtgctttttgaagagactgtgagagtgagtttaaagagtgagaaacaaaggttgtagtgagagtgagtttgaatatatgtaatatttaagttctaagtgaaaagctatcacttttcttgtgggtttggtgatctgcttttttattattttgccgctgagcttgaaaattatctttctttttcctaacatagtttagttttgcttctttgcctttctttaaattgtaaatttccgaaacctgagcccaacaaagctaatacaagttctctttgtgtaaaagcttaatgtttatgtttgttggcaccaatttgctgcaatgctattaaccataccgagtatttattgacataattcaccatggctattcctattctgggacatttcgttacactatgggatattacttgcatagcagagctactagctagtactcactctataagcatttatcaatatccctaagtgggatttcgctaaaataactaatttagatatgaaatattgaattgagctggaaggaaaaaaaaaaaacaaaattgacaggaaaaacaaggtgtttattaccacagcgtatgtgctggggatcccagcaaaattacaactttcaagaattggcagaattgtttattttctttctctctacactcgttgagactatatatatataagtgaatgtagaattaagtttctaacatttgaagttggtttccaagtgggacacatgtaatgagtctgttctcagacagtggtatatatataattgataagcaacgactactagataattaaaactatgtcagactcatcactgtattgttgttgttattgaacatggtttgtttggttaggtaattgtataaaatttatgaaattctttaaaaagaaaaaggagtgagttttagctggatctgaaacaacatatatgaacaaatggtacttgttcttgaagctttcccttcctctgcctcacgctaaaagtggttgccctgaagctttttctctacccaagatggtgacaatactggactcaaaaccggacttatatcgtcagcaatttctctttgcggatcaatagttggatcttctaagcttgccttttcagaagggaaaactttaactctccacaccttaaaagtctggtccaaacttgcactataaaccaataatccctttactccattctctgtttctagagaaactgccaaacatctcactggtccatgatgaccttcaatgactgcaagacaagaatggaagcaattcccttctcttctccaaacccgaatagtggcatcctcagagccactaaacaccaactctcctatggcaaccagacagagaacagcaaaatgatgaccttgcataaaacctccatggttatatctccctgaggtcttctctttttcccaaaaatttatgatcccatctgaggaaccagagtacaaaagacaagtccctggtgacaagctcaaagccaaagcgttaacaggagaaagttggaacttaagggtcattgtcaaatatgagaactttctccaaaaacccttctccagattttcactgaaccatcagatgagcaagtgaaaacacacccatcttcatggtttataactattgcgtttatatgaccttcatgagccacaaacgagtcaacacaacgcttttcattgatcttccaagctttgaccgttttgtcccaagaccctgtatataaaagcttgtcatcatgattataagctatgcaagatatgtactccttgtgctgcaatacattctttttggagaacagcattaatggactcctctgaggtaaagtcgtgatctttttaggcctaaaactctctctatcagaaacatcccaaacacgaatcttgaagtcaccatgagttgtgaagagcaattttccataggctaaaatggcacgaacatgaccagaattggcctttatatatcccatttcagtgcaatctggttgtttccatgcatgaatacgactactctcggagccagtaaaaatgaaatctttacagagtgcaatggagaaaatgttaccttcgtggcgatgaagagacgctatgcaatggtaaagaagtggctgagttggagaggttcgaactggagagagcgtccatggagtctcagatgtccgctctggactcattggcggcctctgaggcaggtgctgtgtcggaacagacgtggttgtagcagcagagggtcttgacggggcatagtgaacaccgccacgatcaggcgagttttgatggtggtggtggtgatgatgatggtggtggttaccaaaagagagtctcctaggcaagttgatgctttttctctcatcgtccatgaaattccattggttgtttctctctccatggaactccatgggagatgaacatgaactgaagaagaatctgacattgaatttttttaaaagagtggttaattaaaaaataaaatgtctcattgttgtttgttctggtgttaaatttgtagttgggtggtttatggctattaaagatttaaaatgtatcccctattaggctatagatttatttcatttcaatgaatcaatggcacttacctaacaatgtcaagaaaatctttcacccgaagtcattaatatttatgctaagttgattaagagggaaaatcttgaccattaaactgattattatcaatgcccattaaagtgtggtcgatggttttgggtgcaaattttgtggtttaaatagcttaagaataaaaatgcagcaaaggcataccccacaagatagataggggagagactaacaccttcagttaccagcttgatgtcgaaagtagttttagattttaatgtcaagagtaatggttcgaactaccaacttcttagtagaataaagattgagtcaagttcacaactacattttcgatatgcgtttgttagagaggtgtgtacactaaatatcatatataataagatgcattggctacttttcttattgacaaattagttttgagatgaaacgtcatgtatcttaccaaacactttgggagaacaggttcaaaaaagac

SEQ ID NO: 239031 - DNA, 1693 bp, Cannabis indica
ttaaaaaaaaaaaatacaattcagtctatattattaattataactaatgcgtgtaaattaagtcttcatctaaacttctagtcaaaaacaatactaagggcatatataattagaaaattattgtgtaattagaatttagaattaagtgtactttagagtaattataaagtttgacgtgtttgttaaactatataattatattgtataattaaaaataactgtgatatctcaattatactttctaattttcatagcgttataccatgtaattacaatatattatcattttaaataattatgttattaaaaaacatgttattactgattactaactcatttgctaaatatcctattgtaatcttattgtgtagtattactcatataataagtacatcccatcctattattatttatttacaattgtttcatcattaaatcatattccaatatggggtacttatatatataggacaaaatgtcccaattcaattccatgctcaactatcaactatatttaataaaaaatatcaacttacaaaatatcttatcttttccaatcacaatacattgtgtcacaaattaaatattcattaaaaaaatcacaatcattaagaataaaataaatggtatgtatcatttttaggcaaccttacacaataaatactagacaatgtgtgaaagattcttttagaagaaaatctcaatcacctccctcaagagcaaagtgttctaaagaatgaggaatgggggcaacatcatatattgatcaacagtgttgtttgaggcatgacactattattttgaatacaatttacatattgcaagtctaacataagttgctagtggcaatagataaataaagcttaacaagagtatgagaagttttgaacaataaaaaagactagcaacattaaaaaagagcaaaattataatcaatatcaagaaaaattaagtaaaaaattgtccaacaaacttgtataattaagattaattacacatataatttaagtgtgttatattagaatttataaaacactcaaaaaaatatatataactgatctaaacgtattcctaaaagtgttttaatgtaaaaaaaactctaaatcataaatttataaaatctttgttaaattaaagaaaaagaaaatgataaaagatgagtagaaacactaacttaaagctattgctgaagaatgataatatgttaaatgtttatataacttacttcagtattatgtcattacgtatgatacatatattatataatgagttttaggtatttataatttggccccttaataaattataaattaacttatggtatctacacattattttcatgataatttaatacttttttgatacccataacataattagtcatttaattttgtatcataataattttttaatccatatagttattatttatgataaaaaaatattttatttattaaagtgtctaacaaatatatttttcaattactcaagttatgatttgattcttaaaccttacacacccaacccccaataattctttattgacacttgagctagtttcaaatgataaaataaaagggcttttttatttttacactttaaaattttacatagaaatccttattataactagcgctgcaacctaaattgcaacaaaaaattgtatagaaacccctattgtaactagtgctgc

SEQ ID NO: 239032 - DNA, 3082 bp, Cannabis indica
tatatatatatatatactttactaattaactgtcaagtgggttgtcacgcggacttaatgtatacatggtacaattttattcgtttatttattttatttgaaataattaaattgggtagaccaataaaattgtacctacgtatacattaaattcgcataaacatcgcataaataatttagcttagtaaaataattaaatgctaagagaatgcgggtattagaggttttgctgacaaaatttggattttgagtacttttttttttttgaaataatgaattttgaataatgcatatcattaaaaatagaataaaatattatgaaaatatatttaaaggaggaatacatatgaagaaaatagaaaagaatttacatcatttgttagatggtgtatttgcgttattattctttaaatttttaaagaatcttcattttaaaggaactattggagtgctctaagaaattggttatcattctaattaccctaataaagatatctagttacgtaaataaaatatttatttttaaaagaaaccatattttgtaactgtaaaaaaaaaccataaaaataaaaattccccccaaaaaaataaaaatagtgttttataggagtaaatccaataatatatcatagttacattacaagtatagtttagtggtactatattttcctttatttataaaaaagaaaattctaagttcattactagccaaatatttgaaaaggaaaaaagaaaacagtaataataatatacgttaataatgtaatcctcataaagaaaaaaagttgattcaacatgtatcttcctttctttttcttttccgtgcgattgaattttaagtaagaaaaagaaggaaaaaaacaaagtgtgtttagccttttgagtacaagttgcattgaaaaagaccatcaaataggaaaaagggtcatggaaattctgtgatcacaagagctcgtgggttgttttaacatgtttaggttaggttaatgttcatcttagttttgggctcggctcaagtagcaatcggggtcttaagtatatagtaaagtaggtccatattccaaaccatttttgtggactagaataaaatgctcctttgtgtgaaaatgatggtggggttgttgggtttattacaagtccatttcatggaaaatacaaaatagtctttattttcaacaataaatgatatagcggcccctctatataaaatagggatactgttaaaaggtgtttattggaccacatctaatatttttagatttatttagattcaatctaattaattttagtaatagaattgatccaacatccagtagatgttaaattagagcagttctatacaatagatatatttcatatatatatttattagtttactttgggtttatctaatattttagacctattatttttagatcggattagatccatctaatatttaagtctagcatgtattagattggactggatccattcaatccaagaaataaagattaaaattttaatgttaatttgaatatatacatatagattttacgtataataatataaaatctaattgctcatctaaactaaatgaaaatattaatcagttcgattaaatgttggatgtattggatttttgcacactctatccaccatctgattcgatctaattgaatatttaaaaaataacatccaatccgatatgatcacaattagatatctaatatttggcagccgattataattggatcggtcagttctcattagattagatcgatttatgcacaccccagagataaattgagaaatatctattttttgtatacattaatcaaaaataatcttatattatatttcattaaaatatattcacttttgtgaatgagttgtccaatgtatactcttaccctccacttaagtttagcacataatttatattaatttaagggatataataagaacatcatctataaaaataagtatatcttaaagaatatagaaataatgataaaaaattaaaaaaaaaaaatcaaataagcatataatataatttcttctataagataggccttcaatttcatgtacaaaccttaattgttaatgaatactattgactatcattagacgttgagtttgggttgcaggtaattaatcgaaataaattaaattttataaattaaaataaactgaaagactattttattttaaacattttaaattttatttcatttcatttttttttaattatttgttttttcatttttttttaattatttgtttttatttctctcaattaattgtacttaattataacaatatcacatttcataataatgatgagcattaccggtgccttaacatttctagttataaatattttattattaattattaagtttcgttagcgaatatgaattcaaattttggaaagttttttcatttgaaaaaccctagatcatccttggacatacttgtccataaactcataaaaccaaacagagcaaagccagagttttaaagcaaacataggatacataggatgtagttgctcacttattacaaagttatattataacatttcaacaattcaattggacaaataactacttcacatagatatataggacaatggccagttgataatgctctaaatctaatggcaagatcgaccaatgaaacaaccattaataatctaaaatttattctgaaagcatttaaaaggagattcagtcattaattatgaatttatgcaggtcatctgattggcctaatcatgttttttttttttgttatttcaatttcaacataagtaaggtataatatgattattgatagattttacagtttcttcaaaagattgttggttggcatttcatgttgatacctcatccaatatctattagtttttccactctatattttaaattatctaaccaatttcttatttatttatttattttacttcacacttttacaatacattaagccatacaacttctctatatatttatatacatcatttaaatattatatatttaaatatttttattaattaaataataaaaacaaaaaataaataaacatatctttatatatt

SEQ ID NO: 239033 - DNA, 2853 bp, Cannabis indica
tattttttgtaatagggatttttattaagtataataaatgaaatttctcttacacaatcagtctattgccctcatttttggttcaccctcttaccatgtggtttctcttcttagttctcggttgaactcgttccaatcatcggtggtgcaatgcaatcccaccatgagattcgcaagcccctaaaacatgaaaaccctaagcactctctccgtggagctactctttctctctcctttataataagaaggcattcattggaaaagaacactcttcaccccatcaataattgataaaaagaacaataattagtaataagaaaaaacaaatgtgttcttgcccatcagacctcctaaaccaccgtaacctaaaaacttaaataaaataaaataaagaaatactaacatattttatgggatatagttaatgtttacctatattgcatatataatatttaattaatcgtttgtggtacagcatatcccttcagtgagacctaaaacgtggaacactaaacaccatatataagcaactttctctttcctttatgcatgcttttaggtgttgcctcaataagtacttgcaaaatttcttctaaataaataattaatattgaatcatgcatgcatgcatcaatataaagaacaattttttacattattaactacacatattataacataattacaataacacagttatgtatatctgtgtgtatttatccatgtgcacaatctatattttagagtaaattaacatgtattaattataatgtactctctactcgttttgagtggtgatcagtagaccattgattattatcggagcaatcattaattccccctcaactgccaaaatggatgacataaactcaaattaacactaaacagaacccaacagtagttacgtactttatacatatactaagccacgtgcacgtaaaaattattcacctctaccctagcctacaaaacaagcagctaccaatatataattaagtactttgatctatgtataaacaaacaatgaggacttcttcacacgctatctatatctacataaatatatatatatatttatatttatatatcaaagtacttatcaccaaataataacgacgcgacatcgtatggtttcctgtctcaaattttattcatattggtatagcactgccactgttagtgtgcatatgtaaatctcaacttaaaaaggttcactatataattatttttggtattaaatttttctctaatattatgaacgttttgatatgtattagaagcattgatcactaataacgaagtcaatattaaattagccatatggcgaatgtaattctgcatctgaaaattggaagcagatctgcgccaaacatttttcctgatacaaaaaataaaataaaatatgtaaaaattaatgaccgaaaatcttcgaagagttttcagtatgaaaacgggacaaataattaattatgttccttttatttttttcttgctattaatttatttcccttcctgattaacgtatctgaacgtcctgacccattcattaatatgttagtaaaagaaaaaaaaagaaaaaaaggtgccgttaaaaactgaaagaaaaaaagaaggggaaaataaaaaatttaattcggctattaatttgctgaaagtagtttgataatttactttatgggaccccttattaatatctagaccaggctttatatattgcactgagagaattatttaattatcatgtttctatatttataccaataataatagaaataataacatactgatcttatctaatgccaagaacagagacaccgttatgtagaagttacttttctggtgcaaccagcacagaatttaatgtcaccgttatttattttctttttgagaaataaataaatatgctattatttttcctttagaatatatggtcgggctaaacttgattataataatataaatatgctgaatattgtcgataaattctagtttgatcagaggaaagaaaagctaatattcaattaaataattaaaattgtgtacatattaaatcactgtgcaaaatataagaaatttgagtatttatataacagcaaaagtcatggccacagccacacacattaatgatcatgatatttatactatatatataatattttttttaaacgatatatatactaattagtttaccgattttctgtataaataactcccaataatctaatccattcctaataataataataatcataatataaataaaaagtataaaaattcatgataatgcttatgggagaataattttattatgatcattatcaataattacaaattaaattatatacatagcctttaattttaaatcatagctagaactctattcattgattaattaaggggaaatttacaactcatgactaaaaagtaaagtattttacatttttacttgtgctccgtatctttttattttgtacaattcattattttcatcattactttttaaactttcattaattacatttttacgatttggacttgaatatttttgtctatatctctctcccctctttattttcttgttcattttctatgtacattctctctttcaacacaattatcttctacaatcaggtcatatcaatttctttttctccttttttatttattttttaaaaaaattattttttatagttagtatacacccatttcacatacaggtgtttacaacctatagttgtaactagttctagttcatcttcccctttttctactttttttttttttctaaaaaagctaataaaaaaaactctaaaggttttcttgttatgggtaagcaccataaaaagcatatag

SEQ ID NO: 239034 - DNA, 2498 bp, Cannabis indica
tatatatatatttatatatcatgttgcacttactttaacggtttaaaccctcaaccctctttcacggtagagtgcttcactacactttgcctcgagattgaaggttccagggctgtagagaacgaaaagaaattaggaagaaaaacaaaacttagatttacttttttagtgatatacatgattctaatataattaagtaaaagatacaaataatcttttattagtatacctcaaaattcctcaaatttattgtgtttggttagtacagtatatatatgtattaattcatctctaataataattgattttgaaatcgaatatataatgttcttaatagatctagtattaaattaccatatgtacctaagtggatccctgcctcgaacaaaacagccagatttctgatcagtagtggggatggatttaatgattcatgtcatccacagttatactataggtgcactacttaaatcaaattaaaatgcagaataatatatgtacataattgaacattaatatatgcagaataaaagaataaaagatgtaccctaggaaaaagaaatgcaggcaatattcatacccatgcatttattttatattttctgcatgtgttggattgatcataattaaccataatggttaaaatagatcccattgcattttatagatataaagaggagttcatgaccactaaaatatagtgtcccgtacctaggagattgaaattgagttttgacataagtcccactcatttaatattatgtttgataaaaaaaacactcatttttgtttaaaaaaattacacaataaattaaaatactcaaatttcttttaaaaaattaaaaattaattaaaaactcttttgacattttattatacttatgccattttaactaatcaattcactattttttagttgccaaaactaaattattcataaataattattttaaaaatgtcacattttattttttttaagccacattacagttttaaacatttttttgtaattgttttttttcatcgatttttttaattatattatatcaataaaatttatattttttttttcatttttaaaatggtacaaatttttaattcaattgcaacatacaataattagaagaacaaatttctaaccgtcttaagaaaatcacactaaataaatattttgatcattactattaaatattaatatttaattatattactttattactataatgatagttaattataatttagataatcatatatcttaatgtaatgtttaaagggcgattgtttttgttttgttttttaaagcattagattatttatttttaatatttggcttggtaggtaaatttatcaaacaaaattaattagtagtatcacttttgtttggtcctattatatgtgatgagtaggtatattataagggattttacagaaatactagatttggagtaaaaatttacaattttaatgtcacacaattttttttttacaaaaattctatctttttataaaacaaccgaacagaataattaaaaaaaatagtggaacaattaaaaaataatcgtggaacaatagtaaaaaattaacacagtacacagtataaaacttacacggtatttttttaaaaaaaacacagtatttttgataaaaattctgcctcacagttaaaaaacataaaaaagttagaaatttcaatatgtggtgtaaaaacctatattatagtatttttatatatatacatttatatgtatagaattattacaattgcatatatattataggggaattattcaatatactatttttttttaacttttttttttcaaatttagagtttgagtttctaaagtggttgcagcgctagttgcaataggggtttctatgtagaatttcgtaaaaatgcaaaagaaaaaaattattttgaagtgtaaaaatgaaaaaacctcttatattggccatgtttgatgtgtgtattctattaaatttttttaagaaaatttataataatctatgtattatacggtagtaattttttaaaactgtaaaagaaaatgtgacatttcaagataaagttatttataaattagtgaagtgatttagttaattgcataagtataataaaatgataatcttatgactaaatattaagtaaaaatagacattgtttagtaattgacacttgaataggacaaaagattttaatcaatcctagtttaaatatgttgcattcaagatcacagtattacaatgcaattgcccaattaaaataaactattaaatgccctacaaatgagatgctttttaaattccccaccttaaaaaaatccaatatatattaataaataatgtactattgcacagaaagatcagtattgttaattctatttttggcatatttaattgacaaaaatattttattatttattgtatatttcggctggtatgtattaatatagtttccttattttgtgtaacgccctaatgctaaggcacgctac

SEQ ID NO: 239035 - DNA, 3154 bp, Cannabis indica
tttttttaataataagaaacacataaaatatacggttaattatctcattagtggttgaaataaatgtgagaaaacagagcccgtataaacaataagcactatctactaaagttggagggagggtttattaaaaaatagtatctcttatcaacaaactctaaatacaattaagattttctgaccaccaaataatactactatttctttatgagttaaattttgaaacaataaaatttatatttttacaaaatttaaaaaatataaatagataaacagacacgtttctatttatagcaaatttcattagagctaattgactatacaatcttaaaagatcctaatgagtttaaaaatgttgcaaagcattgctattataggggtatcgatgatacatagcaatattatgagataatattttgagagtggttagtgatattttatacaaatcattatattaaattaggtgatatttaatatttaattgtacttatataacaataagacatttttaacatactccatgacttttagcatttttcattggtggataattaattaattaattaataatgagcgatgaataaaaaacctgtctcaacccttcttgatcatggtaaaggtaaagtaaaccacaaggtaaaaaaggttattgttgtagagaagccaaaatgagtgaagaataaatctaaagcaaaaactatgcaaaacataaatatagcgcaaccaatatattgatatatagatgagagagaggaataaaaacacctctatacatcaaatttctaagaaaatatataagaaaattaagaagagaaaaagataagagcatcatgaaaagtttaaaaattctaccgaaaaaggaaatgatagcttcctctcgcatgggtaagcatgtatactaggtttccttaataatgcaattattctccatttgagtagggtaaattttgctcctttatcaattaacacactatatagtatatatgtcattgttattatctattttctttactaataataaaaggaaagaggattttactttatacgttaatgtgttgagacacgtcaataattgcaatctttattattattattattttatatattacatatataaggtgtataagtataacaatgtacttcgctatctttgattattccacaaaaattaatatagtatgttttgagcttttgattgatccataatctgttacactacactttcaatcatcttataagtaattgaggacagaaatgaagaagaagaagagtaattaatatgatcattacatcgttcttaaatctttaataataataataataataataaaaacttatctattttgctttgttcaaggagtttgggaacagaatatcctgcaaaaaaaaatgaggagaatagaaaagaaagcagtgggctcatgacacgtcggtacggaagtgaccaaaccacgtggctaagcttaatgagcttctataatgacgtgtaccatgggaccacacactcctcattttcatttcttttcttttattattttccttttcgaccaccattaataaggaccaccaaaccaaacaccgcacagaatggccattctacatatttgcaaagcttcatacagacacacacgcatcccacgcgcccccttttttccagggtgtagaaaggtaccacgccaaaaaatatagatcatcacgagaagaaccaagtgtaatgagaaatatgtaacactttctctttgaataatatacacattttcgttagtgaaaaaattcaagttcaagagttgaagtagatgacacgcgcctttaagtaatgtgatgtgtaaattacaataataatatggtaaaaacataatgaagaagttctgagcaataaccttgaatacagaagccaggatgggccccacgacaatacaattcatatgaactataccaactaagggaaatccaaatttagcaatccaaaatataaataagaaaataaaaataaaaaaaaaccgaaattccgttgccgggttaagacgagccaatacgaatgcgtgccacgacgaagacagagaaagagacgggaattcaaacgtcataacggattcctttggtttcacacagataacggacgccgttacatgacgtgcgaggcagagtcgcacagaagaagactaaagagtagagtagcagtccaatagtccattatggttccccataacgccgtcaaaggccgttgggcttcggcgcagagagtcagtgacgttgataattgtatatagacaacaacattaaatgctccgccgccgttatcagacggctcaattccaaacatgcatttctttattcccgtgatgcctccctactccctaccccttacctatattaatactattaacaaattaaatttgctcttaccattattatttatttttttaaaaaatgtatttaaaatgtggtttttttttatagcattactattaggcatcaatggtgcgtagcgccttctcggacatatcgcgttgcgattggctagcgatactccataaaaagttactatattaaattatatggggacccgtatacttagtttgaccaataacgataataacacataggagggtgctaggcaccactggtgcccttttaagcattttctcttctattacaaggatgcggagtacttaaaagtgtggtatatttttttttaattcaatatttatatattacaatatatttataaagctaattaagatttttgtccctgaactttgatatgtactaaatcatgttttttgaagttttaaagttgtcaaaaaaacccttaaactatttgagattgttgggattttaataatttgagaagcatgatttagtatatatcaaagtctgaggagcatggtttagtacataaacaatcactgaaatagtaaaattgaatgaaattagacaaaagttcttaaatacaacaatgtcaatagttcaggggcatttttaacgaccttaaaagttcaagagacataatttattatatgtaaaagttcaaagagcaaaaatcataattagcgtatttataaaaatactctagtcaatttaataaatatttatatatattttaaaatatatttaataaaatttatatacatttaataaaaatttaatattt

SEQ ID NO: 239036 - DNA, 9216 bp, Cannabis indica
tttgcccacaaagctgtcaaatctagcgtagattttaaagactactagtactacttgggtcgggaaaagagttgcggttcgtgctttgggtcatattgctagccatgacagaacctttgaagccattttttcaacaaggtatggaatagaggtcgtgaaattatcaatggagatagctttaacttgtattgatgaggtatacgacaagtttattggtataagttacaagaaaagattgaattgtcattctaatcttcttacaaaggggattggtggtatacgacaaggtatgaaacagaggtcgtgaaattatcaatggagatagctttgacttgtatatttgtttacacattctcaatgacagagcatgtctgaaatctacaacagcagtacagcaaaaaacatacctcccatgccatcgccatttcagcttcaaactcatcccatctataaggggtacaaggtgttctgatagcaaagtcaaatcctcgctcttccctagaagaatgaaattttttcaaagtaaatacaaagtgaaggttaagcaagatacaaatacataaatagatttgaagaagaaaagaggggtgtacattttgaccaaggtaatccttgtcccttcaagccgcttcctgaaacaataataaacaactagtaacttggcatgacacactaagatactgccaggaaaaactaaattttaaattgtatgcattacccctcaaacgcagtactacaacaccacgtagcctgccaaaagtcctcaccaactgctctataaagatcagagcaagaattcgcatccataatctacaagtgaggtcaataataaaaaatgaatgagcagaagtccacctactatgatcatctatagcccaactaacaaaaaagtgtcattgcaacataatcttaaaaataactaaaatatttaaaatactgcctgaatcacataaaaaataacaagagccataataattttaactgatactagtaatttaactttactttgaatataagacacaatgtaatataaatgacacctaaactattgcatattacacaagccccagttgtaattctcaattcgtccaggctatggagacatgtcagaaaaccactggaaattattttcaataccacaagtacaaaagaatatacctaatattaaaggtagagactgattgaaagtaaatattagatgtaatacttagtaggatatgtataaaatatatataaatatctataaaagtgataactcttcacaaattttcctgatatttctcagcatagaaataactcacatcttgcaacttctcatctccagaaagataaatgacctcatctgctttgttatacacatgttttttctcttttatgaccctctttgcaacctctaatgttctgcagcataaaaaaaaagaaaaaataatgagcaatggttttgcataaggaaaagtcacttgaatttcactaaactaaaatagaaccattacctttcgaaatttgggaagtagcggacaacttttgcttgcccaagaaccattggtgtatgagatccaaatccagaattgaactcttcgctgaaagcacaaaggttaattgtgttaaatagttaattagggttatttaagtcttttccattatttaagtcttttatgttagttgcttatataaccctaatctctctattttctctgcatctttttttctttatttgttattctcctcaaataattaacaaataggtacatacacaatttgacttttgtcacacaaaagcacgagcaaaatcaagatgaaaatgaagtaccttaatttgttaatccacacaacaggatcacaaggttcagaaatttgtctccatttgacagccaatgagtaaacatcttgccaagacatcattgtattgccaaatgatttgtcttctagagtaccataggtagtactggtctctgagtagccacttgtactacagccagctccgcctctattctggctgggcatattaactttctcccttcttcgtgctttcttactatttcttgatgtgcttctattcaaatatttgcgccaagcttttgaaaccttttgtgcaatttcaatagctgccaagcccgccattcgatgctggtaaatacaaacacacacaaagccttaaaaaaagtaaggcatgaacaatgatgttctatataggaattactgaaaattattcattcagaatcaagctattaaggggagagaaatgaataacagaaaagatggacgtgacattagttgcaactatctgaaactaaatgctcaattgatgttctcatttcctattttagtgaagaaaataaaatgcctaagtgatgtgaagttgtagcactaaagtaaagcacaccatgaggcagctagattctaaattttataacagaaagcaaaaaatctagttacaatataacaaagtgaaatcttatctgatttctgggataaaaagatacctgtcgcctatttggtaagaaaccagagcaatcatattgaattttctccccaattgaatcagcagcctggagaagcgtagtcttatgcttattgaaaacaagatcttgctttctaggtttgcacttcttcaaagattcacgaagaggaggctgtctataaactttttcacatacatttttgggatgcaatcttttacaccagtactcctgaaaattcatataatatttgtcagtccgcataaaattggatagagcaagataaaactaactcaacgtagtgacaaggaagccctgcatgatcataaagctacatgaaaacctatgtagctaagttcattaacggatcaatatcaccattaaaataaaaagataagaataatgatgaaataaaaacatcagcccatattaccttgaaaagtggatcaatatcaccatcgatatcaaactcattaaattcgctgtttatcttggatgctgtgtacaaagctaattctttctggagaagaaaagaagaaaagaagaaaagaagaagaaaaaaaaaataagagaattatcattccaggtatcatgtcatcaggtagatgaattgtcaatacccctttcttatataactaattctgaagagatgttttttttttcctttgaataatgaagagatgaatgttactcattcaaaaaaaaaaatcattttataaatcaattacagaaaatatcattaaataaaaactaatactacaataatttaacctgataaaaggctaggcattgcagtacaaacttatccatcgagtctagttccaaatctagtgcagcatcataatccttaacctgccatatgaacaaatcaaggtcactgctgaacatgcatactgtaaaagaaacaggggggaaaagaacttgtattaccgcctctttataatctcctacagcatggtagcaggaagctcgcaaataaaaacactcaatatttgcactgtcaatgcttaactcagttgacaaatccttaatagccttcctgaaattttttaagttggctatgaaacattgaaagtgatatgacttgtctttaccataacaaatacaaaaaaacaaaaggataaaattcaggcaaacaccgatatggtacattaagtaatattccaagtgtactactagaacaatttgtcccttcattttaaacatgttcactatgaagtcctaaataaagtttttggatcactcctatcagttattaaagttgttattaatcttttatgtttctctgtccttattcatcaatataccttctccctatgcatattgaaaaagcagtcctctcacactttccagagtgagttttgtttcttatccaaactaagaatgagagcaaggtttccatcaaaagatcagcatatcaaagattctcatccaaaataactaaattagcatttcaagttataaagcctatcactaacccaagcagtcactggatcccatactacaaaaaacaattctgaatcctccaaatattgcttataattactcattctatctaaaatagcaatgcttttatggagaacttacctatgctctcccattccatggagcaaaagaccacgcaaatgatatcccttggaaaacctagcaaatggaattaatattactgagcaagcttcaaccatactttcatccatcaataattaggcatattgggcatagcaaatgatacatggattatttaaattatatcaacaacactcaccttccatcaacttgtagagcttgatgaagacattccaaagccttggttgagtttgccaaatcttgatagaactgcaacaaaatcacatactgaaatttacatataccctcactacacaaaaacttatcattactctttagaactttaaatggccaactaaaaccacataacactgtaatggtacagaaaataatgcaggcattgagtgaagactagacatttactccaaacagaaagaatgcaattatagagtcagatgaaaatcagtccaaatggtaaacaaagtggaaattcatacctgagttagatgaccccatgcttcaagaaaattctgatccagttgaatggatgtcaaatgtgcctcctctgccttcttatattcaccaattgaagacaaggccaaaccctgaaaaaaaaccaaagttgcaagcaatttcatacaaaggttgggtcaaagctacacctacatgaacatctatcatgctccaaaatcagtataatttccctttccgaaacagcaacaacaataataatcagtatataatacacaccagttgtgtatcaaagataaaagaagcaaaattaggaaattgggaagaaactttgttgaataatagcaaagatcaattccaggatattcgagagacctggtttctcaccaaaacagtgttcaattacataaaatctgactccccttcccaatgtttcattcccttttatctcccaataccaacccaatattaagacactaaaaacgagaaatacgctaaatgcagaaaccaaataaaataatatcataacttagtttcccaaattatatttgccaccccattctcatcaattcttacggtatctcttgcttaagtataccggattggaggtttatcagtatagtagtaaactcaccaagtatgtatatgctgatgtattattctaatcaagtttcacacatgtggacaaatcttccacagcagcatagaaatccttgaacttgaaattaacatacctgcaaaaagaccacttttattcttttattgatttgcactctaaagcctcaaacaatgctatttgcccttttcatacacgcacttcatcagttcaattaacaattaaaaagtgaattggagtgatatgcttggccatgtttactatgctttggatgcaaaaactcagcagccaagtaatatagtgacgtattggcaactaaaaagattaccctacacctacaccaaacttgcattcttcattgttttcaggcaatcagtaacaacttatagcagactacgctacatcttcgtaatattacatcaaccaatgatgccatcgaatgaagatgctcagatgcccacacataattattgacattcattgtttcaataaaaatgtacataaaacccatcataaaagctgaaccacaactgcgaagacaaggtttgtgaaagttacccctttcatgtagaatatcagctgagtttggttcaaactctaatgcattggacaaatcttcaatggcctggaagaaatttaatatgcaaagctttgtcaaaaccagagaagtagaaaaatagaaacaacaataatattcttataatttattcagaaatgattaaaataactaaatttgttcttatgagtacaagtcgcttggtcatgaaaacatcatcccaattctcctagaagttctctttgaagagctcatttaaatttgaattaaaagattcataagagcaaaaaagtccataagggtaaacccatgacatctcaccgcaagaaattcccccaacgcagctcgggcttgtcctctccgcttccatgcctcacatgctgctggatttatttctatggcctagaatacaaattgaaccaaatgttatgcgaagagtactaaatgtttttagatcttccggatattggttgtcaaagtaccttagtaaaatcagctattgcagcctcaagttctcgttggaaagcaaatgctgttcccctccctattagagcctcgggatagctaggatcctctttcaatagctgtgtatatcatagtaggaaagttaaatgtgtatattgcttacttataggcttaccacattaacatcccgagtcattgctcccaacatttcaactcaggaaggagaataaaaaatgtacaagtagaaaccaaagaagcgtaagtgaagttcttaacagtgaatttctgctgaaaaacatagattacttgaggccctgaattattacctgatcaaagatagatatagcacgagcatagtttccctcattcacctgttaatgaaaaattgtttaaaagaagtacagaacatatgttcctaacacagaatgttcttacctaatagtaattgtattccagacaagcattacgatacataattacatacctctgctatacctctcgatagacgaaaatccacacttattgacttggtctttgatattctagtaacacggaactttttatttttgttggactcgtcactatgtggtatctctaatttactagtactcactgttgaagaagtttgagttaaagcacttgagttgcttgaaatttttgataattcactacaattatcaccagagtcatcacatgattcagactcgcagcacaatttattgggagcatcatgattcccattcatttggctaccaaaatgtcctgcccttgtgtccttctcacttataccattgcagacattatcattgttcgtagatgtactgtacacctcagaaacttctctagaatggttacatgagttagactggtcatccaaatgattttgatttgcagaagtttcaattgcattctcactaatcagatgtcctgattctgatacaaccatagatgactctgactctattgcatgattttcatgtagagaacatttctcctgtttggcaacttttaaaagctcttccagttctagcaactgttttagatcagcagaatgatggacagcatgttcgtaaccttgctcccacaccaaaactgcatcttctttccttcccaaagcagaaaatgcacgacctagataacagaacgcaccagattgccaaaccagtaaagaccaataaattttcaaattgaacacaatgtaagaaattcttgtgagcctaaacttgggcaacaaaataatatgagcctaaacttttatagcaaacacagaagtagaaagaaaagtaattgaaatcattgaatcggattaatcccccatttcatcactaccaacaaacacagagcaacctcttagatttggaacagctatcaaaactcacttgtaagtcatatatttaacgcatgaaaaggaaatttagttaaagtttcttctctaaatgtatcgtattttataaattacgatattattaacaaaccaaatttctcagtaaccaagcttcatttcactttccaatcattacagtctttaaagctcttcaccaattatacacataagttaatcaatggtagtgagccttacaatttaaactaaacataagtggtacataaacataaagtgactaaattcaactgttaaaatacctgattatccaataatcatattcaaaagagaaggattacaaaaaacaagtgtcatattcgaattgagctcaaaactttacataaatatgtcaaagaatcagacacacaaataaataagcgtgattaaaaaaagaaaaggaaggtacctttgagaatgtaagcttgaagaagtgcggggtcaagcttcagcgccctgtcgcaatctttaatcacatgcttgtgcaactccaattgactatagcaaaatgctcgattactgaaagacacagtgcaacattcaaagttaaaaaatcaatcgaagaccattttcatcgagtaggagatcggaagaaagaaaaaaggtagaagaaaacaaaccagaggtcttggatagcacaagactgagaaagcaacgagtcaagcaatctgatggccttggaccagtcacgagaggtacaaagcttggctagctccattctctccgacatagctgaaaccagagatagcaactcggccgagtcactcataaaatcgatcggaatgcgatttgggcgattcagtaattggactcatacatctaaaaattcctttcttggtttctacggctgtggtaaagtggtgcactggggatggtgaggggtaataatggaaaaataatattaaaattaagagtcgaaactgtctgggcagtagggattggcaaggggaaagagataggaacagcgtgttgtaaaagtcggagtgcgctcatggtgttcagtgttcacacgactttgtcacacgtgtgagtcaacatttcacttcctttctttcgtatgtgtttttgggccttatggcccagcccaagcctatggagtaccttaaatggatattttcataaatactttgaaaaaatataaaaaaaaataaataaataagactaatttaaggtaaagatatttaattttaatttttggttgtaaataaatactaaatttaattgttaacggtaataatacttaagttatatttttaaaactctataagtaaatgaatcattaaatgttaagtcattatttacgtgttatttttctcttagtatatttaaactaattttcaaaaaaaataaaaatttaatgacttggattgtcacgtggtaatttacttaacacttaacagctaactacctacaaacaaaacttttagaattatagcttaagtattattaccgctaaaaattaaacttaaatatttatttgtaattggactcatatttttctggatgacaaatcattcatatcctgattcagagttctctagatccagaagggcatctcgcccaaggcgaataagcttctctgaaagcattttagatgagcggaaggatgggcttcacacctatttgaggcccatgatatttacatccgagatcgaacctcactaattcgaaaaggcattctgccagaatacgaaggagcaattga

SEQ ID NO: 239037 - DNA, 1890 bp, Cannabis indica
acagtatgatttcacacattctatattctaataaattcccttaggtgtgtattttaatactttcgaattacgtcaatttgcatctacttttggagtgtaattttttggtattgtatatagtactttcttactgtttctttcttctattttataacagctttaaagtcaaaccttaaacccatctaaatttccatagctatttacttccttttttggggtgatttaaaaaaaaaagtccataagtatcatctcaaagcttcaaaattttggtgcctgctcaccaaaatacttgactagtgactaaaaccaacgtatgttaccaaggtcattggagcttctttaacaggtcttcagatgcaaatacagacaagggtcgcagttgaaacaggtaagtatatacgcagcctttgtcatgccaatttgcaaaagggatattttattgttcattgcttgtttttattaagaagccagctgtggtgttaattacttttttccattatcatgattaagataatcattaaaagggcaagttgtttatgacgatagaaagtgaaaaactaatataatgctcaatgtggtccatatatatacttggagatattagagtataagaggtcaggctaataaggggtaagaatctatttcatttccaatccccaccactgatttatatagaaatacaatgccactccctttattatatgttgagtattgttatttggtagtagtagttttgctggataatactatcactagcgtttatatttcataataattattaaaataaaatatatatttttatttttaaatatttaactaattaattaattatttatattgtattattttacaaataagataggattgtcagaagcattctagtaagctgtagattttttttttatttaagatttatgatatttaatttgcgctaataatgatacgatatttcacggtgatattgaatgcctgtagtagttttaaacaatttttttgtgaggcaaacattttttttgtcctttctagcggggaatttggtataactgaagtagaaaacagagatactaataaaggaagtacgtaaatcaatacaaaatatcctcaaataatacgtggttgaattatatatggggctgatttttttgtgaaataaaaggacataattattatgtatatatacatattaaagccaatgataagattctagtcaagatgaacatttttgtttttgttttaatagtgctgtaaattgatgtgtgttgtataagataataagaatgcacacaaagcataaaatttatagagagtacttctactgtctactgttaaagattttaattcttatttcatcttattttttttattggggacggaatatttatttataaaactattaaattacgtaaaagtaaaatattacacattatttattaatctatataataattattatacaaaaatacaatttaaaaaattatacaaatggcactgacatactaaaaaagatacaaacacatattataaaatataaaatattaataaaaaaataattaataaaattaaacgggtctctatcggaacgaagagtgtcattcctgtccccacctgtttaacatttggggacaaaaaatgattctcgttcccgtctcgttccccatttagacagagaattcctgctgggcgggtccttgcagggcccatcctcttgagaaaatgtacatccctagtgtcgtgtcgtgttggtctgacccataactttttgtaattttcaaaatatgagttgtgttgtactgtgctataagaaaatatgaatcgtgtggtgtcgtgataatatttttaaagagtaagtctaatagtttgtgctatgttttactcatatatatatatata

SEQ ID NO: 239038 - DNA, 4441 bp, Cannabis indica
ttgagatggaaccccatgattctcaacagaaggtacctacaaaaactatgttcgtccacataaagtcaactagcctattaagtttttaaacaaaataaaatgagcagacttactcaagtgatcaataatcacctagacaatcgcatgtcctaagggcgtgtcaatggtaacccattacaaagtttatagtgatcttatcccatttctactctagtataggtataggtagaagcaaacctaaagatctttggtgctcaacaataacctactgacaaaccatactcctagcaacaaagctagccacatcttgcttcataccatcccattagtattttcccctcgtgtcctggtgcatctttgcactaccacaatgtacaataaacttggagctacatgcctcgatcataatagactttctaagattacaggtatttacaataatcaatcttctcttgtggtataagtaccccatagcgttaactgtctatctatctaaatgttcttcatcatggatttgattctagataagtcttattttctcatcttgccactaacgatgcttaacttgttaaagagacactaatgtagcaactacattagaggcacaatctatctcttctccttcatatgattgcaaatcatgatcacccattgtaattgtccctttctagtcttcaggagctgaacatacaaacgtaccgtgagatttcctacatagtgcatctactactacattagcccttctaagataatattgtgaagtgaaatcataatctttcatatactaaatccatctttgttgcctcaaattcaagtcactatgtatagagatactttaagctcttatgatttgaatatgacttcatctttgcatcatacaaataacatctccagatctttaagtcatgagtggggtaattttccttatgcaacgtgcaatatttttctcaagacccgtaggaaaaaaccttgttatttttcacaaatacatcctaaacttgtatctataacatcgacaaataccacatatgcctccttattatttgaatcactgaaaatgagtgtcacggttaatcttcgctttaatttatgaatgcttcttcacaactttcatttcacacaaattttactttcttccatgtcaaatttgtcgaaggcataacaattggagagaaaaatcctctacataatgacaatagtagcctactaacccaagaaaacttgaaatatcgatcttattatttggtatttttcattgtataatagagtcaaccttcgaaggatctataatgatgcgattttgagatgttacatgtcctaagaatttgaccacattccttcagaagtcacacttctcttcgttagcatatgaatgatgatcccttaaggttcgtataccataaattaatatcaccaccaacttatccaagtaggatcctaagactattcacgagatccataaatgaaggtaccttcgttaatccaatagcatctaaaattgtccattaggtgtctttggagaaatcttaaggacatcttcttccctagtcctcaactgataatagcctgacttcaattcaatctttcaaaagaatttgaaaccttcaagttgatcaaacaactcatctatcatcaactagggtactttttcttagctgcatactttccttgtttctcttccctttgtatgcgcctcctcctcctacattttgccttaaatgtattttctttgctctttgtatcaaaagctaacaagttagtgatgaatagattctctttatatttaagctttaatataccaaaaatacaatgattaatttattattattatttgaagaaaatcttatcaatttggtgatacactctgagattttgaacccggtgctttgatacaacttctgtcacgacctaagccttaggttgtggtagatacaaataatcctttaatttatacgaaatcatatcaaatatatatttaaaataattgaataactcatatattaaatagaacataattgtaataaaataagaccattcgttattatatatagaacaataatattcccacaattatgtagttaccaaataattagatttaataatttttaaaacaccgaaataatactaagcatccatcatattccacatccctaactgctcatatctatttaagcgatatagaccatccattaataattatatacatattaaacctttaaaagaaaagataattattaagatatgaccaagcaaatctcaccgttctccatcaatgattctctcttattcacaagtaccaagatgagttcatggaaaggaaaatacagtgagtgagcttatgaacctagtaggaaatgaattaatattaaaggaccaatagtttaataaaaaccttgcatggttagcatttttaagaaaaaaacgagatgaaacctatcatcctcatcgtcatgtataaacaaaatagagaggccctaaataatcacaagagacaagctatccatgcatatcacatgtccactagaccactagctctcaataccaatcatagaaaatgacatcctaaatcgagtagtcgcgcctaataactaccataatactgaggcttaaactcatttcactttttgtacaaattctaggtctttcacttatagatgaatgtgcatagtggtggatgtaaattttgttgtgctggtttaattttgtcctatcgataaggaaaagagaagaagaggatgttgaggagagagacaaaggaaggagaagaataagtcatttgtgggtcccaccaaataaattatatatattttatttatttatttattctttgacattttgttttagatcaaatctcacacacaccacgaaaattgggtgtaattacatactaaaaataattttaattatttcgttgatacaataattatttaatatgatttaggtttttatttttatttttttctcatatatatatataattttaatttttgtcctattaagatgttatttgataactttttagtgtgctatatttcttgtattgtttgtaaataaataacaacaaaaaaaaaagaaagaaattaatatgcaaatatatgatattttatttttttaacattatttatgatgtagcataaattttgattgatgaattatatatctaatggatttatttatgatgtagcataaattttgattgatgaaatatttaatttgttttattattaaattttattcaacttgacaaatgtttaaacttctaagactgtaaaatcatacaaagaaaaataaaaaagactgcaaatacccaagcttttcaaatccaacattctaaacaaatcccttctcttatgatttacaacatttgatgctgaatttgcaaaaaaaatcatcttcttcttgaagcttccatccaggttttctctggtatagtgaacgagcatctccgtctcgtcttctcccccctaaatctcacctttcaacctcttgtctgcattaaattgccctatgtcatccttaatcattgcaaaaagcctccgaatttttcgtgctcagtccatatttaatgctctcctcctctctcagttacatttaattctgacggcaccctcttttgggcatttaatgtttgcccagactttctctcttcttctctttcttctccagccccctaaatcaacccacaccatcttatccatcgtctcaagcatttactcctttgcaatcattcctcctccgcctctgcagatagccgtcccagcaatcgaagcgatggttcagagccactcccctccctcgacgcgcctttccatctccaggtatcttctttctcctacccttacttactctgtctatttaatcccccacactttatgttgctcgacacctccaccctctgttatcaccattgctgctctgtttccttccactacctcaatggcgtcctcttccaccaaccctaacatcctcactcctctctctgaagaagaaagcctcatctatgacttcgatcacatctccctctcttcatcctccgaccccaactctttctgccttattttcaaaactttatcgcctcgcaccgctaagcccgcttggattgaaaaggcaatgtctgaagcctggaccctccgcttccctgtccaaatctccgagtaccattctggcctcttcttagccaccttccaatgcgatggggaccgtcgacgagtcctggaggaacagccatggcattttgacaaattccttattgtcttcactcatcctgatgtttctcccactcccacccctgaaagtataagatatacccctttctggatccaagttcaccgaattccttttggtagaaggagccttcagctggccagttcatagctgatgaactgggtgaccgtcattgaaacctatcccctctctctccttgagaattctggcccctttc

SEQ ID NO: 239039 - DNA, 1331 bp, Cannabis indica
aaaaatataaaaaaaaaaaatagcatgccttttctgaaactaatattgcataatttttttaataaaaattaaaattgtattaattaagctaaattataaaactcaaatcaataaaaataaggacttcattaattaatagataaaattagactttgcagtcatagtaaaataagttcactgaaatataagaaacgggcaaattattgtgggcaattgtctacttagtttaattataggtagcaaaattataaattctggagatataaataaaaacacaaccatcaaaacaactaaagagttcgaagaataattctcaatctcccaatacgacgacaagcaattgagagaattaatcacaactctagagttgttgtccacgatgatgaacttgtatcctttgagctttgccgaatcaagaactaagcaacatgcagtcgcctcgccataaaggacatctgaatagtccaacttagtcgtggtaactcagaccacctcaccaaagtggtctctagcgaccaccccgatacacaaattttccaaatctactttaacatgcattacaatttaatttgagccaattaagaaggaaagtgccaatctttcttgtggactatagtgtccaaacgagtaaaagataaatttttaaatttacaaaagaataataaatagaataaaacaaaatttcaaattattcaagtgattattatgaacgtttacattacaaaatatataacaccttacggattagcatatgaaaaataaattatatattgaacatgtgttacgtgtataaattagagggtctttttttaaaaaaaaaaaaatttacactttaaaataattgtttttactttttatagaattctacatagaaatccttattacaattagtggagcaacctaaatcgtataacaactcacatagaaatcactttagaaacccaaaccgtaaatttttttaaaaaaagtttaaaaaataatatttggataatttctctaaattataatacacatatatgtataaattaatatattttttatatatattatagtacacaaatatattgttggtagcagtcattacaatattaattatataaaaactttcgaattattaattaatttccctgcatataacactgtatttggtcaactatgagtgcatttataaaactactgaattgatttcaaatttcagcatttataagaatttttttaaagaaaacgaaaaacatttttaaaggaaaaaacaaacagaaactctagatcatttcattttatatatctttatatattaaaagtgtctatctaacggtatttcttggtttaac

SEQ ID NO: 239040 - DNA, 1434 bp, Cannabis indica
tttttgtggtgataataatatataatgatgatgatgatgatgatcagaatggaaaaattggagatttcgaagaatagtactcgagcaaagataggaggaagtatagtttcatttgcaggagcaacaatcttgaccctttacaaaggcatgaaagtactatcagtacacaataatactcaaagctctcatgatcaatctgttacttctacaagactctcttttgagaaagatcactggataaaaggctccattattcttgtagcatcttacttctccaccgcagccttttatctcctacaggttcaattttttttttaagtcaaaaacaaagattatatattataatcattattaattaattaaaaactgaaactaatttatattggtaaataacggatcctctattatgtaaaaattatttattcggttttattaaatgacaatttaatattttttaaaatggtacaaaataaattgtaaactcaatttttattaattttttttaaataaccaacctgaaatcaagttctgcagtgtccaaaagaattttttttttttaccatttatatttggtgtaggcaggaacagttaaaatatatgcagctccattaaatctgacaacactaagctgcttatcgggaacattgctatcactaatcatgactgcaattttggatcataaagcagcctcttggaggctgtcattggatatcacacttctagctcctttttataatgtaagtatttcaaaattcaaccctttatttttgttaaataatttcctcaacaaaattataaatattatatcgttgattaatttatgtagggaattatgatattcagtttgggaatttatttacaaaccatagtaatgagaagaaaaggtccagtgtttgccatggcttttagtcctttgtcatctatatttgcagcaatcatgggaatactgattttgggagacattttacatctgggcaggtgaaattatttttattttggattgtccatgtcgttttgaatagtatatatatatatatattttatttgcaattttttcttaaaaaaattacatttttttcagtgtaataggagctacattgataattattggactctattcaattctatggggaaagaagaaagaggaggacatgatgatactagagcgtaccaaagcaaatgaactactagaccttaatgaaatcaaagcagaaagtgtcaaaaacaaatctgatcatttgagtattaattgatcatatacctaacaaaggcaccaatggtcttaaattttaataagtgaattattggtgtataggaggagctaatagtagtgctgtcaaaagttggttacaagccccacaagaatttacctattaattagatgaacattatgttacgcgtgtaatgtttgttttttataatgccagataaaga

SEQ ID NO: 239041 - DNA, 1866 bp, Cannabis indica
taaaaagcaaagggaaatatagcatagactgatggttcaaatacctgaaggaccctttccatctatgtatctacagtgtgggttccaagcataaagatcaactaaatggccaaatctgctcaaagaacaggaaacaaataagatttaaattaaattatatatcattatcgaaatccattggccaaatgtgtgttgctgtgtgaatattctgaaagatgggattctagtgcatcacctatcatcgccattcccttctccattatctaaagggttgctaccatagagccttcctggaatggcatttccaattgagaagtgcataatgtcaacttcatggcccttacaagtcttgctagtgcatgagctaactccttccttacacccacccatctaccacaaagaaaaccatttcgggtttaaattttaaatattaaaaaaggatgagaaacaactattctatttatgaaattagtccacagtagctagtaagtaacttacattatgatatgaagcatcctcaccaatttgaaacatcaaagcaacagatggacattttttgttttcacttcaccacatagaacatacccaagaaaatgctttacacgtaagagtcaaacacacaagaagacatggaagtgattgatataccaataaaacagtaagggtcttctcttaatttcccatacacacaacaccattaagggattaaaaaggaaagtataatgttaaagccaacatacaataattgatgctaaagtagctgaaatggttagaaatgtgattcatagggcaatatgacaaaaaaagatagaaaaatattatcatgctagacgctcactaaatctcaaagcactaactcattttatccttgaaaataaaagtctcaaaagagagagacttatagatttcagatcataaatacgataaagataaatgccagtttctcaattaaaacttaaagagagaaaacgaatgaaagaaagtttttcccgagaaaattagatcataccctttcgagtacacatagtctccatcaacttggagcataaagtacatatcatggccatcatgcaaagcctgtcatatcatataaaaccaagccaatattatacttccagtccaccatttctgagttcaaaatacaaaattaagcatagaaaaaacaataccttaacggtcatttttccatctttgtactcgtgttcggcatctgggtcgagagcggggaggagagagaactcaaatccatcaatgtctttccaatcgtcagtgtgaccatcgagggtgatgaagccgggtctgaactcagcaacgagttgggtttccgagtcgtctgagttgcagctccactcacccgattcttcgtgcgagttgacccgtccgatccacaaggaggaggagcccagtaatgaaagtattaacaggactcgaaacattgtagacgatgagatgaattgatatgaattattgacttttatatttggttttctttcttcttttaatcgaaaataagaactcgagcaacaaagttccgaggctaaatttgaatagattagtttgttaattgttactaaaattaaattaaacaccctataagaaaataccatatccaaatcccatttctggtcatatacattgaaataggataattaggatttttattcactaagaattttcacatgtattaaatcatgctcctagaatttttttagtaattaaaaattctcataaactattgagattgttagatttaaagatttttttctaattttagtaagaaaagtcatggataaaaattcaggggcttaatttagtacatgtcaaagttcgaaaaacataatttaatagatatcaaagtctagagag

SEQ ID NO: 239042 - DNA, 6079 bp, Cannabis indica
tgttgatcattgtttatgtctaaccaaaaagctttgtgtaatgtgtttggtaggatctttacttgggagaatatcctggggtaaataacagttggatggatatggtggcatcacagggttcttctttgctttctgtggatctttctgcatctgatgtttctgatgatgggttaattcaccttaaagattgcataaatctccaaacaataaactttaattattgtgaccaaatttcagatcgtgggctggaatgcatcagtggtaggcttgcttatcaacaataattttcttaccatttatatgtcaatgccatgccctttttctctgtcccatgtcccaacccttttaaattccttaatttgagaaaatagtggtgtgacataatgggaagttactttctggagcaaatatctttgtaggaaacttatatgaccataaatgaacctttcaggtctctcaaacttgacaagtttaagctttagaagaaacaatgcaatcactgctaaaggaatgagtgcctttgctggattagtgaacatggttcagttggatttggaaagatgtcctgagattcatggtggacttgttcatcttaaaggtggcttcatgtctaattttgtaatgttttatgctatacatttttttattcttctactcgtttttccttaaaaagaatagaaaatggaaggcactcagctaatccatgtttgtaatgtacagactttgcatgaagctaatccagcttactgtcaaatgtcaataactgaatgtgtcatcataatgatcaaacttttacatattgttcttttcattatacaggtttaacaaagttggaatctttgaatttgaattggtgtaactgcataacagatgctgacatgaagtctatatcaggttagtacagtgtctaatgtctttctttctcttttgaagcaacttaattcacatatgcatttacatgttgtagtttaactatccatttgcatatgatatttcagaaactccttctatctccatctcaactctccctctctaaacaacaatcatgcacacacgcacattcattaatcgtttggaaattcagtctgttttctattatatttgctaatagactttattcaattatattttcagggcttacaaacttaaaaggattacaactttccagcagtaaagttacagatgctggaatttctcacttgaaaggtatctggtgaaatttcctctcaagcatatcagtataagaaaacattatagttttctaagaagaggacaagtgttaaaacatgataaaataaataaatattctacatcagttcctctgatctatcttatatttatttattcatttaatgcttcacaggtcttcacaatctctctttgttgaacttggagggatgcctagttactgcttcatgcttggattctctttcaggttgaaatttcttcatatgtttggccatttgtgaaaccttgaaatgtttagattttgttatagtttatcatgtttgttccgctatctgtttcttagcataatcttgtaaacacatctgtttgttccgctatctaatttttgtttctttttgtgttggttattagctcttgctgctcttctctatctgaatcttagcagatgtcgtcttactgacgatggatgtgaatttttttccggtaagtaactttatgatttgttttatttttctcgatatgtaatcataagagttaaaaaatgatttcaccccttgatgctatttggtttataatatttcctgggaaacttggcaataactagctgtttaatttcttctgcaggacttggaaagaaactaaaagtgttgaatttggctttcaatgaaatttctgatacttgtttggcacacttaaaaggtagttaaacttgaaccctttatttatataggtttggcacacttgaaagctagtccacacacgcacaaggttggttttcggtccatatgagtcgtgtatctgatattgctgtaagcaggttttacaaatttggagagcttgaacttggattcttgtaggatcactggtgatggactggcaaatttgacaggtcagtggctggaaaatgcacaagaatttatgtttctaatgttttcgtagctgatgagagtccgttacatgttcaaaataattatgtattcctttaatcctgcatgattacctacctaactgccatggaaacatacaaatttgtcttttggattctttgatggagtaattgtactgatcgtttgacaaaaccccccgtgactctaatatcttttttgtttgtgaatgatttactcgtagatcttcgtcgtctgaaatgtttggagttgtctgatactgaagtcgcaagcaatgggctacgccatttatctggtaaaacattttgttttatctttctcttgtataagaatttgcatgccattccattttgttcttaccaagatactctggacaggtttggttaatctggagagcataaatttatcattcactgcaattaccgacactagtttaagaaaattgtccggactcacatctctaaaatctctaaatttggatgttcgccaaatttcagataccggactagcagctctaacaagtaaggatgcttctacttcaccagctctaaactcctatgcataatacttgtgtgcttatctcctgattaattttcttttctttaacctgtaaattaagacttgaaattaaacatcattagtcaatctatctcgtgcacgattgtatgctttcatttggaagtcattaagtatctcgatcgaaaggcaattcattactttttcttatatatgtttcaggtttgactggattaacgcatctggatcttttcggagctcgcatcacagactctggaacaagctacttgcgacgtacattacataaccttattgcgttttagctttacataataatacaagttcattagctatatacatgttgaatattagatcagtaggatcaatcaacaacattctgaaagtcaaatgagtagtcttaaaaatacactgtcaatctatgtagtggcaaagccattatgtacctttgaagtagaattgtccaggtgaaattatgaataattttcaagctgtcaggtctggcctgtcgaaattttgaaattctttgtggactaatataaatataggtagcacacagtgtgttatgcaaaatttagttgaggaataaaggagtgttcatgttgaacttttcagcatatatgatatgtttgatcttgatttatttcagacttcaaaaatctgaggtcccttgaaatttgcggaggaggattgaccgactccggtgtaaagaacataaaagacctgtcatcattgacactattgaatctatcacaaaactgcaacttgacagacagaaccttggagatgatttcaggtaatccactcgattcaacctataacaaaatattcggaagaagaaacaaataattcacttttgatccatacatgacaatgcaggtttgacaggattggtatctttaaatgtgtcgaattctcgtatcaccagctcgggacttagacatttgagaacactcaagaatttaaagtcattgacattggagtcgtgcaaggtgtcagcaaacgatatcaagagtcttcaggagaatcacctccctaatctggtgagcttccgacccgagtagtagtggtgttgatggtattttcagcatgaagagacaccataaccatttgtattatttgtatatataagaaaaagagggaagcaaataagactttcaaagtggtaattgtagttgtctaatgtctatgccttatgtgaaggtttcttctaaatcatttcttggtttgaggagaaaatgtgtatataaagcttcctaagcatggtttcttttgtcaagcaaaactttggtgatattggcgtgtcaaaacattggttcaaaatgattacatgcaaaatgcaattatgatttatgaatgaacatatatgtatatatgaatattgatgtatctattccttgaaaagttaaaattcattgcttttgtttttttttatttataaagggtgtttttttttctttttattattattaataatttcattctcaacagattcattgaacacatgatttacagtagaaaattcaacacatttattactatttatttcggtggaaagtttgcgtgtcaaatgaaaaaggtttggtgaataataatagttatatataaagtaatccatacgtgtttgtttgtatttgtgtatgtaataaagccaaagaaagaccatttacactttctatgtgtgtgggaagaccaactctacaatatcaacaataattgaagacttgcctttattattctctcagaacaccgtttcatgttgtgcctcttcttcaataatttattatttaggttcaaaatggagaccccacgtgcaaaatcttttatttattacatactgcactcaatttacttttggcacaacaatttaggtcttaacctaagagcactcagagtcagtgacttgaaatagtttaaagagtgatcttagaccatctctagtataatactaaaatggtgattatattttagtacatttggaaaattagttatttaatggtataatgtgctacgtagtacaacaacacttctaatctttttatttatatcaatttatttggttgtctctcttaacttaaaccaatcgagcatatggtatttcattaagtggctcttgtcttattactcccaatttcatcaaggcagagcagaatgggtggtcaaaacaatgaataaaaagctttgtatgtatgaaatgaaagaattgcagaacataagatgattaaaaatcaatgaaacataacaaacaacttttgagaccacaagtcagtagtagtatatttacaagggagactgtatcagagtattttttgaactatagcccccagtgaagaaagaagaagaagaaagaagagaaatcccagctaccaagagaaatttcaacatctttatcttccctccacaatatgactcaaaagtcaaagatgagaaatttctaacaaagtaatctgaaatataaaaacaacattgatattcaacagagttacaaggaaagaaaaaagcattaaagaaaatcgttaaaactccctactaatgttgttttttttcttctttcttttaccttacaagaatttctacccaaaacgtttaatctaagatctttgcacattgttccttgagtaaattacatatcatcatttttcagcaaaaaaattacatatcatcagccaccaactgcaacaaacatttacaagaatagacaaagttaagagcaaaaaaaacagaagggcagcaaaatatataaacaaagagttgaatcagaggaaatgcatacctaaattataagagaatgggccagcaagtcaagcatgtaaaagagcttgtattagtctggcagccgtttgatcatctttgagcttgatctgaagctgcacctccaactggagttgccgaagcattgctcgctgacccattctcaacgggcggaggcacaccccatttaccttcagattcaagaggttcaaagacatgaaccccaccatctgatagtcctaaagcaaactggtttgcttcttgagggtgggccgcaatcactagtggctgtacattagagctacaacagtgcagaggaaacaagggaaagtcaaaacagttgaacttgcaaaaatctcaaataaacagatggaatgattcttttttttctttttttgtcctttaaccactgagcaaggaaatacctgatattggcaggaagatatgcagaagggttgatacgacatcgtagtctgagattggcagcactgaacacacagactgtagcatctaaaaagctggcgtatactaactggctgtcgcaggagaatgttgcatgagaaattgatgcagaagattcacgtgggatccactgggaaaaaagggaaaaaatatagtgatttttagaaaaaatagataaatgttctatacggacataaatggactgcagctccagtggagtaacaatattgttagggaag

SEQ ID NO: 239043 - DNA, 5117 bp, Cannabis indica
ataccacaggaggcatccagctgcacgcgttgttgatcctaatgaggactttgaagcgcttctgaaggaggaaccattaattgaattcagtgggaggtattatcttctttcattttccgttaatttcctaacaaaattctataaagtaaagatatgtatccgttttcaatcatatttgagcatataaatgaattgtgtacacaccaaattacatctgatgcctgcttgagtgagtgcatcttattaagtgtttattttggttgtaatatgagttgatatttttttgttttcaggaagctttcggacgatatcttgatttgcacgaattatataatcagtatatcaattccaaatttggagatcatattgattactctacttaccttaatgttttttcacaaccacataaaattcctcggaagctgaagttgacaaggtagcctactatggtagtttttgtttttttgtcccttagtagtttggtttcttacattaaatttgaaatgtttgtacttttggtcgctacaggcaatacaaggaatacatagaaaatctactggagtacctgacatattttttccagcgtacagagcctctgcaagatcttgatagaatattctcaaaggttctcttaatacgatgtctcttttttcctttgatagatcatttgactaatgtgaacactttttttaagcatgactgaaggttttgcatgtggtcacccaatttaatttctttctaatttaagttgaaataggaattaagactattattaacatctaacgcagtcacatgtatcctaattgccataaattcacaactatgatttaggttgaaattttttgacaatcactactaatggtttggttggattttttaaaaaatttgcattcattattctaagtgactattatttttaacttttttcacttgcaagataacttgtacatgttttaatttttctctacaatctcattttgttgcacagcttataacagaatttgaagagcaatgggaaaatggtctaatagaaggatgggagggtgaaggtcaaggaaatggacttgtaccggattggcatgctgtgattgatcttgattattataactcagttgaagagctgatggtagtgggtcctgaaaagttaaaggaggtaaaggcatttcttttctttataggcagtattaaattttagagtattggatgctacatttctttcccctgacttgtttatgtttatttcttgttcattttttacttgtttctatgattccttactagataccatattgataaatcccaatacactttgtttactctaggagaccgagaaaatagctttgggcaggggttgttttgtattcaggtctcttagtaatttttccctatttttgtattagtggctgttttaagttgaggggttgggttgtctttttgtataatgaccaaatcctataaatataagggtgagggattcatttcagctagcttgggaatagaatagacttggtctaaggtgagaacaaccctcttgaaaggctgtattttggggagtctagcctctcgaatgctagctgatttttttgcgactataaccaataaagtgtttctttgagggatttcattgtttgtgtttgatttccaagatcgaaagtttctaactaaggaagttccatcacatatatgctaactctattgtttcatcattgtctctatctttttggcttacattttatgtttcggttgaaaaggttgagattgtatgcatatgttcaacttcttttcaatttttatgcctgttattttccttgcttcatttctgtgtttaaattgtctcaggcattggcggcattaggactaaagtcaggaggtacagttcaacaacgtgctgagaggctttttctaacaaaagtaattgcactctctctctctcttttgtgccctgcttgtgctattgctaccctcattgtttatgctagtttgttcgctccttttgtgcatgtgtgtgctcttggaacttataaatattttaccatcccaagctatttgactgggatgatattatgattattcacaagaaactttaaaactttctggttacttgttgtgtgtctcaaaaactttcttaatttctgtgatcctactattgattattgtccatttgtttgggatcacttttccagcccatttattaaatttgggagcaagccctttctcccgagttcaacagagttctgttcagttctttttcttccgatttcctaaagctgtttcatgctctgtgactagaacctgtttgctcttgttacaagttttatgtttgcacactgtacaatgtcttagattggaacagcttcttgtggctgactaaactgtcattcagatgataaccaatactcttttaaataatatagattgtcgtttttccctttcatgcaggatacacctcttgaaaagttagataagaaacattttgctaaaggttcacgtggccaagagcaaaatggggttagtgcagttaatagtttcaaagaaattgctctgatggaggcgaaaataaataaactttgcgagttactggaagaggttagcctctataacataactttctgtcctgtttccttccattcccttgcccactttttttaaactccctattttaatgttttctgtgtcattatgcagacagttgatcgaacaaaagacaatattgtgaagaagcaggctctgacctatgaggaaattgaagcagaacgagaagaggtgagtacttttacaacttttgaggataaaatgagatctaaagttaagagggtatcacacatagaattcttaagcagctacttgtaaatggttgaatttccatggcgaacacattaatataagcttgtcaatgaggttgctctgatttctaatttcaaaatttgcacgccaatctcttgcaggaagatacacaggctgacactgaaagtgatgacgacgatcagcagatttataatcctctcaaattgccaatgggttgggatggaaagcctataccttattggctgtataaacttcatggccttggccaggtaatatggattataaataaggggtttggacagtcagtcattttatctttagagttagtttgtgcatgcagtatatatttttataactcattttaagttcatgcaattctaactatctatgcatccaggagttcaagtgtgagatatgtggaaactacagttattggggccgtcgtgcctttgagcggcatttcaaggaatggcgtcatcaacatggaatgcgttgcctaggcataccaaacaccaagaatttcaatgaaatcacatctattgaggtatcaatttcttgatattttgttgtggcgatttttcttgttataccttgggtgtgttggattattaagattttaaaatctacagaaagacccactttacttgagataagagtgtcctagttgatgattttattaggtcaattcattatatttatcaaaactagtggagttggtgcattaccttatgatgctaacaagatattttgaaataatgattcgcaatgggatgttctagttctttaaaatgttggttgcaatatgtctatctcttgtttgggggtggtagataagaaaattaaggtggtgttttcaaatttattttgataaatttaaagtgatactgcagtgagggatttgactcgaatgagattaaaagctgtagtggccaccttatcttatagatgtaatggtggactatgaaaaagtcaatgtacaatttactgaaaataattctaagcagtttattgaatgcatgaactacttggagagatattcgttaattttcttttggttcgtagtgaaagtctttgtaatattatctgatgagagttggaagagggtttcatatgcattcatattggcagcaacccctgattagttttactgtaatttattgaagtaatgaatcgttctatgatgcaggaagcgaaagaactatggaagaggatacaagaaagacaaggagtgaataagtggcgaccagatcttgaagaagagtatgaagacaaagagggtaacatctacaacaagaagacttacactgatcttcaacgtcagggactgatatgagaaaggcagtagtccagaaaaaatctagtagcaggataagcatcgtttgtccctatgacctgttaccttgggtggcgactcacatctggctctcaaactcttgcaccattcatttaagcatagttattttggcaactactaattggagttggggaatgctgggattgtagattttatgtacaactctcctaatattagattggctcagtgctatgttaaatgtatctgaaaactacaggggtactgaatttttctttttcttatattttatagcaaacaaggagatattgtactgttgagctattaaattgtttcaaacggggagagacattggagaatttagtgatattgcacaataaaggactctcatgaactgctgatatagagaaacatacttctcactcctgctcaacatgttcttattattatttaaagaactaatcaatacctttcttatcatcttctttggcaggtttatgagctattggatactggaaaatatgccctggcagaaggtattgtttcctttatttataggtacttgggactatatttttgtgactttgtgaaattgctttttactttctcatagaagtttaactggaaaataactgttgatttctgaatttctctcacttacacattttcccctttatattgcatgaaaaaactagtttcatgctgcctgcttaacaggctataagaagtttatgaatctaaaatagttctttccagcacaaaaataagctttacgtatataatcatatcatgtcattttagtgttgcagtacataactatgtgcactaaccaggctatgctgccttgaaaagttaaacagggttgtgttttaattatgcactttcataagaacgagggcatacttacataatcaattatacaactgataattaccaacatattaggcaccacatacactccctttaaaaacaactgtcgaagccaagagaacgagggaaa

SEQ ID NO: 239044 - DNA, 2374 bp, Cannabis indica
tctctctctctctctctttatttgtttctctggccattatcggatctgattcacaaaccgaaacccacatagttccaggtccttccttgtccgatctctgcaaattccaacgactggtttctctttctctagtacagtccactgttccaaaagcagatcgaagtgagagaaaatagaaaaggtgaaggaagcagtcggtgggcgggtctgatcgatccgatcgatgagtcttagagttggggcattttcattctaatacgaatgggaatgcccgacaaacgatgagcaaaacaggggacgaagaagacgaagacgagtgcttctacgagtcccttgatcgcattgtctcctcgtcttgctcttgctccacttccaactctgactccgaagataaccccaacctcagttccgacgccagttcccccaattatgcttctggtaaccacttcccaatccctaaatttccaatgggcatctcccactacgatatttggatctccgagccttcttctgtctctgaacgacgtcgtcggctcctccgcgaaatgggcctcagtaaggacccggcactgtcccgggacaaacaggacgagttcggtcgatcggtgtcgtcggatcggttgacccgtcaggagcagagcggtggagccgttaacggagtggtccgatcgaaatcagacggcggcgatcagtgtaattgttcttcttcttctactactgctaattctacttcttttcttggttctccaattctttcaattcattcggtctcgtcggagactggttcatttgtaaatagtcaaagcaacaacagcaaccactgtgtttataaatcgcgaagcggcagaagcaatggatctcctgttgctgataccacttcgttaaataaaccaccctcgggaaagaatttcaagagggtggatgagattcgaagcaatctcacgccatcaaattcggcgtcgaatcggaattcgggaaactcggaagttgaggaggtttttgaaagtaatgagtctgaagtcaaggacgatgaatcagaagtattcctaccctgtactattagggatcttgataatggtaaagagtttgtagtgaacgaggaagatggtactttgaacaagcttaaggaagttggaacgggaaggcagtttactttagaggagtttcaaatgatttgtgttggccattcgccaattgttcaagaattgatgcggcggcaaaatgtggaagagggtcataaagatggttcagattcgaatattaatgggtccaacgggggcggttccaagatgaaaaagaaagggagttggttcaagagtatcaagaatgttgcaagcaccatgagaggtcagaaagagaggaggagcagtgatgagagggacacatcgtcggagaagggtggtcgtcggtcgagttctgccactgatgatagccaggattcgtcgtttcatggtcctgaaaaagtgagggttcggcagtatgggaaatcttccaaggaagtcaccgctatgtacaagacccaagagattcatgctcataatgggtccatatggagcatcaaatttagtttggatgggaagtaccttgctagtgctggcgaggactgtgtaattcatgtctggcaggttgtagaatcagagaagaagggggaattgttgatggaaaaaacagatgaaaataacttaaatatgttctttgtagccaacggatcaccagaaccaaattcaatgtcaccaaatgtggacaaaaatccggagaagaaaagaagagggagggcatcaattagtcgaaaatcgttaagcttagaccatatgtttgtgccagagactgtatttgcgctatcagaaaaaccagtttgttcatttcaaggacatcttaatgatgttcttgacttatcatggtctaagtctaaggtcagttacaatgttgcttccttattacatacatactgttttactgcatctttaggttactttgaatagtaacttcagatttgactctccttaggattgtgatttggttgaattgaatcttatctttgaacacattcttcttcaaaaatcattgaagacactagttgtatatattctgtttatttgtgcggtaaacattgaggtcgttgtactagggaacttttcattgtttcagacataatatcatagggaaaatggttgctttttcgcaatttatttggatgtagaagtacaagaatggaagttcgaatgcattttaattagattttcagaatatttgcttcgttacagaaatacttaattagccaagtgttaaatcttgttaggtaaaggaaataatattccattttctgccaaataggagagacttaaatattccttatttactagataggccagct

SEQ ID NO: 239045 - DNA, 3201 bp, Cannabis indica
aaattcttaacatgagggttttcatcgaggtggttagcctgagcttgtagtcgtgctagagtttcttacatctgtcgggaggcttcaggattaaccttcttgctttgggtatatgtgagcttttgctaaagtcatattactttaggatcttgctcgtagtactcgatcttcttcatactcctggttaaggtttttgtggcagtcatcttgagggtcttcatcatgattttcttgattatcttcatcgatgggttcttcatcaaaatgttttgcacattgtggatcttttctagcgtgtcgaccattgacttctgagatgtttctttgtctcctatagtacctgcatgagtgtgtacttgaacatcatccattccagagtcttcttcatcctcacaagcagttgatttcctggtggttttttattagccaccattattgtaaatgataactttggtgaaaaatctttcttcaagatctcaatgaaagcaccaaaatttttaccaatttttttcaaaaaccaattataaaataaattgagcttaagaaataaacaaaataaagaagaagaatatcaagattttcacgtggttagggcactaatgagccttagtctacgagccaatattattagcttaaaaagctttgttgtattacagaaggataatgttcttgtccgagctcaagaaccataatttcattcttagtgtcttaataatgattttccaacactttgcatgaagatataatctcctatttataggctagggtttagactgttagggttttcttatgaagctagacccaccgatggggtaaatacatttaatattaactttaggccaattaggaaagacccaatttgtaagatagcaatcatccaaatttgcggggaccatttaatgatgacaattgttatactctgccaaatttatacaataaatgtcagaggatatgacgctaggtgaatccctaatttagtgggatcctatatcagaggtatctctatagaagcttttgctccccgtcttttagacagtccttttgagaataccccattagggtatccatctatgacatattgggccttctttcttttggcccccgaactcggacggtccggtcttataatggatgagtttaatatgaacacggagtcacaaactgactccctttgggctgatccactatttgggcccgagaatgtgccttcccaaaatgaaacgaatcttagaagtacatgtgtcaccctgtcagaaacatggataatactcttaaatacttaggggttccaataagacctactaagtggagaatggaagattgcggtgtaatacttgcaaagattaagcttaaacttcatacatggggaacaaggcacttattatttgctaaccgagtttaattgattgttggggctaaggaactattggatgagcatctttgtattgcctcaaagtgttatcaaagaagtgaaaaaaattgtgccgaggatttttgtgggcgcaaaaagataacagaagtaagatttacatagcctgttgggaaaaaatttgtcctcctaaaagttatggtggtcttggatttaaagaaggtcctaagtggaataaatctatatcgacaaagcatgtttggctatttattgagaaacatgatttgctttgggtcaaatggattagtgaaatttatcttaaaggtactaatttctgggattatgagttgaggcattataccagttggtattagagaaagttgtgtcatttaagacaaacttttggcaggagcaatatccaggctgctagtaagaatgacaagtttaaagctgccattctcgacaatagtatgcttcagtagacacaggtttattattagaaaatagagtggtgtcggttaagcttaccgtagcaccaatttattctttggtaggtgcttttctcatttgctaatcagaaccctctcttgattctgcattcctattaatagttttatttgtcccgtttgtagcttgttgaatgaaagccatgtacatttattttttgaatgttgcacatttgacaaagtggtgaaacttatgattagttaactaggttttaaagtttggcctctaaacctttttcagtgacaaaattagataaatggttctcgattgaagcagtagcctacagaacaacgggaacatgtcatttcttttcagttttatacatagtaagagatataaaaattataataaaatgtagattgtgtagtggctcttataggaataatacatatgagagatttctcctacaaaatttgtagtgattaggagttctggtggggcgtggttagcagcctttaattgtattgttttgtttgtatttgttggttggttaatgaaaatcttgaagaaaataataataataataataataaagagataaaaagtcagtgctttgtaatgaaacttctaaacattaaagcatttctaatagagatgtacatcggtaatttattgttaaaaatgtatctaagtctgctccaaatatggtgtcaaaagttgattgaaatttatcatattaaaaatttatctaaattaatttgcattagataaatacactatttttttattgtttttaatattttattattaaatttagttattgtattaaatataaaccttttacaattgttttgttttatataataaaattaatgataaaattattattatttatatttttaattaataaaaatattaattaaatattaaattttgtattaagttttataattgtccattgaagttcaatgttaaaaattaatacaaacacaattataaaattactgtaaaacatagcacaatttttcaatctcctattcaaaatgaacttatatatagatatctattattagcatagttattagtgatataacacttggtactttttaacaatttttctctatatagtatacgtactttgattgtgttcttattctaagtaattgctcatattgaaaagtgacagttgtggttgtaacttgttaatagcaagtcacatgcattctcccaaaagctttaaccaacgaacccccaaataattgcccactcccatcaaccttcacaagattttgctataaaaaaataaaaagaaaaaagaaaaaccttcacaagatttatattgctcaaccctacctttactcttgtcttctcttctctcacgataa

SEQ ID NO: 239046 - DNA, 1813 bp, Cannabis indica
gaaggagacattattctgctgccatcaatgtaatgttttcttaactttatatgtgtttaattatctttttagaaagttcaaatttagggtgttaaacaacatacttgtgagtagatctaagatcctagtaaaataaattctaacactgggtcgtccctatgattatctcaagtaaagttatccccttttattagcatgtgaatcagatcattgcatttaatcaactcaaatatgaaatagataaattgatattttcctcttgacccaacacactagaagttgctaaaaaaattgacatctcccatgattaaccaggatcctccaaacttgctactgactttcgtaatgttcgaccgaaatttcttcttctcatggaaataaggaggcccgtaaacataagatagcaagcaaggatgatgcgcatggtcaaagaacacaaggtcagtaatttggttttttgagatactaatgctttcaaaagtaaaaccagctttccaagcaagaataataccccctgcattacccacaagagaaacaataacattaaaataaaaatgtaagctctttagagaacgtacaaaaaaggtggcatccactttcaacttggtaatgaagctaaagtaaggagagcacgaccaaattagggcttttaattctagaactatagaggtctaccccaaccctctacagttccaaccaactcttgtcatggctcttgtggaggagggacaccatcctactccacaagggtcacaccaccaactggcacaaaaattgtagaaccctcatcttcaaccacaacttcctccttggtagggatagaaatgtccatcaatcaagctctggccttccatgccgtaagtcctgctaactgccccaaagagattagcttgtcaacttgctgagagcaggctgtatcggccttagaaaaaaaaatctgctccccctcatcactggccaaagattcctctaaggtgtcagaggagacttgggaaacaataacatcatcattattacttaccggacccactccacgtggaaaatctctgaccacacgcttcacccttctaattaaaaagtttgcttttttttcctaaaaagcaagtttcaaaatccaaccttttcttctttacaggtgtggtgcgcttgttaaatttagaagacacttggatgccaatattcaccaatggggctttcaattttttattgctcgaggtcccaatagcgtcaagttcttggatataagcctcttgggcgtaatttttttggataatgatctcttttcatcatggtggccagagatatcttggccatttaagaagttattcgtatcttcacacaaaggatcattagccaaattaaaaaaagagcccatagaggctctaatcctcttgcacggccccacagaagcctaacattaaatgtttcatgagccttttctaagttgttgagacacccaccatcaaacttgttaactcaaatttttaggtctccttattttgatgattaacaaatatttgattattatttgttactaatgatttgctgattttgtagcaaaatgaaaagaagaaatgatttttcaagacaaattggtatttttaccaaacttttcaaagcaacacaaaatagattcaacaaccttatcaagagtaaaaaactcatcaagggatcaacaactcaagacaccattcaaaagaggtcttcaaaagccaaaagtcaaaataaaccccaaagtcaaagtgaaagtcaaagtcaaaagtaaactctcagaaaaagtcaacatgagatcaaaaacatgtaaatcaagcta

SEQ ID NO: 239047 - DNA, 3282 bp, Cannabis indica
ttgatgccgatgaaaaaagaaaaagaaaaaaaaaagtctataactacaacaaaatgcaaacattgggtatttatgctaccaattacccttgttgtgttttaccaattattgttattatagtagaaatagataagaggagattgcaacaattaacaccaaccttaatcacaacagtgtgagcaggcagatttacaccccatgccaaagttgctgtacagacaagcacctgtaacagatgcataaaacggatgagcaaacttcaaagtattatggtggaactgagggctaaatgactaataagcactaccttcaagagcccatcagaaaaaagacgctcagtcagacctctatcggcacgtaacatcccagcatgatgaacaccaacagcaaatccaaaaagttcaacaagatctttgttccttgactttagaacctctttctaagatgcataaaattgtaaatttataacaccataaagtaaatatcaagaagagatggggtgttcaagcaatatttttcttgcctttattaaggatgactgtggatgtgtatcattgctaaaaagctccaggtcctcgaatctccgagcaagttcaacctgtagacaatagattcatagtgagtggagaacaatagtacaaaagaattcaaatgaatttcacaatttacatgagttacaagtacagcataaaatggcttttaaatgaaaaatatgttgctatatgaattttcagcaaaccaccaaaatctttaagaaataataaatgcactgctgaaaagaaagtaattatttgaacaaataaaaatacatggatcagcggagtgagtttgggagagaatcaaattttggacagtcacttggatctttaaaaccaaacacttgaggatttttcttttctagacttaaggagggaatggagtgtgttgacgtaaaattctggggttcttgttttgctgggtcactcaaattgaatacactttctatgttttatattttccgtttaccaaggtattcctccgccacaagtgaggctctaataatatcggtgggggaggcctgtcaagtgacctccttctctttttcaaaaaatatacatggaaaaagagacctagaatatataaacatattttggtcatcaaaataactcaacaaattgcgtggaagggacaaatcagggaaatcctagaaataaaagcagaaacaaaaaagcagaataataaaagtctgtgattttatttcctagaacataagattgactaatcaaattcaaaaatgcctccaaatcttttagatgctatgtcattttataaaagctaatattcaacacaccccctcaagttggattgaacacgaataattaacttatttatcatcttttccgagatatgcctaagcaattctttagtttgaatcgagtcaattgtctactcacctaaaaccacacaaagaatacaacaaattccatctacagtcttctctataataaagcaaaattgttacaaactaccctgtgttacaaagttagagctttctcaaaactaagcaaatcagacataataatgaaaagtaatcaatggattttatgacagaagaatcttacaccatctagagagacaaaagaaaactcaagagaaatacgaaaaggcataccaatttttcagctgtttttgctgtgtccttccgagaatgaacaaataccattgcttgatgaccttgcctcaatgactcaacaacctagaaaaaaagagcatataacagttgaaatatgctccaagatctaaattacatggaagagaatttcagtagaaggataaacctttttataacatatctcattcaataactcattccgagctgcaaagttctgctcactaataccaatatactgttgtgcaagaggcacaggacgatagctagagtcaaagaaaaagagtcctgtatctggattcactctaagaaattgtgcaacctaggtgttaaaaaaaggagaaccaaaaaactaagtaaaaaaaatgatggctttagaatcttcaaattgaggctcacaaagaaaataaaaattgtcaacatggaaaagcttggacctccaaataattaggtagagtggctgaaagtcccacaattcttatcattgactgtgttgactctacctataatcaaaacaaaaaatgcatattatcaaaatcggtcaatcataaatataagatgccacaaatttatattagattaaatcagaaaccataagcattttcttgaaaaagtgacaacaaaagtcatatttctaagactgacccacccaagtttattactaaccctcgcttaaggtaaaggaaaaccttagttacaaacttgggaagagaacaaaaggaaagtcacaacacaagaaaaaacagaaaaataaaacaatggaaatttaatagaaatacctgacgcaaagttcgagcaacaagtgcctctattacagggcctctatcgtcattcaataaatgcacttcatcaataattaagagcttcacaagcattgacagtgacatgtcactactcttgcgagtaatgacatcccatttctctggtgttgtaactatcatctaagtgacaaaaaaagcattaggtcttgcatgttcattgcagtggcaaaaactatatataacttcactgccaacaacctgagtttcttcaagttcattcttagaaagttgcatatctccagttagttctttcactgtcatgttcaatggagataaacgatgactaaatgttgatgtaacctcagctgctaatgcctgaagagtaaaagaaaatagcagttaccaaaaacattgatacttcatgcccacagagtgaagaaagcacacaaaattaaagaaatgtgaaacaataatcaataagtctaccttcattggagcaacataaactatcttaaattcatttttgtgcaagtagccatccttgaaatgctgcccaatctgcattcaaacacataactcattaaagcaataaaacagtaaattaaattatgcagtgcatacaattaggagttaggaggaaagataatattgtaatatgacctgttgttcataggggtaagtagacaatcacaaggctgcttatgtcgtcaacagcctaagtttcatcaactgtgcatcttataatgactataatgttttattaacaattaggcacgaaatatttaactaaaaactgttaattagattttagtcgattccaaaattcaatattactaaggcctcgtgaaaaaggagacatcttaaagcaattta

SEQ ID NO: 239048 - DNA, 1870 bp, Cannabis indica
tcacttacttaagcatctaggtttacgttagtatgtcaacgcagctgctggatcctgaacaaccttcattaaaacgaccataactcccttaatatttatctatgcgattcaacttttgttttaaagccccttcgaagctctttcaactcatgtctcatacccacatctcaactctgaagacatcaagtctcaaatccatccccaaaacaagtgtgattttttccacaaattaccagaaactaatccaacgcacaagatccaggctccaaaaattaaagatttttattaagagtcaatttttgccattagatcatcataaatggtcaagatcaacccaaagtaatttttttcatattttttgtattcttttattaatattttaatagcacctccttccatataaatgagagatccacaactttatttttttcacattcttctaagttcctgtaatgtcagagcatatctctctactttctctctctagaaattagagctcttgccttacccaatttcttgtgagcaataatactcgaagtagacataactccacgggaactaaactatacaaaaaatctcttgcgtcactctatttatatatttaacttatccctcatctcaccaatctaatgagcgaatattggccaaatttttgcatctacacaaattagtgtaaatcctgcaagctaactgatcttagtatacatttatttaaacatataatcataattatattcaattgtaatcaagtcactataattatggttttatctatatgttttagatttaaaaaatgtttatattaaacatataattatagaaaaaatttaatgaaaataaaatttcattaagaagaaaatatcgtctaacaaagtagagatttattcaacgggaaaatttgcgattaactaagctatgagttatcttgttagtaaaacgatacacaaataaaataaagaccaacctcttaaacaaacaaataaccttcgacaatcatcaactactaaaccgaaaggagagctcctaattaaatgactatgaacagcattaatcgccaccaagcaatccgattcaagaactagatttgttaataattatgtaaataaacaggtaaataatgcatcaatttgactgaacaaatcccaaatttacttatcttattgataaacaatacttcattaactttatggtcccttgttttatttttataagagaaggttttatttgcattgatcaattaatgagaattgatatatattatgtggaatacataagtgaagacataatgttaggcgccactcatacatcgcaatgatcttaagaagtaaagaatgttagggtctttgcaatggcagtaactttaacttttagaaaattcactacgcgtgcttaaacaaatgtactaggtctctctacctagtctttctaagcttgtacgttgaaaaagtgtatttttaaaaattgctatacatgaattgctcatctccactggccactggacatagattattggagtttggagacttttattagtttataaccttttcttctctttttttcacatggtgccaatgaaatttagtcttataacttttacactcattacataatgtaactaacattatttctaataatatatatattcgacgacagagtttgtacgtgctaattagtgtgacctccatattttaatcttctattatcattacaaatatcataatacaaatttgtaagatcatgtgataatgtcatcaatatcatatattataaatctatctcaaacattaagacatctattttctaaaaagaaatcaataaatataaataattgcataagtgatattaggtttcccctcttatagcacatatt

SEQ ID NO: 239049 - DNA, 7105 bp, Cannabis indica
taaattttacaaaaaaatttaaaaaaccaaacattaaataaaactttcaaaaaaataccaaatttagtatctaatgtaaaaatcccataaaacattatgtcatagtttatgagcaaaatcttaaatagccttaatttaaatatactaataaaaaaataatacttaaataataacatgacacttaagtatttatttataactttcacttaagtatttacaccgcaaattactcaattaaaaaaaaataaaataataatactaattattattatacatattattacctatcttatacatatgaggttatttatacaagagcgttatgtcctcattaccctaagaaacacatcgtgtgtatgtataaatgtatcacttgcaatcacattcacatactattcaaaataaatgtaatttgatatgtagaacagcagttgaagcataaatatcaatttgaagtatatttactaggtataacttttgtaataatcttcatataaagctttcgatcatttaaaagaaagcttcaattatctcattacactgaaagttcactcttcctttaccttgttcagctgaaagctttaagctgggaaccaaaaaccaaacttgattaaatcacacaggctctgtacagcttaaacaccaaagtgcttactgctttccataatccctaatttgcaacagtacagagtgcgcttcttcggagtaagttgttcatcatatttcctaaagctaagcaatattatatataggataacaaccaaccctatagttatattatacagcaagtgaataagaagttgtctgctacttatcttcgtctaattcatgactttgttgaagttgtatatgtgggcagggtctgtctggatcacctctgctccacaaattcctaagctcacctctcttcttccccaatgttagaaaggttcctgcattaatgtgtgaattccagcaccgtttatatctaagcaaaagcaagttatttggaactttgcagccatggcaataaaacagaaaaagatgagagaaatattaccgagtgtaaaagggacaatgtaaagaagtgctggttggccgtgaccgtccattaagtttagtgccacataagttatgagaagacctgttacaggtttgaaatggtaagtatttctcgggtgtcttgagaaagctaggaaaaggggcaacaaggtaatgtggaaatagaaatatgaacaagtagctgagaaccaaaggtgatgagtaagagaagtgcatcaagttctattgaaatttgacaaaaacagtgaaatttatttgtttcttacctaatccataagcgagcatggcccacaagaagtaaccggctctgagagtcctatttgacagccaatcatacctgcaattatataattgtaattgacaaaattctaatataagagattccacaaaagcatatccattgtaaagactagacaataaaaacatagaagattttggtgttctctctctccttctctctacaatatatatatacatataatattaacaaggctcctgtctaatctcacaatatctagagaccaggaattaataacaattgttatgtaaatacccagaaaagactcaacctcagaacttggggaagcaaaccacatgctcaatcatttgagcttagctctctagagtttccctgtctctatatgtaagcaagggaagagatttttggatttcggattataagcctgtttgacagagcttttactttaacttttagcttcctgagagttctttcttaagaagttattgaggctaccttcttctaaaaggctttttagagctaaaaaccaaaataaattggaaacccaaccagcttcaaaatcccagccaagaagcccctatctagagctagaatgtcatttgcaaaggcatttaaatgtagtcataaagccatcatagaagaaaggtaacttgcacatttggtctcttgaatatttaagtagtaagaatttggcccctggtttttcaagtttggcacaattctattgacttttaagttgttccgtatcgaaaggaaattccaagtcattaattttgtcattgattaggatgtgctcataactttagtcaaggagcttcataagcaaaaactgaagaatcaaggacaaaatatgacaaaattcaaaagtaaggaaaccaatttgcagattagcctggacgaaaagaagatgataagaagaggaaaattgtcaaatttccaccagtccctcatatttgaacaatgggttgagtatatcatcattgtaccagcagataagcagcacagctatgttatcaattagtttcgagtaagaaataaatgaatgcagagcttaaacctgagtgaaaatgctacaagtagtcctggtagtaagatatccccaaatccaatgatactgtaaccaccccatggatcgaacattcgtggaatttttaggagcattgggataccatcctccccacttttgtcgccacgagccacctaaaatagagaatcctcagcatttcaaactcaaaatttcaagagaatacttgtcatggaaactaatcactgtagagtaagagctggaaggaatactaaccacaatcatcacactttcgtggaacacttttttggaaagaaaaacccaaaatatgtcgtataagaaggcacaacttagaagaactgtaccgacctgtttggcgaacagcttcacatcagttatcagagcataatataatgaagcatcactgaagacatatcagcatggacacatggagtgtatacaatcgtaaattccaatgatattaaagaggatacttaaagcccttgatcatggacatcattaaaaataaagtaaatttagataactttaaaagaagtacccaataatgatagttattgaccagcaaacttaatagcaatgactctttaccttgagattaggtatatggacaatttgaagaactgtgattatcagtgcgattccctgattgaaaaatgaaaaacaataggacaaaagtgttagtcatgccaagtaacccacttaaataatgagggaaaagttcttaattagaaaatctctcttacaaggatatcttgacctatccaagcaaaggaaacttcgcgataaactccccaaagaacagaaaatactatgcagaatggagatacagctaaagtcagatatgaaacagctcccaagataggcactttaatgtatgattctgcagtatgtctgaaccacctgaagaagcatacatagataactagatttagccaggagcttgaaatgtaaaacgaagtctccaatattgaaggcaattcaatgacagccacctttttgctcagtgataaaatacagtaccatttacaattatatgctaggaatgagaagccacacattttcttgatgtagaataatgtaacatgcaagccatgtctagcaagtacttagatggcttgtttttttatcagctaagttaagattatagatgtagttgaatatcatataatgaagtggaaagtattaatcacactctgaaaagccatatcttagtcagaaaatgttgtacctagataacaaagcaaccaagcaagtttgcaaaccctgcataaaaagactagaacaggttagaattgatacgagaagtaaagacgggtacatataaacacatagaaaaatagtaagtccaatctattaatatctatttcgtatagattccaaaataaaaccattgttggaacaattcgtgagctataaaaagggaaatttatacctctgcacccccaatgcagaataagacaaccaaaaggtcaatgagcaaggctgacattagcttgtagagaataactagaaagcatgatgcaataaaaacaaacagaacggctgacgttgtgctgatgtctactacaccacctaagcccatggctttctcacttggaatttcatcaatggcatcctatatgaacatgataaatttacaaatcagtgatagtgacagcaaatggcctggaaaaagaaaaagtaaacatgcttatgatgaaagtaggtgtgtctgtattttaaacaactacatatataagtatataagtttgagtgcatgaagctaggcctttttaatttagatctgggagagagtgacctttaaaagcttgtcatgctcaatagcttcttctctggcactccatgcagaccaataagatgcacataagatggtaccaactgccattaaccatagaaatacttcggcaatatctactactgggcgcaacggggagtacagttgcacaaacactgcttgggcccaacaattaggaaaaatcagtaaatggcataaccacatagaaaaacttgaattccctaaacaaagtttgtcaacttaaatttcagttcaatcttcttcaatcaagttcaaagtcaatataaaatctaattgattaaattcaatatagtagaatatatatgcagacagcacccaatggcctaagaataaggaaaaacccctgcctacatattacacaccacaacaaattaaagtgatttgtgtgaaatccaattgataacagacaaagaaaaaggtccttacctacatatatttacaaactaaaactaaaaacctaagatacatgtccaaaaacaagttttattgctttacaatctctaattataacaagatgtattacctgatgaactgttaagtagcattctttccaagctcaagccagcatcctgtggtagcatgacagcaggtatgtgtatatttagatcagtttcatctggctcacaaaccatcttgtaaagttctgttcaaacacacaggaaattttggcataaaaataaagcaaaatatagctgaaccctaagaaaaaatctctaatacacacgatagattctaaatacctttctgattgtttataatgaggacagctgatgcaccagcagcttctgcatggtttgccttagttgtgaatctgcatttacctcgatccaccatgatgacatctccggcaagctagtaagtccaaattacgcaggattaaaatttaaaaacaaataatatatttggttaatgcagtgtgatcctcaacaaatgttcagcccgtaggttagttgaaaaaccttattctttggtgcactacaacaatcacgcggatctgcaagagtaaggcgagtttgatttgcattcttctcttttgacacaatagtcctgccaaatctagcaccaacaccaacaaattcactagcctctacaccattaacccaagtttgcacttttaccttagaaaacaaaaatggcaaacaatcagataaaagaaattacaaaatttaaataacttccgtgagcattaacctacttcaaatatttctaaaataagataacacaaccagttcaacattattcctactgaactgaaaaaccatattccaaactccttctaatctaaataaattctggttcgaaagcagaacatatgtactaaaaagcagtggaatacaattacttctggtatcaaaatctcttagtagcacaatgcatagaacagcagaccattttcttcaaactatgactatgattatggatttactacacctatcaagtaatcaaagcagaaactcttttcgttactaattcaaatggatatttattccattgaaaagtaaaagggggtttaggagattaaaaaaactaattaaaatttacatggaggataaggaattaggaatctactaaaacacactactgtaccaagagtaggccttattagtctgaaattttaaaccctaaataactaaaggaaacaaaaatcaccaagccaaaatcctactccaaaagaaaactaagaaaacgaaaaaagtaactttttctgcccaacttctatgtatatcaattgttccaactaccacaacgatcatggaatcctttaatacactatcgtataaccaacaccaccgtcgtcatcatcatcagtttcttccataaaacccatcacttaaattgatcaaaaggatgaaatttaatcacgacccagctccgaatacacccaagcaagaaatgggcaagcagaaacagcatttaacataccaaaacaaagttgttctcacaaccaggcttcttgggagcattttcgtcgtcgtgcacaatatcccctgctgtcacagaacaggtactatagaccaataaaatcacagctgatagaataacaaagctccaaaccctctgcaaatccatggattctagagctcatccactagatttcagcaacacccagctgggttttctctctctgcagcatcctaatcttctctctctctatatatatatatctataaagaaagcagaggtcttgttctttcacagtgaaacccaaaacttcattattggacaagacgaaagtagtaaaatattaaagcattttaaataaattaataaataaataaataatgtaatataatataagacggtggagtggatctatctagttctactgcaacgacaaacgttgttgaagagccagaccacataatttactgaaatacaatgctaaaacggtgtcgtattagaggaaccttctttttcttttaattaatttttatcgtttttgtactattttttaattactattaaataattatcggttttatcggtaataagtaattcaatatgtccgtacaatgcaagacaagcggaaacaccgatactaaaaattagtcttgtatttgtggaattatctttgtttttttcaaagatattttaattgaatcctagtaaatcaaggtaaacttgatggaaccacatgccttatattttttttattatttataactagtgaactaagctggttaccaaatttttataatctttatatataaatatatttataacaagtgttataatctaaataaaaaaataacttataatagaatgctaactcattataaatatataaatatataaatttgatttaatgacttaaaataataataataaaattttttgacttataaatttatagatatattactagtatattgttacgtgcgatgcacgtatgctatgttttatattaagtattatattatgagttcgaaaggaaataaatgaa

SEQ ID NO: 239050 - DNA, 1232 bp, Cannabis indica
atgttaattcaacatacttgttagtaaatctagatcctggtataatattcccaacatattcatctactatttagtcctactttgttgcttggtatctcttcctaaatttccactcattctgcatgtgtttcttgtgttaagcgtgtgtttttgttgcgttttgttgtgtctttggttgtcctcctctgtttgagtttggtttggctcctgtaccctattttagatccttttttggtgtgtctcttattctattatttagcttgttgtttgtggggtagctttatcacgtgtctttgttcaggttctcgggttggtgactatctttatggaggatgttattattggtagtggggggaagaggggtagatgtatctcatttattgaggcatctattttccttgcccctagtccagctttggcaaatgtcctcaatcattttcgcatggttggtaagaccctctctgaaaactcttttagggttaaggaaatggcaagggcttgtgcaaaattgtgaaatacacatgttaaagttgacactccttttgtcggcaaagcatttgcaaatgcttccactttagctttgataagatgttggataggaagcaggttctggagcttcgcccctggtacatcaaaggggagatcattgtcctactaccgtggtccaccaattttggtataaagaaattgtcttttgactcaacccatttgtgggttcaaatccacaacctgccacatgacaattactctagagttaatgctaatttgctggcagctcaagtaggtaaggtgttgtgtattgagcttgacaaattcggacatgcttcctggattaaatggataagaatgaatgcaaattgagattgtgattaataacccattcttccgttgttgcttctttaaactcacaaatgggtaggcctactgggtgaaaataaaatatgaaagattaggaaatttttgttatcagtgtgggcggttgggtcgccaaagaaggggttcctcgctttagtttccaatcataatatgcaatgcaagtagtcctctatttggaccttggatgaatgtctcatcttcttacacgagttgtttcttggcgaaaacgttgagtcgtgtcttggcaaaagcaatggtggttcaacgctggagttgagatctctaaggccagcatcgtcagaaatggtggtgaagcataatgctatgattgttgaggctgcttaggggtgccgacc

SEQ ID NO: 239051 - DNA, 9659 bp, Cannabis indica
gataaatagcaaaacaatacactagtcatttactataaaacttaatattattttgttataacactccacatctcatgttgatttgaaatccaccaatacaaagctcccaatcccaaattagatatatattttaaattaaaaaaaatgactttaatcaaaaaacgaaaaaataaaataaaaagtgttggaaaagagtgaggagtgactgtgaaaccgctgtttgaacaaaaactctttaactaaaaactacaaatacaagaccggattcgtggcaatctccttgttcccggtcgtgatcatcttcaacattttctggggaccaaattggacttcttctctttccataattaccaactctgccatcattccctcactgtttttccccaattaatactcattactcaccgcaaataaaccctttcctaggccaaatatcttctctgcgcttccctgttgccaaaaactcccctttttgtttttttttttcccgagaaaattgatatcttttctcggaaagtcgaattttttatttttcttctcttggtctgcaagtcttaatgaaggacgacgaaccgttaccggacaatttgcggtgcaaccgtactgacggacgacaatggcgttgcaaactaagagccatggagaatatgaagctctgcgagaatcactacttgcaagggcgtcatcgacagaacaaggagatagtgccggaatcgctgaaactgcaaaggaagacgacgaagaaggtgctgaacagagacaaaagtaagcgcggcgttcaaattaggtcaaagaaagaggacattttggcgaagctcgtgaagaagaggaagagatcgggtgagacgttgaggtcagtgaagaaattgaatagagggaattcggagatggagcttataaggatggtgctgaagcgacaggtggagaagagtacagagaagagcatgaagttgaagacgaaaactgaaacgaagaaaaaggaggttgttttggaagaagaagatgaagaagacgatgatgatagtgaggaagaactcacgagagaccttcctaatggtctaatggcgatctcttcgtcttcttcaccttcaccgcgacagtgttccggcaatgtgggttctgattcacctgctcgtgtgaaggttggagttgatttcctgccggttccacaacgacagtttcggtctaagaacagtgaggcattgccttatggtaaattgcaggtgacctatgattagcttttccgttagttgttttccatttactccaaattttgtgtttaatgattttattttgatcgatttggttttgtgattttaattgtcaaggtattgccctgtgctcgaagtgttgccaatttgggtagggataagaggaaaaagaggtgccattggtgtcagagaaccggctcccggattctaataaaatgttcgagttgccaaaaacacttcttttgtttggattgcattaaagaacggttcgttttctttcaattcatattaaaaagcagttctttcgataaattatcaatctttttagttattattattagatatcaggcaaccattagttcatgagaattggatgacatagttccgtatagtacttaacaactacaaaactctaaagcattgaaacgtgtagtgtattttttgtgttttcataattataatgatgagagctttttccatttccttatgcttctattctatatcggccttggtacaaaacatactttatagtgaaatttctgtggtcaacagctcaatgcattttagatgattgttctgtattttcttataaaattttataaagcaagtcatcttattagatttagtctaacagggtttaggcaacatcgtttagagcataattattcaagagcttcaaatgagtagaagtaaaatgttgatctcgaatagcttactagtctgtaatttggatgatatcttatcatactttactgaaagcatcctgtgtttcttaaaaatacacacaaagcaaaaactaaaaagagagagaaagtacaatgtgtgaaattatgaagaagggagagaaatattgaattcccttctctgtcaacattgttaagagagtactacttatggatatcattctatctttgttgagtgaacagtgacatatatacatatttacatgtgcccatttaaaataaactggagaaagaaaatgagggattcaaagctgtacaagctggttctttcaaaggcccatgactttagttactgactctgtgttagctagtcacatattatagtcttactccaatagtcagtatgtttgattttgcctaaatacttccatagctcattggtttgagctatttggtcacttcacttgatacgaaacactgataattattaattatgatatttgaaatcttagatacttcaacacagaagaagaagtcaaagatacatgcccagtatgtcgcaaagcttgtacttgtaaggactgcttggaaaatccatctaaagacagtgaaagtaaggtctgagtctgacaacattgttgcctggtttgtgatcttgattacctgtattattaattaaattgtgatggtaaactttgcacaaataccttgttttttcaggagtacttgcaggataaacacgaagttgaagtgatattgtgtttccattatttgatttgtatgcttcttcctgtgctgaaagaaataaaccaagaccaaaatgatgaactagaaatagaagcaagaataagaggtagtgtcagttatggtaaatactttgctgatgttctgtgcatcaatttttttagattagtacatgaagtgctcgtgttttttattgtaacaggacaaaacccatctgatattaatataaaacaggctgatattgaatgcaatgagaagcattgctggtacgtatcgcatgtcttgaaacctgtgttttttttaccaatgtatttacatttttgtgttgctgacaatttgctgcatgattttttactttgagagcagtaatagatgcaaaagtcttatactcaatctccatagaagctgcccaaattgttcctataacctttgtttaagttgttgtcaagatttacgtcaagaaagctttcttggatgtactgacttctctatcacactgtcctctaacaaaactaaaactcctgcgtacccttatgtgcgacagatagagaacccaataagaaccaagcagaaccccagtagtaagtaccttgagtgttcagtgtcactacctgactggaaagttcataatggtaatggcgatacatcttgcccacccaaggagtttggtggttgtggtgagaatctccttgagttgagatctcttttgcctttaaattggaccaaagagctggaggtaagtgcagaacaaatagtctgtagctatgatgttccagaaacttcagacatatcttcgtgctgcactctttgtaatgggacgaatcaaaaaactggaggaagaaagcagttgcgagaagcagctgtaagagaagagtccagtgataactttttatattatcctactcttctagatgttcatagtgataagcttgaacattttcagaaacactggctcaagggtcatcctgttatagttcgtaatgttcttcaggctacttcacatgtgagttgggatccagttctaatgttttgcacatatcttgaaaggagcatatccagatatgaaagtaacagggatctatgtgaaattagcaattgcttggattggtgtgaggttagtggatttaccctagatcaaaatttccatgttggtaaattttatggcatggcatcagatggtagtttaaccttatgattgtaatgttttgtgattttcttcagtattgctgaactccacgatcttctcatccttttatggcataggaagattagtatgacacttctttttttgggtcacgtgacaggtagaaattggtatcaggcagtacttcatgggttcgttcaagggccagacacataagaatacatggaatgagactctgaaattaaggggctggctttcttctcagttgtttcaacaacagtttccatcccattatgctcaagtaatccatactctaccacttcaagaatacatgaatccttcatctggtcgtctaaatcttactgcaagattgccaaaggatatccagaagcctgatcttggtccatgtgtttatatctcatatggctacgctgagcaacttgaacatgctaattctgtcctaaaactctgttataattcatatgacatggtatgcccatttcttttctctagttcaaattactaatctcttgaactcttgatttataaatgtagcctcccatttatttcagtcaaggaaaattcagtattgattggaaacgaataacaattacatgtgtgcatgtttttcttttatagttaagttgaaagtactcgcattgatacctctgtttcaagtcaatttgcaatatcatgttaatctaggccttggatcagctctcgtcttattttagttgacaacctagagttttaaaacttgtattttgttaatgaaggttgcaatcgttacatttactgtgagctttgaacttttactaacctttcactgacacataatatgaccgcaaacatattaatcaatatttgttatttcttatccttcctatatcagatgcactgtgccattatatatggtattaggaatgtgagtgattgttgttgtatcttttgtttgttttaccccaggttaacatactggcacatacttcaaatgtcccaatctcttcagaacaactttctagaataagaaagttactgaaaaagcacaaggctcaacaaagtcactcatccttatcttccaagatcacttcagatcaaaacatggtaaacaacatcaatggaaaatcatcaccattgcatgaggtgaagattgaagattcaggagtgcaggatttgattggagaagaaatgcatttacgaaagaaaattgcacaggtatcctgttcctctgatgccactcacgaaccatgggataaaaatcttaaagagagtaattcatcgcatgatgatgaatctgattctgatactgattctgaaactttgcttccttctcgcgagagtattcatggctcagaaacatcagaagacagaaaaagttccaaggttaacaataagagctccaatcatgatgggaagaaatcactagcagtgtctgatggtgcccagtgggatgtctttcgcagacaagatgttcccaagcttatagattatctcaaaaggcattctaatgagtttgcttgccataaccatgtaagtgtaaagactaaaatattgccatcttttcctgtcaaataatgtcttttaatctactaacttgcttgcattataggtcgatcatccaattcttgatcagagtttctttcttgacactactcacaaactgaggcttaaggaggagtttggtaagttgtttgtgagtgtcatcatttgtggtaatctgaaataactgaaaataatccttttctattcttaccagagattgaaccttggactttcatgcaacacgtaggagaagctgttatcattcccgccggatgtccctaccagattaggagtcctaaggtcatttttgcaacagtattgacattctaaattaagaaagatattggaaacattacttttattctctgagtaaaaaatataccttaaaatgttccctaccactgcttttaacttaactaatatttcgccatactaaatcagtgaatatgagttggattttctaatatgtacgcatttttgttctgattctctgacatgcagttctggtttataccatatcgttctatgttgaagtatattttatcatgaagttaatgggaatactattacttatattactttggcataatcaggcgtgtgttcatgttgttttggacttcatgtctcccgagaatgttactgagtgtgctcatttgtccgatgaaatacgactgcttccagaagaccataaagccaaagtagacaagttacaggtaaaaatcctgtaagattatttggtcattttttctttttctttttttatcaactgtattgatgtatatcatattattattattattgtcacgaaaacaggtgaagaagatggctcttcacagtattagtgcagctattaaagaaattcgtgagcttacatgtgcaacgtaagtttccagattggatattcatttatatcttctgctttccattttagcacccatttaatatatttgtacagactggaaaattttcctcgtgcatgtactaaatttagcatagcactttaaataataaatgatagtgaatgttcaatgacttcctgcagagtgtttactgtatgtaattcttaggtgtcccaacactcttttttgtgtgaccgtacggatctttagattttgatttttcacaagtcatgtgtaggagtaagagaaaacagcctcaattcaattatcaatctgcataagaatttgtacttattctatgtattaactttacgtaatcagttcaacacatatgttagcccctttagtgatgcattattctgcccgcttatatttataactcataaatatggattattggaaagaatgagtaaagttggtagtgaactatctgaagagattatttatttacaacttacaagtttgcaaattactacatactaagttgtcaagcgtggtgttttgggagcacagtctttacatgaatctcaactactagaacctggatagaaatccaaatacgattaggaaagatcatgatgggcaaaagaaaagatgctttaattcagtgatgttttcttagataaatttcgaagagagaataagggaatgtaattcaaaagtgtaatgtagctcatagttcatacccgctttaaaatataaaaagtgctgtacgtgttactcaattcacacaataatatacacaagctcaaagcatttaacagtattacagtaacttgtgtttcatatagtaaacctctcataaacacataacaggaaaataagaatctaatatcgcactacctcgttcacatggcctattattaatctcaattactcacaacaattaacaaaaataaaaatgatgaatattagcttaggtaagattcaattggatagccaaaactaagattagaacaagacgactttgtttaacgaaatatgttcttatgatttatttttaaggccttatgtcacctccccgcccttattatctttggctatttgtcttaacagatttgtcacaaaaacagaactctttttcatttcacatcgtgtaaaaggaattataaccctttgtaactagtctattaatacactatacttgaaataatttaattaacgcattttggccattctgaagctggcaaatatagtgctacgtcatcctaaagaaagcaaaagcaaagtttatcgagtgattaaaatggtgccctttgtcaacttttgtcatctcaagaagattcaagatcccaattaagcaaactcgatccatccactaaaatttaataacaaaacattttactacttgctaagaaaatcaactaaaaaaaaacaactacaatcaagtaacaaagtatgatctggtgatcaaactcgtaaacctataataagttatatatgagggaatgataagttgaaacataagaggtagcgtgttgatctcgagtctcaacgtcttttagtagcaggttccttctgtgaatggaaatatagtgcggcaactggaggcccaaggccatagtgggcagcaaattggcgagtactgaagttgctacgaatctctggtgctgggactcctgccatgctcccttcactctgcctaaatagcgccaacacgtagcggtgaataccagttggtggttggggtcccatgtattcaaccaaatctttctatatatatatttaaattcatcattaccactgtacgtgattacgttccattcacttacttttttttttaataaatttgaatattctcataattattatataacaaaagttcaaacctttggtggcatcgaatccttctggaatatctataacaatcctgaaataattaataatctttattaccagtcactatttacgataaataaataagaccaacaatagaattaagaaaacatttttgagtgtgactgaatatgtattatctataccaatggagccattctctcaatgctggttcactaggacttggagcatcaggatccaccatcacctattaatccaattcgacaatcattaatatatatatttatataaaataacagacagagtataaataaagtacgtactaaggtgtagagattggcttggttccgtggaccgagaatctgggccttgggcttgtcaacggcggcagagggtttgatctcatacccattactgatctgttttgaaccataatggatagtgaactcagtagttgggttaaacatgtcgaccacatctcctatcactttgcctaccacaagtggctctatagacctggccatatcgtaatcacctttgaggagcagagcagtagccgtgcgcctgtctgtacttgattatatacacttgagtttgaagttgaagtggtaagtactggtacttaaatccagagtttggtcttctgatcgaggaaaaaaacagagtgatttattatctatttatccacgaaatcgccacgtagctcagctggattgagggtgacacgtagcgagtccacgatgtaagtgctggttgtacacgtgttagtcacctgcacctacgtcggttactaatgcccccactgaagccaacggactttttgatgttgatgggcatgggcttttgtctttttcaattgacgaaattgccctttttgacgacaacacggctgaggaaaaaacaatagcaaatgcaaaagagtagccgacgtactcttgtctttagggagcaaagggtctttttggtgtggagtctaccaataagaagagtcctgattaaatcgtttaacgaagtgaagtgggtggtaggtgaaacaaaagctggaatgaagtaatatgaatgtgagagcttagaatggtttcattcacttcgaatgaaagaattttatgatttttcatttaacaacaaatcatataattgatcatagtaagagaataactggaaataattaattaattttcactaaaacatagatttgactgactaaagctaaagggggatgacatcgattgaacgcggcaacgtggcgagacgtacacaatgtgctgcgcgttttggtataagagtgaaaactgatgagaatatgtgtcaaggccattgttattgttgatagtggtgcttaacacttttagatatatcaatttatgattgattagattaaattaaataaaatttgatatttaattagattaataatattaacaaaaaaaaaatactagacattataataccttttaatattttctatctgtcaattagcaaaaatataagttaaatattattcttaaccattttaaaaataaataaataaatacattatccacaacatagttttatattattaagagtaatttgtcagtattattttatgttttaatttatatatactgaattctatttttttttttagttagtaact

SEQ ID NO: 239052 - DNA, 2494 bp, Cannabis indica
aaatagtacggattaggattgaatgaacacccctagttacataataacaatactattcaaatatgaattatattgtaaatgtgttgttgtagaaattgaggattggaaaggttcttattcaaccaaagaaactagcttcgattcaaattatagcttgcctcttaatgttgctttgatcactcttcaggtaataatcttattcaaatctcacctcggttttcaatacaactattcttcatgctctttctttctctaatcctagttttcccttttcttttgcaggagttggatgatggaagtgttcttcttcgtcttgctcatctatacgaggtaggtaacaacacacatataattttatacaagatagtatttttcataattcaaaacctttctcgagtgggaactaggcacagaccttctgacctatctctagggctagtcttgatacacacagacataacatatcaaactcaacattttagttttcataatgtgaatgtttaggttggtgaagatcccaattactcaaaattagcaacggttgaacttaagaagattttcgctcgaaaaatagtaagtattgttcgattaattgaatattctttgatctaaaataggacatagttttttatgttagtgttggttaatgatattttgtgtacattttagataaaggaagtgaaggaagtgagcttatcagctaatcaagagaagtcaaagataaagaaaatggaatggaaagtggaacaaaacgacaccaaaggagaccaaacgacaccaattcgaggctctcctataagcaactcaactcttgtagttgagcttggtcccatggaaatacgcactttcttattgaaattttagtctcttacttcttataattaatattattatgccatgttcaagctaataaataataataataataataataatataattgctcattttgtaaaatctaaacttttaagcttcaaatcttgtctatgtttacaacatttacaataataaattaataattgagccaaagttgttatactaacaaaaggtgaaagtggaaactaagtcaagagttttcttaacttttaacaaaagatggttacttataataatgataataattaaactttagacatataattgaaattttagtatgaatatttttatatttccaatcattattctcttacaaatgacttgaatttgattaggcttggagtataattatcaattatttaaattagttttttatcaagttttgtcacacctgatatgtttgtttattcaattgttatgtcagtgtcatgttaacgccacatgtgtaattaatttttaaaaataatttattttattttagtttagctgtacgtaattttttaattattaattgattttgaatttaataatttttaaaaaatgcataatttttaaactttttaatgttaaattatacatgtgtcactgatatgataattaactaagcaaccatattatcattttatttgttacttgtgataaaacttgttagaaatatcaatttacaagacatgactattaactaagtaaacatatcatcattttattttcacgtgtgacaaaatttgacgaaaatattaatttacaatagtgtgaataattcaagaaatatttataacgaactgaaaagtttaataggcacactaatgtgtcataatttatgtggtttaaatcctagagaatattacactttatacttattttttatttttttttgtttaatttttacaattcttcttttattattctttaatttataggttatatttttattatgtgtcttaaaactctaattttaataagttatgtgagattatatatgatattttaattataaaaaaagtatttatcaaattaaaattattttacagttatatttgattatgtttattttttaatttgttttttaaattataaactatttatttttatatctatttttattttattttattaatttaattttaccggtattggcgcgggagtttaaaactgtcacgtcatcgaattccgttaagaacccaaacccatttccccagctactgcaactaactcccatacccaaagcttcaatctttcatcaattaacaaaccctaaccctaatccccaattcctcaaatcaatttcaaaatcaacaacaatggcttcccaaaaccctacatacagaagaaattcaatgtatccggaggtcaacacctccaatcccgatcatccaattactccaaaccctaacccttcttcttcttcttcaaatctctaccccaccattgacatgacagacctagtcgagaatctattccccgaaccctccgcacccacggctccacccgaagccattgaagaaaccatcgtcagaattcccggcgccattcttcatctcatcgataagcattacagtgttgagcttgcttcaggcgatttcacagtggttcagcttcgtcagggtggtaacatcgt

SEQ ID NO: 239053 - DNA, 2800 bp, Cannabis indica
tttataataattaaaaaaaaaatagaatttcattgtctgccccttcatgtttgctctgtggcagatgttcccttttttcattttaactgtttcaagtcagttttttcccactttttctatcaataactactctagcctccttcctccgctgttaataaacttcctctgcatatccttttcccctattttttctcagttttttctcttcctacatatttgttcaattgcttagtgtgttctttctctggtttaccttttaatttcatcatggatttgtttcaccctgacatttccaaggccttatttgttagagagcaagaagtaataaatttgactaacattgctgctcctccaccacgtcctactactcaccgtctcatatgtaaagttttctctcgcaaaggatacaacccaaagcaattcaacaacttcatcattacaaactggaaaggaagattcgatgtcacaatttcaaactacgaatttgattcgtatatggtctcttttggctgtaaaggagacctcaagagagtgttgtctaaagaaccatggcaatttcataaccaacatatgattctatgcctctcaagtaatctgcagaatgctccaatggattcttataccacaatccctttttggattcaagttttcaggttaccatttttaagtaaatctgaaactcttgcacgtgttattggtaatctcattggaactttcattgatgtccatgaaaagtctcttaatgagggttggggtcctttcttacgtattagagtggttgttgatgtttccaagcctttacttagaggacaaacagtcaccttcccatggatgtttgatgaattatggcttgagtatcgttatgcacgattatcggatttcagcaatgaatgtgtcataattggacatgttcttgataaatattctcagtttttagtaaaacttgatgaaggagaagaaccggatctccccttatggaccatggatggaaggttcggctctacctaatgctggttacaatcgatacaggcaagacttttcaatagcaggaccatggcctttcattatgcgcctcgctcggaacaccattaccccaatcatctctcactctagacaacctcctgtccttccaccctcaataaccaatcgtgagaaaggaaaaagcattgttgagtctcccaatcactccattgacacccattgtactcgagatctggtgctaaaaaatagtattcctcaattctccattgatctacttccaaaagagaaattcatttcctctaattctcctccaactgagaatgttaacagtagaaattatggtgccgaccaaccaaaattttcttctgattttggttagtcgtctagatcaaagcatactcacctccactcaccaactgcagatttttcacacaataaatctaaggaatactttgacaatttgagtccaacttcctccgcaaatctgattaaattagttgcttttcccatagcaatccctccagcatatcttcatacttcatcctctcttcattccaacacctcaggctctcaaatagaagcagtgattgctagttctaatattgtaacaactaacactgttacatctactgaagttaacctgatgccacctagttttaatgttgaatcagattctgtgaaagagaatagaatgccttcactatttggtaaaagacaattggttaccttgggaggcaatgttcgaaatgtccttaaacgttgttgcattaaagccactcctcttgttgactctacaaaccataatctacaccaacaacctaatccttcctctgagttgtctaatttctcactggtagcggatggcagtggtgcttctttagcgcaggctggtgttcagcctcgccgctcaccatgattattgttagttagaatgctcggggcttgaacaatctgagagcatttcgtcaacttcgcctactcatttctcaaaataatcttgatgtaatttttattatggaatctaacttagtgctggtgctattactaaatttcgtaatgcatttaagtttcctagtggtgtagaagttcctagaataggtcttagtgggggtttactttttttttggaaatctaatgtaaatgtaactatttcaaaattatggaataaactttattgactgctatatggcttttgatgatggtccctcatgccacttttttagttcttatggagctcccaatgctttgcaaagacctcttacttgggaattgttgaagaaacttcgagacacggcccctctaatgccttggttagttatgggagattttaactgtaaagtccacttaactttaatttggaaattagcatataattagaatttaattatgaaacttgcatattagtttgaaattatctatttatggagatttatttgaattcagaatgcatattatatgtcatatatggaattttataattttgcatgttttgtgcctgaaaatagtggaacgcaatggttggctattatcacatcttagtatatttattacaatggggcaatatagttagacattaggaatgtcgggaatagtcggaattctagaagtgaccgaaatacccctaggtgattttatgattagttagttatgggaaggacaaaatggtcattttgcctaagttattattttgtcatttagtggacattagtaagattaataggctgattatagattgttattagttaataaaacttttttatatatttcatttttacaaaaataccaaagttagaaaaatagaagctctctctctctctct

SEQ ID NO: 239054 - DNA, 7648 bp, Cannabis indica
tttttttttttttaattttatacgcgtatgaaatatacagtttcaacatttatttctatattgtaaattatttcgaatttatcaaaattttgcaggatgtcttaaataactataacatgactatgaaaaaaatttaattgttaggttttttttgacaatttagttgtcaaaatattttttaattaatatgtatttttattgagcatttaaattatttttattacattgattttgtgcatttaattactcttttctttttaggaaagattctttctcaactgttctctttttggtttaggaaacttctggtaagagaatgaattctcttatggaaagttgtctaactttgggaaacttgactttctctttttctaatggatgatttcggttttgcctttattataacaaatcaaattccctttatatcatttgaattaaaataattaaagtttttgctaagtgaaatttttatcctattaaattgtaccttttattaataatatttttcaaactataatttttacgatgtttctattatatttaattttattgtaaaataaatgaaatgatgaatgataattggtaaataaatacaaattaaatacttttcattctttctactttaatgattaaaaaattaaaaatataaattattataaataaaaaactattttattatattatttattaacataaaaaagtaaaaaatatttattttaaatttatttatcaactattatttattattttacttatttcactataaaaatgaatagaatacaaattatatttgcaaatattatttacaaattatatactcattattctttaaattaaaaaattacatattcaaatttcaaagttactaaaaaattgtcatttttttcataaatgaaattgtcattttctagccttacaagtttgtgtccgaagttatttaattaacattgtctataagggtcctatttgtctattattgtacggtgtttttaataactttaaaaagatttggttgtacttattcatgaagaaacttaaaaatatgtgttggagcacaaaatattagccacaaaattgtcttcttcttaaattttgttttttgggaagaaagtattaggtaaaatagttatataacaaaaatgaatacagagttattatatgaattaaaaaataaagggtagtttcgtaatttaacctatagttattagtaagtactaagtagtaatagattacttaatcataatctacctcacacactcatttaaaccccccgcctaaaccccattctcaatcacttaatcaaattcttatatataaatatataatatatatatatgaatacacaagtttaaactctttctctctcttccagtaaagtgttcctctctttctctctctaaaactttgtatgaacttgggggaaccattggatcttctccaatggccaccgggacgcacataatcaacggcgaaccggagacgtccaagccggcctttagctcatcggcttcttttaaggctcgcaagaagcctcaggccaccgcggccggtagccgagcaggagccgccggcgccgaggccgatgacctcgtcactttctttcacggctccgatccgcttcgggttgagcttagccgcctcgagaatgaagttcgaggttaggtttctcttagccttttactgttgtcaattttcattttattttatattttatccggaaaaatgttgctcgtgtaaaatttgggacctttgattgctgcttgagcggcaatgccgtgtctatggtatccatttttagtatattcttcgatttattgattttattttgcatatatatttttaaatttagttgaatattggtctaatttgtgtatagaatctatgaagattttttttttggtggtaattgtttgagatttacaaattggctgttgggtaatgcgaacgaaaagttatatgataatcaagtatattatggagtttgtgtattgcattgtatctgcaactgaggtagcaaaaatttggaaacccaattctcataaagtatccacgctgactgaaaaagggcgcgcacacccggttcttttatgggtgggggttgggggttcgggtggattctgggttttgtgagagagagagagttgagaaattaagatggttgttgatgttctataataatttaaggtgttttgcgtttggcaacaaaatttctctctaacttgattatggtagaagtttggtttctaatgttgatttacaaagaatgagctttactcatcaactatatattatgaatttgtttatttttagggagtttgttgttagaaacaactgattcttgcacatatttagggtagcctttggattttcttttacgtggtaatgctgataattcgagaaatagcaattattcatgaatcattgtgtgctcgtagtaatactgtctttattttctgtcttttgggaatggctgtggtgggttacataattatggaggtgactattttttgcctgaaataaaacagttatggtgaagtaactgtttctgatacctctctggtcaaaggaaagaattgtttttgttctttatttttgtaatggatgatataatagttgtgggatttgacgatgatttcttcttttgagataacagataaagatagggaattgggagaggcgcttgcggaaatcaaatcactaaggaactcagaacgccttaaacaaaaggcagttgaagaggtattatgttttgacatcatatttttcgttcacgtaatttagagtgtgtttatggctatgtgcatagtgtactgatttaagccaatgaatgtagagtgaagtgccaaaataagtgtttaaaaattcttgagtttttacaccctaaaattttagcaacaattcttttattggtagtaaaagggtaagtgcactcctagtgctatcttcattaagttgaagtgacaccaaatgttctgaaatgaagaaaagaagtgtcctatgcatatgttttcttttcagtacttagaaaaaaattacaaccttatatttttatatgactgtgtagataatagttaaagcaggcatcccaccagtttaatttttttaaataatttatagtaatgaaagcagagtttgaaatagtcaattccacgcttataaaaaaaaatacgcactgtaaactttttcgaccttattttcgatactgtaaatttaccttctgtatctacaaatacctgtgcagttgtgctattagtttttagaagtcttgacatacggcgaagctcctacagtttttgataagaaaagttcctatgtttgtagccattctacttaaagctttaattatgttgtatacaattgtaattatgttacaacatatttgttacaaagttttaattatgttgtatacaattgtaatttgttaaatagtacttcatgattatagtactttgctcttttgtccacatatatgaggactccttatagtttgttggtaaaactttcagttgacagatgagctaaacaaactggacgaaaaactaaaagccactgaagctcttttggagagcaaggtatcatttttggtcattttttaatcaaatatattgatgtcaagaaataaagagaaagaaatcatatgattaatgcatcatgattgcagaaccttgaaattaagaaaatcaatgacgagaagaaagctgctttagctgctcaatttgctgcagaagccactctgcgaagagtccatgctgcacagaaggatgatgaaatgcctcccattgaggccattatcgctccactggaggcagagcttaagcttgctaggcaggaggtaaaattctctcttgaggatattgtggtttacgtttctggtgttcataatgttgtacttaaactatttttcattctatatatattggtatttttctttctttccataaacctatatttattcatttatcaattgataagcttttttgctaattggcctgaataatcaacattctagaaagtacaagtattacaaaatccattcctacccagtttttttcgtttctctgcactcaagattttatattctcttacaaccgtttttgggtcacaagacaagtgctttttcacatcgaatgttcttccatttccaggtaacaaagttgcaggatgacaatagagcacttgatcggctaacaaaatcaaaggaggctgctctgctagaggctgagagaacagttcagatagctttggcaaaagcatccttggttgatgatctgcaaaacaaaaaccaagaacttatgaagcagatagaaatatgccaggtttctctatggaatgacaattttctgtcaacatttaaaatataaataaaagtacttttctatatttatgatggcggcacagcttgatatgacatgttttgctcatatataggaagagaacaaaatcattgacaaaatgcataggcaaaaggttgctgaggttgaaaagctaactcaaacagttcgtgagcttgaagaggctgttttggctggtggagctgctgccaatgctgtgcgtgattaccaacgtaaagtgcaggagatgaatgtatttgctactacataaacctctaatatttcagaatttcttagtagttatttccaattgtgtataccaatgcaacttgcttctgacacaaacttatttaggaggagataaaaactttggaacgagaggtggcccgtgccaaagtttctgcaaatcgtgtggcgactgtagttgcaaatgagtggaaagatgggaacgacaaagtgatgcctgttaagcaatggcttgaagaaagaaagttttttcaggtattttaaaatgtctttaatatgttttctaagttttcttctgaaacgaattcccaaggaaaaaacaatatttggatcgtggagtgtgtgcaatgctacttacaaactattacaagcaatatatatactataaattttgtagcaaagtgattgacagagtaacttctaaacaaagcttgtacttctttcagtgcccatgacccaaggaatattctgttttgttggaaaggggaagaatgtaactaactttatagaaatttatgtttgcatcatctgagacatttttggttccccctatcatccttttgtagggagaaatgcaacagcttcgagataagttggcagtggcagagcgcacagcaaaggcagaagcacaactaaaggtgaggtttgtggttgtgtttcgtggcttatgttatcttctgtgcaatgtttttaactaattgtggtttgattacacaggataagtaccaaatgcgcttcaaggttttggaggagaggcttaaagcatctaatggaggttctcgctcagcagccttagacgcaagaagcgtcagtaatggtcgttcaagacgccagtctcttggaggagctgagaacttttctagatattcctccaatggatatctctctaaaagaatttcaaactcacaagtaggagcccagcgtcccagtagtgctactgcgcttctaaagagtgccaagatttcatcaaattcatttgatggtggtaggtcactagaaagagacaagctaaccccagagatgactttgaaagataatacaccttctaatgccagtgatcgcactgaaatgattgagatgaatggtagacaagacgatagcgcaaataccaccacgcctattgttaattcgagaacagaacacgaagattacatttcaggagtgttatacgatatgttacagaaagaggttgtaactttgagaaaggcatgcaatgaaaaggatcagacactcaaggacaaagatgatgcaattgaggttagatatcataattttatataatattttagcctaggggtacacccttttatttgatttttaatctgatgtgaaatcatgtagatgttagcaaagcaagttgacacgttgaacaaagcaagggaagttgaggccaagaaaatgaggagggaagtagctgccatggaaaaagaagtcgcagccagtcgcactggcaatgaacacgagcagcgaacaaggcggctcagtagtgctcccagagctgctgtttctatgacccgctctctttctgctaggtaaatttttaatttcacacttgaacttatgatggtaaataatattctttctttttcttttaatatgccatttcatcttattcgtaaatatgactaatgatgcctctttatccttattttctccaaatcaggaacgcacgaaaatcttgactcatagaatgaccaaatgtcagaactttattcttcggctctgcggtcagtagaatttgtatggctttcttataattcttttttctactcataacatatttttctatttaagtcttttgggtccaatttgtaaagaataactcaaaggttttccgtgagataggtcctgcggttgtatattgattgtactaatataacttaaaaatccatcgacagtggcatgaaaatcgtataacaaaaatatgtttgccccagactttgtttgaaatgcttactcctcccattgattctttctatagtgttgcatagaaaatttagtagggtagtggtcttggcatggttgtgtttttcctttataattcttcttaggaaatcgacattagaatagattgtggttaacagaaaagattaaacttgcaacaccaattaaggtagtgttattactcatttggtacgcaaattttattgtaccgatttccaaatattaattcacgaagataatagagaaaattatggctcaggacgtgttttttaaaatcatttacatgattaactagtcacaatttattgttgttactttcatttattagtttcggtcagtttaccgaccaatgagattactttgtttctccgttttcattttctttttgggtaaatattattttggactatgtgttttgcaaaagttatcaattagatcatctattttgttaaatgacaaaataaatactattttttaaaatggtaaaaataggactatgagcttaattttcaacaattttactttttaatataattaacttcaagacaatttctaacacgaacagatacagaaaatgtaattaattttgtcataacatctctagattggattattattaagttttatttaaattaaaaaaatcagttcagtcatatttgtacaattttgaaaaattcatagtctattttatcatttaacaaaacagagggtctaattagtaacttttgcaaaatgcagggtccaaaatggtatttactcttttctttttgtttctttatttgcttttcatatctaaatttttttgttttaattttttttttttgggtacgatgatgtgaggagtttttttttcctcttatttatttttaggttacgtgaccgcgccttgtgcagtcgttataataattgatttaaaataaaatagtttaattataacacgatcattatgataattaatttaaaataaaatagtttaattatgattattaaagtttaaaatattttatattattagtataaacaatatatagttattaattttatgaaagaatgttatgataaaatataatttaaataatattttgaaatacttctttgtaaacatttatgaaggttctatcttccat

SEQ ID NO: 239055 - DNA, 1690 bp, Cannabis indica
gatttcgtcaaagatctccaatcgcttacatgattacgattttcccagaacaatttgcggaccgctctacatataattataattataatcaataatattaatattaatatacagagagagataaatgaaagtactgccgattaattaatttagccctctactgaattaaattaattaacaacactgttctttttcagtagttttttttttttttgttatttttttttaatttccataacatatatctgatatcatcttagttatatttatatatgttgatacaaattatatatacataattaaatttaattacttaagatatatatggcggaaatattatataatatgtatacacttacatggagacaaccatttgatcgactttattccattctgcctcattatgaccatcaagcttattattaattttctgaattgatttatctatgaccaccatcgtatcattcaacatatttcttatcatattctgctcattcattttcttatcatcatcatcgccccccttcctcattttcccctttcttgattaattaatatatatcttttaattgatatatgttaaataattattcctgaatcagatactcacacaatttataaaaaagattataattaagagaataattaaacattatcctgaacaattcaaaaactagatattatatgtaacaaatataatatattgcatacaagatcaagaacacaacatatgctatacatttacatatacatgtatacttaaaaaaagtttataaaaaagattgattataagaattaagacgaagaagaattatgtacgcagtaaagaatgatcaagaaataaataaatatatatgtagtagtataaggcaattactggtaaagatgaagaatacgttagtacctaattaaatggttgagattctgagaagtgttgaacgaaatacgtagagaaaatgtttatattatatatatatattatcacttatgagtagttctagagcacgaagaaaataatacattcgagattatccacctctaatggtattggcactaaaatgagtcgcataaaaaatgcaaccaatataaaaaagcaaaagagttattggcggtaaaatttatatcattacccgactaatttctttttccagttagtaaatccacattttatttttttaatgaaaaattgcattaaagaaaaccaattcataagaacttataaatctaggatatcaatctttaaaaacgaataaattagtatttttgtcatataaattttttataatattaatttgtgctcttatagtatatgattagttaataatactctttcaaatataatttttaaatatggtctttatataatattctattcaattttaccgtgaaatgagtgacgcagtaaatgatagttgttaaatagatgtaaaataattactttttttttttttttactatagtgattaaaaactaaaaataaaatataaattattatgaacaaaaaaagtttattgtattatcgacactaatacaatttggatctttaaagactgttttttcaactctttttataaaagggaaactcaatggtgtaaaatactcgtttggtacaaatgtagtatttagcggctttttaataaaaactgtagatatatcatttattacataccatttataatcggttttaaga

SEQ ID NO: 239056 - DNA, 2267 bp, Cannabis indica
cactgcccgcaccacaaacacccgtaatctacttccatggttggctacttttccagtttcgtagcttacttgctacctatgtatatgccttctattttggcatttatacttctcttctattaataagatctaccactttcactggttgcaggttggcccaattacatttgaaacaaagtttcagccacatcttgtgtggacacttgaccaggttggcttactcattcattctaaacataatacattttttatcataaattatagggatgtatattacattaaatctctaaaatggatactcatgtcagactgtgtaacattagtcttcacattttacttactttctaggtaacaagtaacatcgagaacaagacacaccaacttatcgatgctcgatcaaaacccaggtatgttttgcttgtttcgaatactttctattctaaatttttgtactaatgcgctgttgcaggtttgatggagctgttccagaacctcgaaagggtataagaagtggccatgttcctgggagcaagtgtgttccttttgcacaggtgaaaatcatagtttgtcaagctatctatggatacaattctttctaaaacttggtttgagattgaattttcctttattcctatattgataaagttcagaatatgaggtttgatgtaattgttctatacttaaaactctcaattctgaacaaagtgtatgttctcttcaggttttggatgcatctcagtcacttttaccggccgatgaactgaaaaaacggttcaatcaagaaggtaatactaaaatttcccattcatttgtaccaacacagtacaaagtaagcattattttaagagtaatttgtggcataaatacttaagtttaactcccagttgcaaataaatgtttaaatttaatttttggcagtaataatactcaagttataattctagaacttttgtaagtacctagttgctaagtgttagtaaattgtcacgtggttatttctgattggtccaaatcatttaaatataccaataagaaaatgacacgtggataatgagttgacatttaacggtcagatatctacggaattccaaaaatataacttaggtattattactgttaaaatttaaacttggtatttatctgtaaccgagagttaaacttaagtatttatatagtaaattactcttattttaacacttaatcgtctgtactctttactcgtagtaattgtataaccgatatgttaaaactcatgcggtaggtatctctctggaaagccccgtagtaacatcatgtggaaccggcgtaactgcttgtattctcgctctggtacacctcaaatctctctccctaataattttccttccatttttctatatcgctaccacactcggtgcacttaataaatcagaaacaaggaggttcgaggtttgaacctcataaccgagctaatgtagcgaaagtagaactgaaaattttctcatcttgttgcagggtcttcatcggcttggcaagcctgatgttccggtgtacgatggatcatggaccgaatggggatcacattcagaaacgcccatcaacacatctgagtaaacttcacaatttgcagaggattggattttaccaaaccacaacccggacagcgaaaagattgtaacaagaataactaaaacaaaacatttgtgtttttcgtgtcttgtaattaatgaacttggattgccccacatcttgtttttcttttcatagtttacttttaaagagaggctttgagcattttggttttgttaatttgaaagacaataattaatgatatctttgttgaaacataaatgagaagttggcaacatacttaatagtgtttcatttggattttgtttgtttctaaattgttgcataggcaagtgaagtggcttgtactagtcagatcgtcttaaataatttgggctctgataacaaaacatacaattgaacaaagagtaaaacatcaaagaaatttcaataaatgctatgttttctattttttttagaataattagcaattttgtcctttgaatttttgataatattgattttgatccttaaaatatacgtcttgttaagaatatcccttaaagttttacatatacagaaatttagtcctcttgttcgatttcatctcattattctgtttaaatactgacgtgtctttgtaaattacaattttgccccttaatttttaacaactatcagatcgtactcccttaaaataaaaataaaaaataatcaac

SEQ ID NO: 239057 - DNA, 5135 bp, Cannabis indica
tttttcctattgagccttgtataattatccatttaaatatgcaacatgcttctgtgctgattgatacagtatatgcagtcatatcatctcaatacatctcttccaatgtttattcctatattatggtttgtgcgaaatttaaatacggataaacatggcccttagtattgatactcttagtctcaattaagtactgagtgtgctaatgatcaaaagtatcttggattgtgttcttctattattcctgaagttttggacttcctttgtatgggctgaagcttatgaattgttgtgcagactgtagaacataatgcttatggcaatgatccttatgctaaggagtttggaatcaaaatcagtgagaggcttgctcaggttgaggctcgcattctacctgctccctgggtatgttaactatatatgtacaagcatttatttacttctagtttttggtacgtgctctacttatttctttgctttaaaattgtggatggtaaaatgacgtttgattttttgtgttgttccagcttaaatatcatgatacaggtagagaaaaggattgccttcctcaagttggacaatggaatatgatgaacaaggtagcctttttattgaattcttgatttatttctgcctcaagttgagtttgctatctaaattcttgctctgtaacccatatgctgaaaatttattgcactaatttatgtggatacctgaatttcaaatggggtaaaatgaaagttcctatgttgtatactaaaataaatgtcagaggaatttgccatttattctagcatcaacagaatgatttattacctctgttgcatttcagctatagcattcattctgacttcttacttatttgggttattcttcttaattacttgtagaaaatggtcaatggtggtacggtgagcaattggatgtgcataaacttttctcgaaatgttcaagaagctgttgctcggggcttctgttatgaacttgctcagatgtgttttatatctggaatggtacaggatctatatgcttgtaaaagttattccttttgaactttactttcaagtgttgtaaatgttgatcttttggttccattttgcaggcatttaatccagaaccagtactcccacctgttaatggtcgtcctgatcaggttgaaaaggtcctgaaaactcgctaccatgatgctatgagtcgtcttcaacctcaagggaaggagctggatctgcttattgttattttaccagataataatggctctttatatggtacgaaagttaaagtcagttaatctattttgtatcatgtgtttcttaacatatgcttatctagtgttatgctttcatttgcaggtgatttgaaacgaatctgtgagacagatcttggccttgtatctcagtgctgtttgaccaagcatgtcttcagaatgagtaagcagtatctggcaaatgtggccttgaaaataaatgtcaaggttggaggaaggaatactgttttggttgatgccatatcaaggcgtattcctttagtcagtgaccgtcccactataatttttggtgctgatgttactcatcctcatcctggagaggattcaagcccttccattgcagctgtatgttatgaaaacatttctatgttcttttgtgggctttgttcttttttttaaaatttttttcactggttatctgaaatactttcaactgtcttcatattataggttgtggcttctcaagattggcctgaagttacgaagtatgctggtttggtttgtgctcaagcccatcgacaggagctcatccaagatctgtttaaaacatggcaggatcctgttaggggaacagttacgggtggcatgatcaagtatcaatctttctctcctctccttttctgatttaataatactactatttacatgcatcctaacaacagaaaatgagtttaagggtcgtttatggttatatattttctgtgtgcttgggtaatactattcttgaggggtctttgaattgcatatgctccttgttctttgactgcagggaacttctcatttcgttccgtagggcaactggacaaaagcctcagcgtattatattctacaggtatggcttcatgatgttaataatctctttttgtctttttgcactcagtttgtgctgtttaaataattttgtatcatggtgcagggatggtgtcagtgagggtcagttctatcaagttttactttatgaacttgatgccattcgcagggtaaatatacagtagtgtagaattgtctagtttctttagttttatttttaatttgaactaatttaccaaaatatttattttatatagacggttttgcttttgtcaatgatttcaggcttgcgcttcactagaaccaaactaccagcctcctgtgacttttgttgttgttcagaagcgtcatcatactaggctgtttgccaacaatcatcatgaccggaacgctgttgacaaaagtggaaatatattgccaggtacaccatatttttacaatgctaaatgtataatgtatttgtatgtacatatggttaattatttacatgttagtcacacccttatattctaatgaacaggtactgttgtggactccaaaatctgtcatccaacggagtttgatttctatctctgcagtcatgctggaatacaggcatgtcatctttttgcaattctgaattctcttttactgttcttgtttatgtttagtgtctttatattagtggtatacatgtttgttaagcatattggacatttccgaaacagggtactagccggcctgcacattatcatgttctgtgggatgaaaacgagttcactgctgatggattgcaatctttaaccaataatctttgctacacgtaagttttatgccattactttaatttttgaatcgttcattgaagtggcttaacttgtatttattttcaacctttgcaggtatgcaagatgcacccgatctgtttcaataggtgctctatctctcctcctgacatttcaagcttactgtagagttttattacttgaacctataagatcgaatgcttttattgattggtttgttttctttgttttgcagttcctcctgcgtactatgcccatcttgctgctttccgagctcggttctacatggagccagagacttcggacagtggatcaatgaccagtggcgctgctgctggccgtggaggaatgggtccaggtgcaggtggacgtagcacaagagcccccggcgtaaatgctgcagtaagacccttgcctgccctgaaggacaatgtcaagaaagtgatgttctactgttgatgcttcttcaagttttatctttgttctagcccaacctacaattagtttcttacctaagtaatgtgagagagatctggtattttacttttttaaaaaggattgccacttttactgcaacttgtcttgtacggatgttaaactgagtttagctattctacgacactgtttaacgtttggtcaaaactagaaaagttggattcaatgtttggtggcggtccaccaaaaggtcgtacctgtgttgttcaggtggaggcccccctttgaaatcttgttgcatgagttttcttgtttggacacgtgttatacttttttgcagtttcgccagttttgagggttttttgtttttttgtcttaaaaagaatcttgcttgttgaaagcagggtgagtcggttcgaggttaaaccaaaaaagaagattctgttttctttatcatcgggggattaagtgttttttttttttgcttattggttggttacatgtgagatttcaaaatgaaatgtagcatgtggcttgtgaagttggatgcaccttaggtatcaattagtacaagtctttcaaagatatcagtttttagtgaactaattaccctgattttcgttttgtcagatctaagatttttttagcgggacattatttccataagttgaacaaatgtacaagtaccttaactgtttattttttttattttatttagtgaacgctaattttaaactgaagggtttatattattttgaaaattatagccatttgctttagagtctaaaaattcgattattttggttaaaataagtaaaatttgggagccagagcagatgttgcattttgcagattttgacagttgctatacttgcgcaatgcactgaaccgtattattaaccctgggtaattttggtattacactaatttttgtgccgttttggttctgaaacacttacacttggaatgtgggcaccatttatcgatccaataaaaatttcttgagaaagagggtctgaactttgtactctactctgtaatgtttgccctctaaacctcgatttcaaaaaccaatatgttttctctataactttggttgtgttgaggtgactactttccttactttatatttaacaatttgccaatgtgtccttttctttttgtttgtattttatttttttatttttctttttctaagtatatttttaataacaaagactgtttaggatatttggtgtgaaactttcttaccatttacaaaaagtatatgtgatagttcctttcgttattgttttgttttgggatgtttattttttttttacaaattgcctaacacaaataatcatccaaactaaactgaataaatgaatgaaaaatgcaactcgaataatccaacaaaaatccaaactgcctaattatgatgttgggtgggttaaaatttattccaacatgcttgttaactccataatttagcatggctaaatcctgagattagtcttagtgaagtcttctattgacaaggtcctgtcaaatggtaagatggcatgatctctctatcggataaggagatcaagtctcgacaggccatcaggcattgatacatctcgccaggccaaaggccatgacacatctcactcggcccaaggccttgacacatctcactaggccataatgccttgagacatctcgccaggccaaaaggtgcatatcgccatgtcatcaggccttgagacatctcactaggccattaaaacatgaagcatctcgctaggccatcaggccttgagatatcttgccaggtcatcaggctaaaggccatgactcacctcactcgtgca

SEQ ID NO: 239058 - DNA, 1861 bp, Cannabis indica
aaaaaaaaaaagaacagaaaaataacatctgcttatatttgtaaatatgtacatgactttgtgtatgttctaataattttcagaaagaatagaaaagaggatcatgacaaggtctttgaaaacaattttgctgtgaaataaaaataggtagctttagataataaggaaagaaactacttaatttgattctttgctatggcttctaacttatctaaatatatacgaggaacgaaaagttagaaggtagaggtacctctagttttaattaatcagtactcattgattccaacacatatagcttttaccatattctcctaagcactcagcctaatctctctatctaatctggaataaccaatgccacctagtgattagataactgtaattagactatattatataatttcaaaaatacacagtacaaaggaaaagacaaaattaaagttgaaacaagtcggcatttttttttatttatattctttatatctcagagcttcaattccttttcctttcaacaaattattcttcaaaacacctgcaaaaatcacatcaaattattttagaataaaaattaagaagatatcaagaataaatcaactctaatacttgaacccagaattctcaaaggatgcctttggcaactgtaattccactcacaattatatattttaaaaaaaattgatatatgactgtataattaacttaatcaaaaatttaatttcgtataaatactataaatacaaataattaatctaaacccaagtttcaaattaaagcagaacttaaacccagtagttatataatttaaaacaaataagatttaagggggaaaatagaggaagaagaaacatatatttatataataattgattatttatagataccttcactttggggttggggattacaattaggaggatcttcgaagagtgacaaggagagttgtttgtgagcaacaacaatgtcaaagaatataagacctgattttgggtctttaacgatgatgtctttgactggtaaccatagaaagagctcttcttgagtcaaaccctcaactcccatgagacttccataactgaggttggccttcaaaacggcgtcgtagaacactctgttctcaaacttggtcaagcatggtccgtggaggatcacttctagttgcccttcgtcggagagggtgtacgactttacctccttagggaagagacccgccggtaatccttttgaccggagaagatcgtgtatgtcggacggcagcgatgatgatgatgaagatgaggtggaggagagagagatgggtagtacagagagagaaaaccaaagaagaaaaagatgattactacaatggtagatactcatagttggcttgccttgttggctctttacaatttagggagagagagagagtaaaaggaatatttaaggagtgataatgaaaattttatgaactgtttaaaagaggttggtggctaagattagggttttctttattctcttaataataatatatactcagtcaccagtccactgacatttattcttgtcacattttttgtgcataaaattggcgttcaaatatgtgtgtgaccacttagtaatttgtgccattagaaaactcagttataaatgataatagtgtgggcatagatggatggtttaaccgtagtagcaagtagcaagtatgtcattagtcaataataataataataataataataataattatataatataggaaaattctataatgcacctccttaaaaggaatacaccgatacatctctgtctgttatagtattcgatataattttttagtcaaattttttctcgtagttatgtaaattataattatttaagacat

SEQ ID NO: 239059 - DNA, 3119 bp, Cannabis indica
gatagaacaaatttgaggttaggaatgaagtttaacatgatttgcaatatttggtgatgttttgcgtatttagcgatgtatttgtgatatgagactaaaaaatacatatcacattgctaaacatcgctaatcatcgtgaaaacttgggtatgattttgcgacattaagcgatgtgtagcgatgttgtgaattagagacatttagcgatgttctacgatttcgcgatgtttcgcgacatttagcgatgtttcacgacatcatcaaaaatcagaaaaaaaaatgcaagaaacaagtgaattgagaattccaacgatggttagggatttcgggggtttcggggtggttaaagtcatagattttggggctttgggttttacaatttctctttgtgattttgcgacatcctccttgattttgtcttatgtttcgttttcgaagtgagtttcgccggagctagtgcggtgatcgtggatttggtttgggtctggttcagtcttgttctgtggtcgtgggtatcggttgggttttgtaagagttagagagagagccgagagaaaaaaaaaagtatgaggagagtattttaaaatttaattaattttagagtattaaattgctatgtattttaatatgagatactaaagaatatgaacaatttttaagaataaattatcaaacatcccatattaaaatatacttgcggtaaaagtaaaactgatcaaataaaaataatatatggttggcgtggctaacgtcttttcttcgtcttaatcccagctctctctctgtttggccaatgaaagaatttcaagttgagaggaaacataacaattaggaaacaaaacacaaaacaactgtgtgcgactccggagactggcattcacacccccatagtctagaaaacccttccatggaggagaaacgccgggacaccggaaccctaatgtctcccgccggtgaattttctccgcctgcggagcccacctcttcgcggcgccggggcggagctcagaagagaaaagctaacaacctcggctcgtccggctcttcatccacgtcgtcgaagcgcatcactcgcgagaaagcttctctcgttcaccctccgatccacaacggcccactaaccagggctcgtcagggacccagcaatctctcctcggcttccggggcaggtgttgtagcggcgtcacctactggggcgaagccagctgaacacgccaagcatcctggtggtttagttggggagacaattgtttctgtagctgaggaattaagaaaacagagcgaattggaagctttggaggctggacttgaggccaagttcgtggccactagatctcgtagtaactgcgcccatgtggttcccagtcattgcggtcagttttagtgcctccatatttattggttcttttggtaaagatatgaattttgaagttagtagttatatggattttatgcttacggatctaggtcaagaaaattaactctatttagagcagtagttagaatttgatttggttgaaaatgaatttgtttctgaatcataaatgcttgtttgtacgtacttctcttttaatttgaatttaacttgaagctaagggagcactggctagagtttttttgcaagggcattgaattttgataaagtggaagcaaaattgtatgagcttttgcaatgaaagtgatttttttcccttttcttctcaaggatggttttcatggaaaaatgtccaccccattgaggaacgcacattgccatctttctttaatgggaagtccgagtcgcgtactcctgatgtgtacttggaaattcgtaacgggattatgaagaaatttcatgcaaatccaaacatacaaattgagttgaaagacttgtcagaacttgaggttggagaattggatgctagacaagaggtaatggagtttttggaccattggggtttaattaatttccacccattcccaccaactggtcctgccactggtggtgctgatgataatgttgcttcagaaaagggttcattggctgataagttgtatcactttgaaaccctgcaatcttctaagcctgttattcccaaaaataatatatcagctccagctgtgtcatcaagactgtttcccgaatcatcaattgctgaagagttaataaggcctgagggtccagctgtcgagtaccattgcaattcttgttcagctgattgctcacgcaagcgctaccattgccagaagcaggttagttgtgttttcactggagaatgtttttatcaaattgttgttttccataatggtgcaatgctctcaaaccaatgtttggttaagttaggattgccaagtttaattttaattactcaaatctatgcagtacccaaattgcacagttcttcgacatgaattgcaatataaatttagttttgcaatttggagttatatgttcatgtatcagttttgtaaatttagttttaataaaccaaatcttggtagttcctgagtcgcgcttttcccaggcttggagttgaattgttttttgcatgttaactttatatgtttcttgatcagttttataaaaacgctagggtttttctgaaatgctttatgaaagatgaaatctttacttaagcatacgtgcaattttaaatttattctgtaggtttgtttttttgttttaggatttttatttttattttttatctaaacttaaaaacatgccttttgatgatcattcaattctgacaatgtacaggtccttgtattccatctcaatctctttcatattttacattcgtaagctctatatttaaaatctgaagatggacaataaactagaatgtaatgagtgcattatatgagctagaaatcaaatttgcttaccaactagaaagtatcatatttagggaagcagtggtattgaactgtcatattgttattagtgcgattcaataacgggtcttacatatttttatttagaggagtgctaatcacaacctcctattgtaatctcttagtcaacctacgcacccgaaatcacatgctggaatatttttttttttcaatttctttaatagcggtattcgttgtagttacaatatcttatccatctaaatttttgaatagtttacagt

SEQ ID NO: 239060 - DNA, 5138 bp, Cannabis indica
aaaaacatttcttgacaatgctccaaaaccaatttctaacacattatttatttttcaaataaatcaacaagttataacaatcacaacaatcctacaccaagtaaaggtccatgaaaaaggcaattttacagtcaacctactggacaaaatatgcagctgcagaaggttccaacaagatgagatactatgtgcacatgcaatagttgaatttgcaaaaaaggaattaagaccgtatgattatgttgtcgactactacaaaactgcaacagtgaaggcaacatatgaaagaattgtacattctccaccaaatgaaagagaatggactatacctgagagcctggatcagatagttttgccaccaaaataaagaaagatagcagggaggcctagaaagaaaagactaagatcaaaaagagaatcaaaagttgtcttgaaatgcacaatgtgtggaaaagttaggcacaatcgtagaacgtgcaataatccagagctttacaaatcttcaaaacagaataacaaaaacaaggagtcaaagaagaagcattgatcaactagaaaataaataaataccgattgacagtttatgaaaactggtttctcagcattgaataaatttgagaactctagaactttttcaataagataattacaataacatttttagatttttgaactatgatctggttaaataaactttgctttaaatattttttcataatttcatatattttagaaattaaatacaacgaaattacttttatgaaaataaagttacatgaaaaatatttaattttacataataagaaaccagttattggtaaaacaagaagaatcaaaagcagttcgatagtgatcaattcacggacttttgtgccaaacatggaataatcaaaagcttttctactatggccagacctcaagcaaatgaaaaagtggaaaccgttaataaaattctgaagactactttaaaaaaagaagcttcaggcttgcaaagcaaactggccgaaagaacttctaagagttctttgggcctatagaaccacttaaagaacttttacaagccacactccgtactccatgacttatggatgcgaggctgtaatcttagttgaatccacagtgcctacacacaagagagacacctatgacccaactcaaaaccatgctctacttcaggaatccttggataagtaaagagcttcgagatcaatcataggtccaactctagatgtatcaaaacaaagttagcttgaatttcaactctaaagtcaagaatagaaaattcaaaattggtgacctttttttgagaagggtatttccagcctatcaagagcccaaagtggaggtcttaagaccaaactaagaaggtccatatgaagttatagacaaaattggtgatggaacttaccatttaaagagactagatcgaacatgaatcccaatagcatggaacactgaccatctacgccgatactattagtagactaggggtggtcaggttcttttttgtttttctttactttttattttagtattaatttccatgtatgccacaaggcaggaagtacttgaataaaagaagtgatcaaaagtcttgattattaattacttgggggtagcatatattatattgttataaataattttacctctttcacaagaaataactaaattaaattctcaagtatgaaagtagggagtatctcctaaaactggaaccttagggaaccaaaagtaagccactaccttattatatttaaagttaatctagtgtttaatcaagtataagagtaggaagtatcgcccaaaattagaacctcaagaaactaaaagtaagccactaccttattatactaattggaatcaattctaacacattatcatttaattcaggttaacttaaagtagaagttcaggcttcacggttaactcaatttaacacaaatataagttcacgcttcattgttggttcaggttaacacaactaaaatatttaggctacttaaataaattaattaattcaggttaattaaacaattaagttcaaaaagcgctgaaaacaagtgacatttaccaagaaatgtacaattctaaagtaattaattagctcaggttaattgattatttaagtttcagagaaaccttttagtaaaaacactttcaaatattttctcaaaaaataaggaatatatgtaagtcaaagcatttaattaacaatctaaaggttcatgcctttagaaccagaacctcacgaggctggaagcattaaaacttagcgaattcgataggttaaagtgcaaatatcaaaagagttaatacttgaaaatcccgtggtaagggtataaaatattatccccttacacacaaaaagggggacccttgtccccataaagacaaaaaatattaagtataaagttgatgatgaaaggaaaggatggttaaggctgagctaaatcctttggcaattgtggatctttggttggaacactagacaagacctctgggatggcagagttgatcaaaagaggaacattagaggccagaagagctaagtcatccatattctcacctacaggaatggtagttctaggatcgtctgcttccatctgttgaggtgcttccttatatttatccgcctcctcaagggccaagatcttaggcattagcgtttccttatcttcagcatcaaagaggtctattacggatttatcatgatgccagatggtatatatcgggtagacaaaggcctgttctagacctttggtgtactgggcttattgctcttatttctcaaagattgcctactgaagttgtccctttaaacttgagttttcaccctctagtttggtgatctttttcttggactcttcatagaatttcccagatgactctaatttggtctcgacctcctcagccctctaaatagcctttatcttagcttcctctgccttttgtttcaacttttgatgatgtttcatctttctctccagagtggtttcattaatgtatttgtcctgtatgattttagcctatttatcatactcttgagatagggtggtaagcttttggtctttttcatagatatctagctttggcaacttcaagtcaacttctaagtttttgatttttgtaagagcggtggaatgcaagtccttatacttgtctccgcattccctcttcgtcttggtcatcccatttttgtgagacaaggccttgtctagagatttagtcaccatttgctttacgatggctttcatcctatcattagctttagctagagcattgatatcttcctccctcttctgttcagcattgtcataatctgccctcagcacctcaagctcgtaggccaactgagtgacaatggagctattattctctgtcattaggctcacctattaaaaaggaggtacaaatgaatcaatcagtcaaaagatacgaagtgttgattcaaattaaaggaaagtcaaacttacaacattaacctaggtcctcatatcatttgccacatagatcagatccctactcgccatcatggaaaacttgttagctccgagtttacaacttgtagtagcactctgatctaatagatcagccagaaacggtgactcatctgttccaacacgaggatagaccttctctatcatctaacctttgttcatgaggggagggcagggctcatcccatttgtcttagtcaataaactcagcattacgtctggtggagatactactggtcaatttcttcatctcttcgtattcgtttctatgccttttttgataaaactgctcaacgacctccaagtttgtgttgtctccttctatcattgaaaaaggccttttaggaagattgaaaggtgctggaggcaacagaggtaattcagttctctccctggacaactgggtagaggtagctagaataatcttagatgctaggggtggtggagaaggatcttgattgacccttgaagctttggtgcttcgcctaggcgaccttccaccattagacccttttgggactgagtttctgcagcttgccttcttggggctgccagttgtaagacattatccttggtcttcacccttgcccttttactggcgccaccttcaaaagaactgaaccgtttcttattgatcacgactggtccattataatcagagttgtctcccccagagttttctaaggagacttgtcttagaggttttacatccaggacaagttcggttagatcaatgatggaagtagacaagtctttcgtgcccggagccttagaagtagcctcttgattcgaagccagaggtactggctattgagatttgttctcgaaagcttggcccttttggcccatatctctgccttccctggcgacttaccaaacctcgttagacctggattgaatgttacccagaaacctatttagcaaccccatttgtaaggtggctggttaatttgcataaaacaaaaaaaaaatacccgtcaaacaaggccatggcaaaggatacgattttcattaaaaattatcatgcaaggcatcaggaagatcaaaaccattaattctagcatagttgacattccccctagcaaaaagagcaatgtcttcttgacctatgttagtctcgtgctagaagaagcctaagaagaaaattttactaaaagcatccactttaaaatgatgttgcacaggtggaaggaagtggttggaactctttactatgtaatctactttatctatgtatttattgcaagggaatttacaacgatttgaattcaagaagtatggatcaaatccacactgatcaacaacatctaagttagttagagtgggagccctaattatgtaaaagggtgtttcaccactactggaggtgctcactcccggggcaccctcattctacactacctccttgaatctgatagtgagtacttcaatctcgcttaggcttttggaattgtctcctccaattcgccagccattgctcatatgcttttactgcctttaaggcctccttagcaatgatgactgtgatagcttccttaacctcatccaaatcaccttagagagcctcctaaacttggttcttcacaaaaaaatggtccacatcctgatgtgaagcgatgaggcctacttctcgtaagct

SEQ ID NO: 239061 - DNA, 5577 bp, Cannabis indica
ctagcagctgatgttttcgtatactctttatcttttgaaagagatgtttttgtgtcattttgaagttagggtgtctaagtcttactccgagaaatttagtttcttctcattattatgaggcttttgttaagttttatttagactttagtaagataaccatttcagattttttggttgagctttgtaacttcgtaagaactttgtgcaagatcggagggaatgcagtttatgtggtgattcttcccactcaaacttttataatttaatttttttttatatataatttcttaaattttttcccataaattaatatttgatctattatattcatatatatttttattattgcccccttaaatttatatttttttattattataaaaagtattggtctggactcaaaccccgaaccaagccccaaacttggtcatagacttagagactggctccagaccaagactcaaaccctagaccataccctaaacctcagacccagacatgaattttgacccaaccccaacccttggacttcgacccagagacctggccttggccccaaaagttggacctaagaccttggaacttggaaccaaaaccccaacctcgaccctcacacttggacctaggacctagaccttgccccaatcccccggcccataccatgatttgaaccccaatcctcgtacttgaccgaacttgacccagacatcaacccactttctcttgttagagatctgaggatttggatctttagttctttaccttccatctatacttgaaaatgattatgatttcaatggacacttgtgcttcaattggtcgccttattgtcgtttgctcgcccttatttgtattaatttacttttgcttatcattaagctttgtaatgtactctgtccttttgttctttgttaaataaaaaacttaaatctttccttaaaataaattctcattccttaaataaaaaaaagtaataataatgaaaattactaaacacatttttctaaaaaaataatttttttttttttcaaatttttattactgttaccaaaagtaccataaatattttgaattatatttttttatttctattgcttacataatagtgataaaaatttgaattataatttctccaaatgcttataggtccaacaaattttacacagctgtactaaatagttaatgatggattctttctatcacgtgtttattttgattaaaaatccaacttaatatttgtggaaaaattttaagagcctaaaaaatttgatagcacaatttagtaaatgtcaaagttattgatgaattctttctttcatgtgtttatttttgtttactttttgaagaaggacaaagatatattattatgatttcaactcattttttctattgaatctatcaagtggttatgattacatgatgaaatgaaatagtactataaattaactctttatggaatgctcaaaccataatcacaacagtgtgagagtgaaaagtgccattgctgggggctgaaatcattgatagagttagctacaacaaagccaatagttttctacacactaagaaaaactacccgttgctattttcagggagaaaaaagaaaaagaaaaactattggcacatactatcctaaagacaagagaacaaaaagtagattatacaacattagtttcatccaatggatgaaaaaatcagaccacaaccagcccagctgccaccagattcaccaacacaaaagtaagcccaacagtttattggaacatcaacatctagttctagtggctttggtcatgaaaatactctgtaggtatcataggagggacatacttctttgctacatatttgtactgtaacataaatcaatgaagactagttagttcagatacaattatatcataacagttataacaagtgaaaaactatttgttaccttatgttgactgtatttctctctaatggcaagtaaactggagttgttgttattcgaacaaaggcgatgaagatctttaatacaggaacacaagtctgatggttggtattgtgtgtaatgaagcaaggtgttgttctgttatcatggaaacaaaactaatgagattttactttcaagtgttaaaaaagaaacaaactttacatattggattgatgaagacatacccaaggtctctttgatgggaggattataaaattggctaagaaaattgctgatgctgctatctttgatggagggtaagatagcatactatactctaaaagagataattctgcaaggtagttagccaagcactcgaattgcattaatgggacctcattgattccttgagcagcacgaacaaatctcctgtaaaccaaccaccattaatacaacaaataccgaaaagataacttgtgatgaaagacagagaaaagcttttaggctatataccttaagaaacatttagttgttggggctgtcatttcaaacttcaagtaattcaacactgaagattccatttccaaaacctgtcagaaggaaatgcttttatgttaatgttgttttttaggtaagaagattagtatgaatgaatatggaagtactacaacaaaagatataacagtacctcatccttgaagtaggtgttatcagttatataacaaaattcttcaacttggggtgcacaaatctcctcatattttctggaaacataatcaattttcatgttaatatcataacacatacaattcagtacatgtaatgtgcttgagattagtgagaatttttcttacgaggcaatcatcatgcaagccacaccgagcaactgtaatcgttgtctattcataacatttccagaaagatatctgtctatgtaattaactgtcaagtacaatgtatcaggtacaagcctgtactcctcagacacctgaaatcaatcacaaatggaatttcagcaaacttaataagataacaagtaaaatctacaccaatctatgacttgttgaagctagctacctctacaagccaatctattagaattgccctcatgcttggagtaacatctttctgaactttctccatgaaatctgttgaaggccttttattaacctgaaattccaatgaattgaacagagctcagcataagaaataagctcaatgcacaatgctaacaacatgaagaaagagttcaaacctcagatgcacgcaaatgcttataaatatcacaagcaatggtagcacacaattggggatccatgaaattactatcaacatcaacaatttgatcatcatctatttccatctccacagacacatctctattacaaatgttatctgcattaaagataaaagacatatttcagtacttaaaaaacaacatcacaatacaagtaaaatgaaatgcagagatgattggcacaaacctgttgacttggaatgttctgaaatgtagagattactaaatgtcttcttgttaatagaatcaactgcaacatattccacttctggactcttaaaagaatcacacacagacattgtttcatccaaagatacagaaagattttctgattgagttggagaaacatccatactagtacatgtaatggccatggggaggaggaggaggaggagcttcatcaagtttttgtttagatgtaataacctttgaactaggtttgacatttgaggaggatttgagcatcttgttcccagaaacccccacattattattaggttccactttcttggttcccaatggtacctaaacagagacattaaacaaaaattttcaatacccaaatagcaagttcaaatctttattcgttttctcatcgaattatgaaaagttagtaaaaccccacaaacaagaaattcaaataaagaaaaagaaaagaaatacgaaccaaaggaagagttgtctttgaagcattactacgagactcattgttattattattattacttcgattggtcaaattagagagaggggctctcttctttggggcacccaacacagaagaacccgaaaccttcttcacattttcaaccaaatgcgaagaagaagaagaagaagcatgtcttttagccaaagaagacgacgtcgatgaagaaaaagacgaacgacgattctgagaggacatcgtggaaaaacaaaccccacttcacaatttcctttgaagaaactcaaaagggtcaatttctcttcttcgaatttctttcgaaattgagagaagaataagaaaagagtttgtttggttgttgagaaaaagaagtgagaaaaagaaagggtttttagaacagaggaagagaaaaaagagggataatttgaatttgaaccgttgctcttctagtggggcccattaaccaacgctcctctatagatatagataaatatatatatatttgaattcctttgaatttaattggacagtgagtgactgtgagtcaccagcctgtcagattatgtttctttaggatttttgaatttgaattgttaaccagtcaacaacactgcacaaattttgccttctttcttgccccaactcaaaaaataatattgggcaaattataaaatgtgtatgtattgtatgtatgaactaatttattgggtagtactaatttgtatagaaaaatgtgctgttttttgttttgaaatttacttcaattgattaaaagattcgatgtgaattgattgatagattatggagttaaaaagaagacctaattcattgtctatgaagaaaaatgtgttattttgttatagtatgagatcttatattgattagttgttaatacatatttaatatgtattaacaactaagtcatttatatgaatatgttttaagggtgtgtttggaagccataatgtaattgaatttgtgtgtaattagattacataatttggcatgtttgtctcaccatgtaattatattgtaactgtgtaattaaaagtaattgaggggttccaattacactcttcaattctcatggggccatgagaattgaatgtaattacactgtgtaattactaaaaactttccatgttaaacattacctatactaaaaaaatattatttttccatgtaattactaactattttggcaaacaagatattaggaattcatatgtaattaccactttatatccaaacacaccttgcattttaaaatatagtgtaattactagacttagactgtgtaattaccaccctagtcattaccctacctagtaattacacagttacttccaaacacaatgtatttacaatgtacagtattttgcaatgtaattacccattcatatttactgtgaataggtaatgactattggtttaaatgtatttacaatgtattttgcaatgtaattactattatgtcatttatatgaatatgttttacaattctaagcccctatagaatcactattatacctttgttggaaaaatttggtagaatagcgagtactcaggtaaaactaagggtgcgtttggaagtaattatgtaattattaagtagggtaattacacagtgtagtaatgacactatattttaaaatacaaggtagtgtttggatatgaggtggtaattacatgggaaaataatat

SEQ ID NO: 239062 - DNA, 1456 bp, Cannabis indica
aaaaaaaggtgaatatacattgtgtagacattcaagatttcaatgaaagagcatacatcataaacttcaaaaggtcaacaaagcaaaacaagtaatcaaactaccgaaacccacttaagagcagcaagaaggaaggaatcaatggcacaaatgaatgaatttaaacacacgaagaggagcccatacaatgacacaacttttcctctttgaaaggagacatattttcgaaccaaaaaaaaaataataaataatgaaatgaagagtttcacttttacgttagttgatgatttaatgactgactcataccctcacagtcgatcttctcatcattctccaaagtattcttctcatttttcgacattctcaggattcaatattataaacatacccttttaaatttgacaatatcgcaaatcaattgggtctttcatgaatgatttggtggagattagaattcgaaacaacccatttcggtttcaactcgcatcaatctttatattcatcatattagatcagatcaaatgtttaattttctatgtaaaagtcatttcacttcacataacgcagccagcaaaacaaaattaaagtatttaattgcgtgttgaacaaattatatgagctttaaactgcttcacttcagggtttattgtttccacaattaggtctattgtgtaatattgggcggattggagtgaatctatataagagagaagaacaaaaagaactatatatacccagccctaaaatctaaaccctaaacggtgcacgttttggttgatattaaggatgaacagtattctataggctctttttaataagaaacagaaaatattcaggcagagagagaaggaaaacatatggtgaaattacctgaactcgacggaattcggcttcggcggcgatttgttggctgaaatcgcagaggattaagagagagaaagagaaagagatcgtgagaatagagaggagagagaaaggaaattaaaataaatgatgcaatttcaggtttaggaattgggctgggctgcgctgggtccaaagcagtaagaattattttgggataattaccccatattgaaaattttaatttttttttatactgtggggaatttttttcaaaaatattgtatactgtgttaagttttcactgttgttctactgctgtttttttttttgaaaaaattacatcatctttattaattgcaatccatagtgattacatgattaaaatctagagtaacatcactactcctgataacacgagcaacaactaaataggatgctcgagctaagaaatgaacaacactatttgcagaacgtctaataaaattgacataaacatctcgcaagtcatttaacaacatcttacaatcagaaataatactccaaacgtaatgaaaccataggaatagagctacgtaacgcttgcaccacacagtaagactatcagtttcaa

SEQ ID NO: 239063 - DNA, 2281 bp, Cannabis indica
tggtttttaaaacagaaaacaacgttttggtgttttcaaaacgcttattttttgtaactttgttttctgaaaacagttttcaaaaaacaaggccaaacaagcactaacacttttacaatgaaataaacaatgtaagtaagacgtttgaagaaattacttgccttggtaagccccaagagggcagttttagtaaccccgtacattgccacggcagggtcaggtcggaaagcagttatagaggaaataaaaacaactgaagaaccttttgtcatgtgaggagctgcatcctgttaacataatcgagttgaatcattttattaacatctaggttgtgtgatgtaaaggataacaataacaaaggagagaaaatagaagaggcaaaataaagagtaaacttagaaattggaaaatgaatcaaacattttattatcactagaagttgtcttgtacatgaatctcccacttatttataggattgactcttactaggaatgtaacgatggataatattgtaatcatatcatcttgtattcataatcttatccctgaaaaagttatctattcctcattacacatgtttactaattcgtaataaaacccgtagtggccataaaatgaagttttttcatgacctctcatttcctacaaacctttctagttgcaatgctttaaattacagattagtactaaatatgccccgaaaatattacaagctcaaaatgagattgtgaatataaagtgatgactcatgattatggtaatctaggtgaggatcagtaactgtaacgcaggtcacaaacaaaaccaatgaaaaataattaagaccatatcatgctacctcactcagaaaacaatacagcatatacttcttctcatttcctactctaattacctgtaaaacaagtatagaagctttgacattaacctcccatagcttgtcaaggacggattcttgggtttccaaaatcgaatcaacagaaggattaacagcagcattcgatatgaacacatctatcttcccatatttctgcgagcaaaccagcaagtttcaaacacttcaatagaatacataaacaaacactaactatactacgacctttgataattgatcttaaaaaatcaaaggccaaaccaataacgcaaactatgtctgatgtctcacctgaacagttttgtctataagattcttcctttgctgtgcatttgaaacatgacaaacaatcccaaacgtctcaattcccttccccctaagcttttcaactgcatcatccacgtttttctgggataatttgataagaacatctccattaagttatctattctcaattactatttcttagcagggaaagaaatcaaatttgatatgggaaagaaaatccaagtgcgtatatttcaaatttataaaagcaaagactgaaattaagtagtacggcgtagaaacctgctttcgggaagagatcacgacggaggcaccttcgatgccgagacgctctgcgatgctgaagccgattccctgagtcgacgccgtgacaatcgccaccttcccttcgaatcttctcccaattttatgtgatttctccatttttttcagttattccaaagatgaaacaaaagccgaaaaaggaaaatcaggttttgaaacaagtgaagtccttgtaggtgagatgatcaacgtaccttgtttttatctagatgcaaatttggctttctcttacaagttgtataattttataaaataatacgatttttttttatttatattttaaaaaaattatttgaatgaatttttatttattataaaattttaccagacatgttttaattttcaacatttcaaattataatttaccacaaatttaacctttgaaactaattgcaatgttgtcaatttacttgaatttttattttgataatacgtcgattcagtaatgagccacaaaaataatattaatatagcgattagtttgcaactacatattttctagtttaatcactaaatatagataatttttttaagcatttcattacaaatataaagacataatggcctgctcattctgaaaagtgttttttagctaaaactctaacgaaaaaatagagtaatgtatatttaattattatttcccccaatctaaactaaaaaaaaaaaaatctgcatcaattgcatacagacaagctaggataatttcttacagcataattgttaaaaaacattattgttgcctagcacactctgaagtgtcatactaccatttgtgtaattaagtatcgaatttcatat

SEQ ID NO: 239064 - DNA, 6167 bp, Cannabis indica
ttatagaattttccttattttagcattcagaacaaaaatttagtcatgtcttttttgaacgtgtaccttatagttatttaaaatatcttacaaaattatgagaaatttataataatttacaatatagaaaacagtattcaaacaaattaattttacacgcgtataaaataaaagagtcacatgtacaacagactgattgaaccctatttaattcagcgtcttatttttttttttctttttttttgtaatttctcaaaattttataagatgtattaaataactcaaacttacacatttatgaaaaaattagattaaaaaattcttttaagtgccataataataaaagttgcatcaaatgcacacattttaaaagagtgtactatagaatttttttcaattttgttcaatcttttagtaccggcattttaaatttttataagagtgatactaaccgcaaagagcacagacatcatacatataaatatagaagtagtctcacttccaaatcatgagtattaaacgtgtcatcccaaataattactctttcgagtaaattaagccctctatcatgagaaaatgcccaaatatgtgaagagtatgtttgcatatcagtacacggtaatctagtgtaatgacacgagtcttattaattcattaacttaatttgatgagtgatcaaattcaaaacattttacaagaaatgagaaacaacaaagtgagagaacacaaaagaaaattaatgcttagaattagaaatgtgtggtttgcgggagaagatattccattttgttttatggagagtgagtaataattaatgtttcctaccaacttaaaagcagagataaacaaagactcctatgatggctacataaaggacaccattttctcttattaccatcattccacaactgcataatatattttaagtgtgtgtgcaaactaaagctacgtccactcatcaaccgcatcattggcgataaaaagaagaggacacgacaagaccggaccacaaaccccatgtcaccatatacccattattaatagcttccaataacttattgctttgctcataaagttaatgggaaaagtaataaagaaagggtttgagcgaaaaactcaatgctctcagcaaacttttgcatcacaagttaaagcagctcatgttgctgtttagttatttgtgaatattaacctggggtgatgtcattatggtgcagtttggaagttgggtataattcatgaggtgatgtcattatagaggtcactgaaatatggccaaagaatgctgattaaagtatgtaaatggttcaattctcaaacaataaaaaaacaatacataaacggtgcaagcaaaaggattaggttgaggactaactcaagtaaattatagcaaccaaagaaagtattatgttagagttggtctaagtgtatcttttgcttagaggaattgaaagtttgagattcaggtgtttttaatactaaatcaagtgggagttagatgacaattttcaaagcagatgtgagggtagcatcaaggagaagatggtcattagaatccccttaagattggagaatgaggtggatgtaagccttatgagtcagctttgattaaaaaataaagagcatcaagtagaattaaaaacatatcttagtttcatgatggtcttagttattgttaaaatatataaaaaaacaaactagggtgtgacatcaattccaacaccttagtacaaatgaatttgaaaggtgcaatcatctccctttcatacctcatgtcatgatttgtacaactttgtccaactcattttaatattactccttattttgcaagtggttagaaattattgattattccaaatggtccaaaacatcacatcattttctccacaagaaaattcaagcaattatgtacatttttatgtgaaattctctacatttggacattgataatagatgatagccaactccaactagttgggaccagacttatattagttattatgtcaacaaagaatttcacaccagttaaatgaaacagattgtagatcactgcatcgatgttgattgcttaacaccgtttttatggactttaaatgtaaactaatgccttatcttttatattgttatttcaagatcaaaaatcagagatgagaatcactataatgttaacaaaagggttcagccattaatctgaatttcaatacttatttcttatactttctaactccatcatgtctactcaatacaaaaatccaccctcttcaaattagaaatattttcatcctctcattaagaaagagtaaggaacaaaaggccaatacaaagattacataattaactcatcattcacttccacttccagtagccatcaaaaactcaccttcacaaactacctcaccaccaacatatgcttttccttccatcttggctattccaaaccgcttctgtaacttggtaagtgtcattctcattaccaaagtgtctcctgcaatcacaggttttcgaaacctcactttatcaattcctgcaaagaagaaattctgacgagagcctcccacttctggttgcagcataactaagcctccaacctgtgccattgcctgaatccagaaatcgtatcatcaatggctaaacaaaaaaattaaactgacaatagaaaaaataaacaaataaacttgactcctcgcctaaccctataagatttgaacaacaataaaattataacaatccctataaatccaggaaggagttaaaacctcagaccttcagtaagcaagccacatgcttgaacatttgaattttgagcaactctacttgagaatttaatttttttaattcatttcttgtttttaatttgagaatacagaagatcatacctaatatttccattaaaaacaaaatactaaatcttactaatggtatttaatatatgaagcatgacacaaaaattcaggagacccttaaacattgaaatcacttcgactaacatccaatgtttataaattggtaatgataaacatatccaaaatgaaaagaagtgtatgaggttagattttggaaaggaacataggtaaaaaaaaaaattagttatctcttctccatttaactagttgtgtaaattgtagtcatagaaatagcctaatggtactacttctctccttcaaagaacaaatcttaagtttgaatccccctcaatagtctttttccgtaaatcataaaagattccccaaaacttgtttcaaaaatatggaagtaaacacatgaacataggtgatttcagctaaaaaccacagactcttctaccttcggcagtagatgaaggatggtgatgtagagattggtgtaatacgtaattgtcccaaaacagcacgatgttaagtatagggcttctgcaattgccaagaaccatgaacaatgataccacacaccaaagcaaccttgcctattatggtccatggtagattacagaacaaagtcctaaatatgtaaagcatgaaaatgagtgaatctaagggatatccgcagaaagtccagaaccttttaatgatatgaaaagaacatataatctaaggtgcattagcaaagctccaaattgagctgattgcacaataatatgcctcattgacctaaagctccagtaaaatgacaataaatcaaaaattcttgctgcgttgttgtctttaaaatcttttcaaaaatttatgtgtgtggtatatagagaccaacctatatttgttaatacaaatttctaataaattagatggaaaatacatttttgcaaagagcctccatgaagttattctaattagggagataatgtcaacatctttaatgctactaactaactatcaaaagccccagccatgcatagaaaaagaaacattgcaagcatttgcttaattatattagaagttagtgcacgatggaattaaatttgaagcaaaatcttcaaaatagggtgttgttttcttcttttctccccttcccggaggtaagcaattattagggccttatcctcatgtgatcctgcttctggtaaggattcatctcccacttgccactaaaacctaccacttaagtttaaaatatacttgctccaactactgaagcaattttaccttaacccactatcactgaactcattcaagataacaacattgaatttaaagtccatgattcccgattttgtgatattttggttttttttttctaatatgaaacaaaagaatatttaacatctcaaaaagaaagtcctcataaagatcccatttccactgatttaagagccaaaataagcaaaacacaaaagcctcattctatctacgacgttgtaagcttttaaaaaggccacatataaatataataagtctactttgagaaaaaggaacttatcagatatgagatgattaaacagtagatgagtagtgatgtgaaccgtagtataggtaaatttgttaaatgccatggttaatacaattgcaaaataattatataaataaatataaaaccaatgacaaagttgtacctcaaccatcagaacaccaggcataataggtctctccgggaaatgcccaggaaagaaattatcattgatagtcacattcttaatagcaacaactgaaaccccaggattatgctcaatcactctatccactaacagaaacggaaacctatcatacaaaattaaacaattaaagaagaaaaaaacgcacattcaaatcaaaaacacattcgattagaatgttaccgatggggcaaaatgtcacgtatttgattaatatccataaccgtaggaaacgctggatatcctgcgcataaaaaaaaatgatatttaaaatcgttttgctctttgattgagaaatggaatcgaacatttaggaaaaaagagaaaaagacttactcttttcaatgggaatgccttcggccgtgctatcaggtccattcagagaacaagagatggcgattttggatttggaaaggtgaaaaggggatctggggagtgaaacagaaagtggagaatggaagagcgttgtgggtcggttgagtgagtgggaaggggtcagtgagagacgagaattggaggtggtcgccattgaaattggtctaaggtggctgagagagttagtgagtgagagaacaggtttttatttgttctttttattattattttgatgtaattgggggtggcagatggcagttggagttgaataaagactgtacttctccacctgccttttgcattctaactttggtttctcagtccttactttcttttctccgttcattttaatttaatattggaaaggaaaagaacagtattaaatcaaaatgaacaaaaatctgctgatattcaaaggagacaacgaaaggtctttcttttcttgagtaaatttgtattgatcaagcatgattctagctgatgttacaatatttgaaacaagccaactcttcttttaccaaacaaagtcattccgcgcacgccaaatagcccaactcaccatcgccacttcctccatttcaacttcgtgctccctgataaaaattctcgacaaccagctgctgaatgttacagccccagccccgacgttcactatgctgcgatgccaagcagcctttgcaaacgagcattccaccaacgcatgatgaatagtttcaatactagagttgcacaaagggcagtcagcattgacaggaacatgactttttggagttgaaaacacattggaagcacacccgaaacagctcgccataaaaaattactgatttaggaggaatttttaatgaccagaccacttccaaaaatcactattggcatctcggcaccaagcaccgttagattcttgcaagaatttatatgcatttttaaccgaataatgcccacaagtctcaagtcgccaactccaaccatcattagcagccgaatcactaagctgaatggacaaaataaggtccttatcacaggcaacaaacaggtccctcacaacatcctcatcccacgcgcaggtacctacttttaagaggcagctgaccgagttattcacaagagcagggtgtcgtgagacaacatagttgtttgaattatgtggaagccaaggatcattaagaatggagatagtgttgggttttatgccctaaataaaactccatttcaatgtaatccgtattat

SEQ ID NO: 239065 - DNA, 6507 bp, Cannabis indica
ataataaataaataaacatacaaaagaaaaatcctagcattttaaattcccctaccggacctcgctcccctctgactcggctgaaacaataattaagttttaaagataagaatttatgttgcaaagtcccaaaaatgaatctaaatttgatggtttaatatgtttttgaaacctgaaaaatagctgtatcattttggcttagacaagctttgtgaaaaaatatgagaacatgattaaaaacgctcttgactctagatatatgctcctgatcttagggttacatgcacactttgtgttagagataggagacgccaccattctgcgctacgtactgtcttcttatcgagcccaggtaaaacttatctgatctgaataaataaaataattatttacaacacatactgaaatttctaactttttttagtgttattctagggttatttttagttttctactgttgtttttatttgttctattttatgtttcattattattttataaaaatacactatttttaaaaactttcgtatgtctgtattttgtaaaattaatttaaattcttagatttttttttttaagtttccataataaaatttggtttgattcagtatatgttgatgttctattctatatatcagtaataaatgagcccagctcagtcttagaagaataaaatcagacctaagtaatttatatggatgatggatcaactccttgatcttgtgggctgttgccaaacatcttatcaaactagagtctatatatagcttgttaattaattggtgtgatatatagcagatcaccaacctgcatgttgttttatgtggggatcttatagtacattgtcttacacgatttgaacagactataactcattagagaaattttattcagttaattttacattctaactaattcgttttcttccgcaacaacaattatattatatatatattaaaacagtaaatatttatccaaacagttgccattaaaacaacttataatcactcaacatttaagcagccgcgcattgattagggtattaagtaattattagaatagaaagttgattaaaacgtttgtggacaaaaacaaaaatgatattaaaacgaacacgtgctcgtataataataacaaaaacttgcagtgaataagggctagctgcgaggggtggggggtactccagtccaaatccaatcacaatgtatatataatcgattttaccacataaaaacgacagcaatgaatatattgcatacataataagcagatacaaccaagcaaatatcagttacaatcaaatccaatcttgaaatacttgcacacacattgattagacacgtacgtatactttttcgaccctcccaactaataaaaaaaccccaaattagtacgggctccaaacaatttgggagaaaaaacgacatctagccatatacatagttacagctaaaaattattcaacatatcctgttacactagctagccagctataccattagcaaaccttatttttaatattatacgatcgcctacttctccgtggtacggtcaattaaaagactgaaaacgacaccttttattatgtcgttcgaaaccacgtacggacagatccatcactactactactccttattattagtaataataattatttccaaatcaagattattatattttaatttcgagcacgaacaagtggcgaatgaggcattggagaatgaggagacatcatatgatgaggagacataaaaccacttgcggcatcatcatgatatctctttgacttattaaagctaagactcaggttagaattacgccaagcgctcattttcgttgttgtggtagttgttgttgtggttgttgtagtcgtggttgtggtggttgttgtcatgattgactgatcatcttcaagatcctcaactacctcctttttaccgacgaaagagtgaatcctttgaagagcaatgtctacggttgcgtcttccatgtttgcaaagcaaaccctgaaccatcctggttcggggcaatggaaggaagatccaggggagacgttgagcttgatgtcgtagacgatccagcgccatagcgccatctcggcttcgaaagatggctcgttgagaagatgtctcaagtccatccagaagaagagtccagcatttccctttagacatgatatgcctactttctttaacccttcggtgaagtgagcgtgcctcttggccagcctcttcgagctttcggccaggaatttcgacacgaaatcttcgtccgacaacatcgcagccagcatgtgctgagtctgcgacgacaccaatccgaaactggacatctttcttgcacagcttacgacagcgtcgttgtaggagtaaacaatccctactcggaaccccggaagacccatgtccttagagagtgagtaaacgacatgaattaggtctttgttaactttgtcgtttcccatctcttgaatgacctccgaaacgctgacgtattcgggtgagctgaaaactgtggctgcatagatctcgtcgcagactaagtgaatgttgttgtcgtttacgaatgtgaccaggcttttgagtgtagctctgtcgattgtcgttccaagtgggtttgatgggttggttatgagtagtcctttcacattaacgccgtcgttttgggctttctcgtatgctgcttcgagggcttgtttggttattttgaaattgttggagctgtcgcaagggactggaattattttcactccggttcgccatcccaaatcacggacaaaactgtaattttgattgcaaatatgatcacgaccttattagtacgtggaaattataaaattatatttatatggaaaataattaacatgtatatctaattaagaatatatagaaatttattaattaatatgcttattagcgaaggaagtttcattttgtcgtcacaatcattacgtacgctgactatatttttatttgaagagtgataaattaaatctttattttatcaactagttaattatgatttcagtggtgacgttttaagaaagtaacgtgtctttaataaaagttggtggaccccgaaacagaatgaacaaagttaataaaaaatgagttttgggatttgtccaaacataataaatacatacaaatattctgtctaatggcaacttcacgaatggttttcaactttgactatttgttgggatttgctgaccaatttttaaggtgggttggtcatcgtaaataaccgaaagtcatacatatataataactcattagtactcctccaaaaaaaaattataatacattaatacacatattgaagtccatatatgtacatgttttaatatattttaatatttgatttagttttcttgactaatattcctacacgtgcatactttgtcaaactcagacagaagattgctaaaacttataactagtataatcagaatgtcagaaatttaggtttttaccaaattccaaaaacaaagatttttcctttaggtctaagcttcttttttttcttttattattattaattataaaaaaattccttcctttttagtagttaaatttaaatacgtatttagaagagcacacagataatatactaattaatatattataaagaaacagagtggtccgtacgctgggtaataaggcgaaggaacgagaaaagcgtcgcccgggtcggcaagacagaaaatgacgagttcattagctccggtggctcctccgcccatcactattctgtccgggtcgaatgtaacccgacaacctctcacctttgacatgaacttagcaattgcctgaattcataataatatatagagagagagtcatgatgaatatatataaaatgccatgatttatcgtcacaaaaaataataaaacagttcaacattcattatcaatctttataatatatatatatatagatatatacctttctgaactctgagaaaccatgataatcttgaaagatagctacgtgcttgaaatcgtgaaccccttcagctgtgcatatagaggcttttggattgttcctaatccacgcttgaatcaagtcgaagcaaagctgagagagagatcatttacattttccacgttacaaattaaataaaattagttgcaggaataagagttagttaatatatatatatatatacataaataaatacctgattttctgcgagacccatttggataacacctccgggatttttggcaggatggaaagggtctttgtcgtaagccttccaaccatcgaaatatggtgtattctcaccatgtccatcgttggtcgcaatttttgacagacttacttgacgcttctcacttcctaaactcatcattatttttttactgtttgtgtgggtggtacgtagctattgaattatatgaaagtatatgtagcgttgttttaatttggggtggattgagtatgagaatatatgtttatataaaaaaggaaagatatattattttagagtttggatggatgaatgaagtgtttggagagagtacggtatttatagaacatgcagatatgttatgtgagtaatgggatcagccttgtttaatgtgaatcaaagtaagaaaagtcattaaaattctgatattctaaagtcatttgtttgccacatagtataataagacgacgcgcctttcatcaagtccaatttttctttttcttatattttttttttccttatttaaaaaataacatattaactataaatgagtagtatatatattttgatttgttaggtcagtgttgacgcgtgatagatatatgtaacactaacatgatagataatgatactctaaaaaagctaaataataggataactaagagatatatatatataatttcttagtcgtgtattcaaaaatacaaatatatatatatacgtgttttattatatgtggccatcatgtactctcttcttcatggccgtagaagatttagtatatggaatagtgttcttgatcttgagtaattcactgttaataataattatgtcactaaatttaattaattaaatgaaactaatagttgtaaattagttttaattaattacatgtcacgttatctttatgaagaggttaattaattatattatatttgataggtcaaaataggatagttgttatcttgagatataacaatgtttttttttaaggcaaaaacactcaaatagttatatattatacttggtaaaatttatatataacaaattaatctaattgttattgaaaaaaaaaaacagttaataagaatctccaataaaattgtccagatctttgacacatgtatattttgatcaacatttcaaattaattttatgaacataattatttaaaatagacaatgactgtggcattatttaatttttttcaaaaaaattactttattaccgattaaatttttgaaagaatataaaaaattataaaatttaatcaaaaagtggtatgtgagaccatagtagataatttctcgagttccttactgttagagtaattttttaaaaaaattgtgttaaaattttatacggatgtgaaagagaaaataaaagttaatattttagaataatatatgtaatttaacaaaatatgggtgttgtctgcaattgaagataataaaccggaactaactcttatttttcatgatttgattgataaaaaaaaaaagtataatcaaaaatataaaaaatatataaatacactccattataaaatatatatatatatcccacgttatttttaaactattaattactttttataaatacaccccatcctattactaaaatggggtcttagtttaaatatatactacaccccaacatttttgaattatgatcatatatatgttagaaattggtgttttgattaatgtattaaaattaatctaagtgtgacaatttaactaactattattcttagacaccattaatcatatagacaatttttttccttaaaatatttaaattaattgatgtgtgacaattagattgatttaatatgctatgagataccatttattcaacatttttaaacatctataaaaatgctcatatatttcatttcatcaacatcaacattttaattgcatattataaactctcattcatagtaaatttaaaatgtgtattttttcgcaagactttgtaatgatttagaaatgaagaaaactgccttgggttgggttccaaccaataattaaggtttttctgattaattatttttttgtcgagataaaaataatgaaaaggtacttttaatgtcaataaattcttgtaaatatttacttcaaattttttagtcatttaacaaaagagaaagtaataataaaagaggaagaagttcctaaacaaaaaataaaaaatggaagaagaaaaagaaaaagaagacaaaggaatttcttaagtcaagatactagtttgttgttcaatatataaatagtttgttgatctcatatacagataatcttctataatat

SEQ ID NO: 239066 - DNA, 2707 bp, Cannabis indica
actgctccttggaatacacggaaattgttggggcagatggtgtgcgtgctaaggcttatggtgtgtggttgaaagtggacaacgagttaagggatgggtttcatgaaggcctaaaagaacccaggaaggaagtgcagaggattatgaaggaacaaccgcatataagtctaccaaaccaaggattgcaggtttcgaattcctttactcctctggttgatgaaatggagatagggaagtcagctttatatggaaaactcttgctaaacaatacagtgaaggatagtggtgataatagcaagataaatgggactaatggggcaccaaaaccgactgaagggactggacagataggagatcaggagagtgatgaagcacaacaataaaggaaaagaagaatggtaagaaacacaagcaggtaatgggggtaatggggaaaactccaaaaaaatagatactccagctaatgattctcttgggcagccaccaaaggaacatcgaagaaaggtggctatgaaaaaggacggaaagaataggaagagcaaaagtggtactatatcggttgaagtttctcaggcaagagattcaacaactggacagaatgaggaagaggcgcactctgctgggcagggtcgcctacaaccatgaaactcttactttggaacgttcaaggtttggggaacccttggacggtccgtactttaaaatccctcgtgaatcggtggcctccgaatttggtgtttatttcggaatctaggttgaagaaagggaaagctaaggctttgagggtgtctttgggttttgttggttgttttgttgtggaagcccatggaaagagtgggaggctgattttactttggtccaacacggtggattgcaacatcatgtctttctcctctttccatattgattctttcattcggaaagaggaagggcaatggtggcgcttcacgggattttatggtgattcggatccaacacaaagaagtgaatcttggaaactcctcgcaagaataggaaggatgtattcggggccttgggtgattgggggagacttcaatgagattttaaggaacaaggaaaagttgggtggtcaaccaaagccgggatatttgattaataactttagaaaggctctaaatggtagtaatcttagagaagttgagtacgagggctgcgggtatacttggtgtaatggtaggaaaaacgagctgatatttgaaagattagaccgtgtttgtggcaatccgaagtggtttgatttattcccggaagctaaagtcactcacctagatcgggtaagttcagaccattgtcctatcctccttcaatgtttgattagaaaccatgagaatgggaatggggcaagatggcactctcggttccactttgagaatgcttgggcagatgaggaaaaatgttcggagatagtgacggagaattgggacaaggggggcagttgcaacacagctatggaattgcggaataaattggcaaactgtggtacggctcttcaaaagtggaacaagagcagaaaagccgaaatgaagactaggctaaaggagtatgaagataagataaccatcctctctagaagcacaaacacaaataattggtagcacctaaaagatcttgagcggaaaaataatgttctcctagacaaagaagagaagttttggaggcaacgtagtcgtgcgctttggctaaaaaagggagatcgaaataccaaatactttcataggaaggccaacacccgaaagaggaaaaataccattttggacatactagacaacaatgacaagtgggttcatggtaacaaaatggtgggtcaagtggcatgtcactacttccagcaactttttacagcacattcagtaagtatggctgatttggaggagttcaaacgcatagttccgaataagatttcccgagaaaccaatgagtacctcaaagcgccctttacgaaggaagatgtctatgatgcaatgcgaaacatacaccctcaaaaggctcctggaagtgatggtatgccggggctcttttataggctttattggccgaaaattggtgaggaagtcaccaaagtgtgtttggggattcttaacgagggaaggccgcttaatgagcttaatgataccctgctatgccttattccaaagattgagaagcctacccgaatggctaactttcgacctattagcctatgcaacgtgatttacaaaaatagtggccaaatgtcttgcggggaggatgaaacatagtctagctcaagctatttcggaagaacaaagtgcttttgtgggggtagattgatccaagacaatgccatcataggctttgaaagcctccattgcatgaagaaaagaagattcgggaatggtcggaaaatggctctaaaattggatatgtcaaaggcgtacgatcgggtagagtggggtttccttgtcacaatgatgagagggctcggttatgatgaggaatggatagagaagatcatgaggtgtgtgactagcgtgtccttctcggtgctaattaatggagaaaggatagggaattttactccttctcgaggtcttcggcaagatgattctttatctccctacctctttctcatttgttctgaaggtctctcttgtctcatccaagaggccgagagagctggtagtattcatgggattcggtttggtaaaggcggggtgaaagtgtctca

SEQ ID NO: 239067 - DNA, 2826 bp, Cannabis indica
cactacacttctcttcactctagtcaaagtataaacccatattattatgcctaatctctttccccttttctcttgttttccacacactattttcccgagaaacaaacaccttcaccatataaattccatactatgctgaccaacaatatcgatcaaacagccagcacaagcactaataataaccacaatcgaagcgatgatcatgatgatcaagaagaagagtttcgagatatccacgcgctgactccacctcacgcgccgttacctctaccgccgggaattcgcgccgccggtcgccggagagatcagaccgccgcctgggagacgagcagtcaccgatcgtcgtcgacttcgttgggaagcgaaatcggagctttgagcgagaatttcacgagtatgagccgagaattcagcgcgctggtgttagccggctccaccatcgacgggagccaaaacgacatcgatttggggcaaacgacaggaaacaatacgaataacaacaacaatttggggaggattggagaagatgaggaggtggaaaccaatcccttggcgatcgtaccagataattataataacaataatccggtttcgtctccgaatcgacggcgggatttggcggcgccgccaagctcgggcgaaattagcggcggagacgatcgggttgttacgtcggttgaggtagtgaagaaggaggaagttgagtcgaaaatttcggcttggcaaaacgctaaagtggctaagattaacaatcggtttaagagggaagatgctgttattaatgggtgggagaatgaacaagttcaaatggctacttcttggatgaaaaaagttgaggtattttatatatttcttacttttaattaatttcagaaaaaacttactaattaatcttgttttatttgccataattggttgttaatttgagtctaatgtgttatgattatctcctatgcttaattaattatgggattatagcaattcgtatagaaactatgaaggtatatagaaactatgaagaaattattaaatagtaaatgagataatcctttacttattaattatgttaattgtaagattatatatatatgtacgtgtggtactgatcttctgtctttgtaatgattgtgataatgatattcacatcgaatttagggaaatagtatatgaaaagttgggttgtttgtgtgtataaatatatatatatacaccatatttactattttgacactgtactaaaatgaaatgagttcataaataacttgtaattcgcctcaaaaagctcataagtcaacaacaaaatattgtagctataaaagagttgggatagtgatgatatatatttttgttacggttgcattttgaaatttgtacgtgcaaaagtgaataatgttggtttaaatttactatatgtgatttttcattattacgtttgttgattggtaacatgtttatatttagttaggtgtgaactagttattaagcactaaatattacttgatgaaagctcttctaatcttattttaatgatttatatcctctttattggtcaactatcattgatatattgctccactcaacaaacaattgacactaattatatattaatgtttttagttttagtaatgaatgcatgatcatcatcaaccaaacaaaatcaataattgatattttttcccttaattactttttcttttgggtgtgtagaggaaactagaggagaaaagagtaagagccctagaaaagatgcaaaatgatgtagcgaaagcacgtagaaaagcagaagaaagaagggcttcggccgaggccaaaagaggtaccaaagtggctagggttcttgaaatatcaaacttgatgagagccgttggaagagcaccagtcaaacgctccttcttttagtactattaattaattatcgctacattttcataccaattagaaccccaaaaatatatatgaaaaatataatattttgggggcaaataattttagctagtactagtgccccataaagggcactttcccttttaaaaaaagtgccttgtgatggatcagattatagaaagaaatttaagtgtgagtactttgtgttgtgtagtgaaattattgatgagtgagtgttgttgaattgagtaattaatgatatcctttgttagtgtttgaaatttggaattgtacgtgtgctggaaattttgaaggaatatatattataattaggttaatggttttagttttagtaatgactgcatgatcatcaatccaattaaagcaataatatttagctacttttgtcttgtatagttgttattaattagaattaggagtggtggcttaattgtgcatgtacgagtaattttaaattaaagttagcgattttgatctataatatttattaaattaaaataaatgagatctgatattaaattataaaaatagtaaaattatattttataagagtgcttaagcactgaaagtgtcctttaatatttctcaatctaaattaaattaatacaaattaattctcaaattaaataaatagaagggaaaccgtcttcgcgttcatatatttgcaaaataaataaataaataagtaaataataatcattcatcaatgtatatacaatcaactaaagaaatactaactataataattaaagttgccatatgaaacaaataagaaaatttgattcaccaaaagactacataaaattcagccatcattattaatattttttgtttttttcgtttgtgcaaaacattccatcctgtttgttataatttttttgcaaaaaaaacattatatatatatatatatatatatattca

SEQ ID NO: 239068 - DNA, 5136 bp, Cannabis indica
aaaaaaaaacaaagagatttggtaggtgacactctctatttgaacaataggtatagaaaaagtatgattacaacttgaggaagacaaactcttcaatggctgatatctcaccaatttttttcagtacttctttacttggatcttcatccactccaatgatcatcacagcttgtcttcggggagcaatcctcccaactgtcataaaattcacgtttactttctcttgacccaaaatgcttccaacttttccaatcaatcccggttggtcaacttgcttgcaaagtatgatacacccttccaggctcacatcaacctcaaaagatcctaccttggtcaaatgaggtttcccatctttgagttttccctccactgtgatctcaccagagtcagaaatagaactggcgaaatttgattccacgttggcaatttgaagctggataaactctattggattctcaggtgaaccatttaaaattattctctcttctgctattatcaatcctctctgtttagcaatgaaattataattgataagatttacggaaacactagaaataggctcaatcagaccttttatcaccatagcacggagcacccttgtgtccagatcatttggatttctagctgagccataagttagctttaataatttcatgtcacttccaccagccactaattgaactgccagtctacctagcttttctgataaggcaacaaatggttctagttctgataaaacctgtgatcacagaaaaagtatacacactaagtctgactaatcaagccaacttattaaacttctaagaaagatctttacgactatacacatgtacaagtacaagtacataaacaaaacacaccatgcttaacatatcaattactacctcagcagagagcataggtgcattcacagcagtagaagaaagctctccatttagagctctaagaacagcttctgccacttcaagggccacaccttcctgaatatgaagatttcacaatgaaatttatgataaaatatgcattcatatttcatgttatatatagaggtgtgatgttacttatgagaatgcaaacacctgggcctcagtagtactagcaccaagatgaggagtcacaatcacattttcatgcagtactaacttactgtccttcggtggtggctcttccatgaatacatcaagtgcagcctgccaggagaagtaaaagaatatttaactagtgtattcaagtttttcattaactatttgattagtgtgaatgtggttcttataaacataagtaagaacctgagcaacaatctgagagtccaaggcgctaactagagctgcctcatcaatgacaccaccacgagcaacattgataattcgaattccctttttcatcttggagaaagagtcattgttaaacatcttagaggtagtaggggtgagaggcatgtgcagggatataaaatctgcagtcgaaatggcttcttcaaagctcactagcttcacaccaatggcacgggcacgatctaatggtgcatagggatcgtgtgccatgacattcattcccagcccttttgctctccgagctacttctgatccaacttttccaaatcccattatagcaagtttttttcctaataaggagactccaacatacttattcctctgccactttcctgtacaatgtatattatcaaaaattagcacttaaaacccctacaatgggaatcttcatttcagattagaatttcagaacatcaatgtaattagctcaagttagtataacgcaagttatttgtctatacaataattttcttagtcagaacactaaacataaactctttaacaaacatatgaaaaaaatacataatgaatttatatcaaactcttcaatatttaaactcttacaatttatacaatacaattatgtcaaaaagattaataaaaccattaagctatttttaatagttaaggatacaaccactaagaaaaaaattaatataaatgttaaagtactctcacaaaattgagaagtaatatgtttagataaattaaatatttttaatatataattaatttagtaaatatatctatattttactacaaaaaaaataattttatataaagccatctccattaagaaatgtataaattgtgcaatatatttgtgaaaaaaaattctatgataaatttgtatcaatttttgctaatgtgttccaatacacaattagaaaactttatgtaaaatttaatactaattaattataaaatacataaaagataactttaccattaatttttttattatttaattagataaaacaataaaaataaataaattttttataagttaatggtataagtaaatataataattaaataattagaatgacataaaatataataaaaaagagtagtatattaatgatacaaaaaaattataatattaactttgtggaagaacgtttggataggtttgtgtgtaactcttcttggcttaatttgtaccccaatactcatgtctctcacttgtctctgtaaggtttggatcatcgacccattgtgctttcttgtattttcaatgtatggggcaacaatgaccatgtatcacggtcccatttccacttttaaaatgcttgggctaatgaagaagattgtgtggatatcataggtaaatattggagatgtaaatattcaaattctatttgtaatgttcaacttgatgtccttgatgtgggaggtaaaccgaatgattggaacaaaaaaattcataagcatcaccgcattgccattaatcaaaacctcaaagaatttgagattgtagatgctaatcttgatagtgttagttgtgagaagttacgtaagattgaaaaatagcttgatgttcttcaggagaaagaagaaaaatattgggcttctcgagctaaaaatgattggcttaatttaggggacaaaaatactgcctattttcacaagtgtgctttgggtgggcgggctaagaacaagatcttgaagtttcagaatagcctgggtattaaggttacacgccaaggtaaaattggaactatctttaaagagtacttctccaatttgtttacctcaaacagaccccctgatgatgcttttgctaaaattattagctcggttcctagaaagatttttgaggacatgaatgctcatttgattcaggatttttgtggggaagatattttagagaagctttgtttcaattggacccctctaaaagtccaagagaggatggtttcacaatggggttttatcataaatattggagtattattgggcaagacatcatttcggcagctttagctttccttaatggggtctctagcttgaaaggtatcaacaaaactattatttgtttgattcctaaaattgacaacccaagtaatgctgttgacttttgacctattagtctttgtaatgtcttttacaagattttcactaagattatgactaattgcttgcgtaaggtgttgggtcacatcatttcagatgagcaaagtgcctttctcctgagtcatcttataaccgacaatgcacttattggttttgaatgtatcaatgctttgaagaaaaatagggaggtgatagtttctgtgctattaagcttgatatgtccaaagcttatgatcgtgttgagtggtgtttttggagcaaattatgacggagcttgggtttcatggagtgtggatttgaaatattcttgactgaatttcttctgtggagtactctattttgttgaatggtgaggtccttggctctatcactcctcaacgtagacttagacaaagtgatccaatgtccccttatcttttcttttactttatggtaagaagagactctgagaataaatttttgtaggttttccttgtagtagtggtggccctgctatatctcctttgttgttcgctgatgatagtttgttcctttttaaggatactgatgtgtgttgtgtgaggttttgacaattgttcagttagtatggcgcagcctctagtcaggtagtaaattttgataagtttgcagtgttgtttagtctcgatgtgctaagttctgagaaagaaaaattggtggatttattgggtgtgaaggggtgaattccatgagacttatcttggcctccctttttttgtgtggcatagcaaggcatgtttgttagatgccattagggacaggatttggaaaaggtttaatgggtggaaatccaagttgttttctatggcgggtcgtgaggtcctcatcaaagcaattatttaaacgatccctacttacactatgaatctctgtaaactttcgaaagtctttatcaaaaatattcatcatatgtgtcctcgcttttgtggggtgtaaatgatgtaaaaaaaagatatattggtgcacttgggacaaactttgcttacataaggaagatggtggtatggggatcaggggctttgcttatttaatcaggctctcttggctaaacaagcttctcgtatttataatgttcccgactctttggctggctgtgtgttaaagggcttgtacttttgaaagcggtcttttgctgagattaagaaatcaaagagagggtcttttgtgtggaaaaatatcttatgggggaatgaaatttttgactccagggtaggttggcgtgtggggaatgggaaaaacattgctattttttttgacaattggattccatcagttttgtctttcgttttgtcgtctcttgtttggattgctggatctagcaaagttttggtattaagagatgcttcgggtggttggaataatgcattaatttgatcctttttttcttttttttgcctcatgaagtgaaagctatcctttcaggtggtgtttcatttactggcaggcccagccctaggcataggcgggctaggcccgtacctaggacccactctttctaggggcccatttaaaatattaagaccttattattttattactatatttaactaaaattaacagccaatataattaaattaggctcagcgtagtggctgtcgaatgataaggttaatgttggttgagatttgagttcaatcccaccaaacttcacattttaactacaaacaaacgtatacatttaataactaaattcaaaaaaaaaaaaatt

SEQ ID NO: 239069 - DNA, 5021 bp, Cannabis indica
tttttttttttttcttttcatatactacgtaatatattataatgatacaacaacacacatactaatactattacataaaaaagtacttactgccattacaaattaaaggtgacacaagcttcatattttacatgcatttgaaaactaatagtcaacagtatactccattttgttgaagttgttatagagttgtaaaaatgttgtttgcttctcttactatttaaaattgttgattttatgttatttttaaattaaatatcaattgctaaaattcgaatattccttacaaaagtataaataacataattattacaataaatcaatacttggaaattgaaaatataatattaattcattttcaatttgctaaaaatataaacaaattgaaaaacaaaccataattttcaatatctcacacaaaatttataagtagatgtagtaactaaataaaagtttatgaaaaagtaaaaattcacttaaatattgctttttagcacatacaaccaaaactaaatacactattcaatcgttaaaatgagcgaagtggcttcaacgtgagactttgaagcatcttttagttcactttaatcatatgttaattttcttcaatataccaaaggaataaaactggacaacaatcattcaataaatcaagtttttacatttacctgcaacagaaaaaacaaaaccacaaccatcaaaaattatcaaatattaaagtgttaaatacacgaatgtacaatatttaaatagcaaaataagaacattatcagaactacatttataggaacatcaaatttagcaatgaaatctgtacacaactcaaaaaactacaattataccaactgcattacaacattttaaaaagttgacagataaattcgaaaatcccataaattaacattagaaaaatataaatcactagaaattagatcatgaaaggtattgaaacgacaaaatataaaagtatcgatctaaaattgttgaaaaggttttgttaaaataactgaaactaaataattagcaaacacaaaaataataaactaaataaatactggtgaacaacaacaacatcaataattataccccttaacataatatctgaaaacaagaattaatcattctgtccaaacatgactcttgagtttaagaaaaaaaaaccttaaaacaaattctgaaacaaaaacagcataaaaacaataccatacaaataattcatatagaaaaagaaatcttcatcatcatcttaatcattttttgttttctttcagatttatggtgtttaacattcctcgtgtcaatagactcagtcaatagggttttcacttttggagatttagggatgaagggattttctcgaggctagtgaagactcaactctctaaggtattttatcaaacacatggtagatgtatttcttaaacatacttatatatataataaactacaatttcaaattcacaacaaaaattaaatatactgagcagagattgaaatcattcttaatctatacaaaaatgttaaaatagcagccaacaccaaatatttgttaccgttacagccaaaactaaatatttgttaccaaaaattaagaagaggaaaaagaacttacaaatagaacttaaagagatgaagataagcagcaggtggttggagacgggctatgcgtgacggcgggcggttggagatgtttttggtgtggcggcggtcggtggctgaagtttagatgtacttgatggcagcgagcttgaagaagagctgaagaaaagcttgtgtgaatcgtttgaatggcataaagaaaaaaaagagtaaaaatctaaacacttttttgtacagtataaatgaaaatcagaataaataaaaatgtttagaaaaatgcaaaaataaagtaaaaattaaaaccatcaaagagatgtgtaatgtaatttcttaaaatagattcactcagggcctgttggagtgtacttatcgtgggccttggcccataattgatcatcatcatcgtcggcggcgcctgtcatccgaattccgaactattgttaaactgtattcatctctctatctttctcactttctttttttccttgccctctttttcctcggcagtagtcatctcaagcttttcatcctctgttttccagtattcgttgaaaccaattttcattgcctaaagggctctcttttcacaaccaggtactgatttatcgttttcttacggtttttttttttcggttcttttttttctacactttcaattaatttgctttttcagttaacaaatcacaacattgcacattctctatcgaaggctgaattgttttgatcatttgttggagccccgatccgacggggtggcggtggcccgaaacaatcgggtctatatccgattgtaaattaaaaagacataataataaaaataagcggaatcgactaacctggtaatccctaaatcgaatctctctctctcagaaaggaaaaaaaaaaaaaaatcaaactaagttcgaacccctaatcgtctccggctccagcggtggtctgtgagctccttccttcaacctacggtggtctctgagttccttccttcaaaatctccggtgaccctccagcaggagtcgggactagcctccggtagtcaacccggataaagggtatgtttctatcttatttcgattccttgaaagatgagaatttaatgcgtaaaagatgaggatttttagattatgtttcattacataattatgaaattatatttccataatttattttgctcttatatgaggctttgctttgaaattatacatatttttgcaatttttctatatgttctatgttggattgatgattttagaaattgtgtataattttcagtatactattttttttgtcatgacaataggtaaaagttttatttttgttgcattattctaggtcaaagtttcgtgttattttaatttgatgcgataggctttttgtttgagatggttccacagtaacacagtaactaagtttgagtttgcgttgataatggaaggttgataactgttgtgttttagtgattcgtagatgattaggctaataaagtaggtaaaatgtagtccttttttttttagatgtagttatcagattttactactgtattactctttgctttcatttgaggttgtttttttccttcttttctattaatgaatctttatacataatgaataggcatgcatgaggccttccttgagttgtttcacaatttgtttcaataatttagttcagagcgtgactattcataagccatggtttgattgtttttgctgtgtctgcatatatttggttttttgtttggttagagttgaaatttgagaacaagaagggagcagaaataaagaaaatggcaaaatcttgcaagggcctagcaatggagttggtgaagtgccttggtgaatctgactgtgttaaggtcgaaaaccggtcgtttagagaatgtgctggagaaaagagtccttcaatacctagtgaatgtgttggtttgagggagacatacttcaattgcaaacgtggtcaggttgacatgagagcgcgaattcgaggaaataagggctactaagttgttagttgtgtttcttttcccagattgtgaattgaatttttgttgaagttttactctgctcctttttagagttatattccctaaaagacatgattatggattataatatgcaagatttagttaccattctggagtatggattgaatggaaattatacaacggttacttatgctgttgagttttttttattataacactgaattcagaagccaggcaatgctgtttctgagcttggtgcatgaacattttagatccccttgcaaggataacatccgattgtaacatatgatgtcttatagaatttgctgttgttactcttcaaatcatatgttaagaattagatcttttatgttcatttgactaacagtactgctattctagtttgcatctattctaattcctgtattgcatggagatataggtgatatcattataattctgtttaaactattctacgtttgtattaaattcttgaaagttttaattttgttaagattgatcggcatgactgattaattttgattccacataatattggtcactcagagatacaatcaaaaaccttgtgaacttgatttatagtacaatctctgcagcttaaactattttaccttaattttttataataaatccataattttttatattacagcttacatgagttgttttattttttttattttgcgttatttaaatttttatattttattcaattaaaatattttatctagaaaatagaaagtaaaagagagaaaaattgatatataaaataagaaattcatgttttaaagcatgaacagtatgtagattatttttgtatgaatgatctatgataaacgcacatgcgtttactaatttgaatgtatattgaaacaatttgaagaaaattatgttagaatttgatattcttccattaaattaaaccgagaaacaaaaacagataaattctgtttcactttcacagatagatatatttatgtatagagaagaaaaataaacatacaaatcagacaaaaagaatgttgttaatttcttttgtccaattatccgtttgcaaaggcctagtaattattatatataattaaaaaagaacaaaaaagaaaggagggttataataattactcttgtttctttagtagacaaaagaagcattccattctggagcacaaaggcaggcattgattgctacaatggaaaggagaggagctcccaacagccatgcaattgtttatacagttggtgaagcagggttccactgtcctgtaccggactgcttctcccacctccatccaacccactgcgatcatcaccattatcatcatcatcaccaccatcatttttctcgatgccatttatttatttgattcaatatatgtaatatataatataatagcctctctaaccaatcccttttggacac

SEQ ID NO: 239070 - DNA, 3631 bp, Cannabis indica
tggaaagttttttagaattgcactgtaattacactcaaatatcatgcgaccctaaaatttggagagtgtaattagaacccctcaattatttctaattatacaattacaatgtaaatatgtagtcacacaaacatatcaaactgtgtaattacctctaattacactcaaatccaattcctctatgactttccaaacacaccataaactcacaatacttgcaacacgaagcaaatgctctttttagaaagcataagctttagactctaaagttgttttggctaaagcatgagctatacaattaactttcctcgcaatgtgatacactcccttacaacttgtttcactaaagaaacgatgaatattagcaataaaagcatcactatctgaacacacattctgctgatgcaaaaccatattgacaacctttaaacaatcttattcaatgcaacaactattaaagttaagctccaccaccaaagaaaggcgtgttttaatggcttttagctctatatcaaagataaaaatcttattgggaagaaagagcttttaatagttgttggcctttaaaacttgctaagtgtaatttttagagtcattagtgttatatccaaaaattcaccaagtataaattccataatacgcttaaaaagtatattgacaaggaaacgaaagttgacctatgtaaagggacaagccaacacgaggaggagtcaatgcctaggttgagctccttgcgtgcggagctccccatgcttagatcatcgttgccccaattgccactccaccatccgcgcgcgtccaagggagttagagctcctctctctcatcattccccacacacacccaagggagttcctcactcccatcactccctgcatgcaccaaagggggttccttgctccactcactccgcatgcaccaaaggagctccccgctccactcactccctgcacgccaaaggacgctccctgctccacttgccactctctttctctatctatctattctcaagctcctttgttcctttgctccctcactctcccttatactccctatctaatgccacttgttcaacacaatagagcaatacttaagagtatatgttgcaagtgagtgaccaccaagaagggcttaggagggaattcttactaagcctcgacaacaaaggtatcaacacttaactaagtctcgtagtgtagttccacattatgagtcttagccatagtgggagagataccgaagggatacgcaataaagaaaaagtccatcatagcaagcacgtctctaaaaaaggatcaaatgtacgacgggtacaaaggtacaagtagtggagacacccccttttgtctcactcagggtacaaactgagtcccgaccaccatttcttcactacccctctgatgcgttgatcttcatagtacaaaaggaattttatcccccaatttttaagactacttgtatttcagagccattagaattcaactataaaagattcatttgaatacttgtaaaggggttggaaaaccattacttgtaagagagctcaaatattcacaacaatattttactccattgatgactgagtgttcttaatttttcttaagcttttcatcatcaactctttgcatttgattttctaactaaagtttagttaatgagttcttaccgtcaacaacaaaatgactttgcccatggaattgtgagccacacgtccacaccacaaccttgaacttcattttttacactcgtatccacattcaactttatacagtccaacactggcgctgccacttcacatttatgatgctaggcttataattacgagttctattgtccgtatagtactcttcaatgaatttatggcaccaatcaataattattaaaagattaagactagattttctatgtaaagaaccattcctcatgtaccaaattttctaagaaaaaaatggtatagaattcaaactcatctcttcttagttggtttttttatcattataaagaaattttataagattcctctttgttgttttttatgatcttccaccaaccaatcgcctcccaaaaattcttgctgcttgggcacctccatagagaatgaaaaacaccctcctctacgcctgaattacatatgaaacaagagcgattgaccttcattcccctgcaagacaaattacaattagttggtagctataagtggcaagccttccacacaatttacttcaggtgccactctcaactttcacacaaattctaccatgactcagttttcttcatattcgataccttggattttttgatgctcaaagccactttgtacccattcttaacattgtgctccccattccttgaataatacaacatgatctgatcttcaagttgatagtcactacacatgatactaaaaattagctcgacattattggaacttattttaccaggatcataatttactaacatgtatgtttaattaacacataagtaatctaacatcttaaaatataaaaaaaaaatgaaatgacatataacacatataaaatttaggattacttactattatcttaatttttgtccattgacgtggcatgtccacataagcaaaactaaggccacgtggaatataacgtgttaatagttgagaaaaatcaccatgcacaacacgtcaattgacaagggttctaaatactcaggcaagcccgaattacaagaaaagggccaattaggaggatctagccggaccataccctggccaaccaagggaaactatgcgtcgtccaggccctaagaaaagggtaggacagccatcacaaataaagagcatcaaggggagtctgattagatggtgaggtccacagccttctctctggacggtttgcagcttggtttcagctacgagacaactccaacaacccacaaagatagggattcaacctcaaattatctacctatctttcagggatattatttagttatttttgtaacttaaatatacgataaaagagttatttttcctattttgaatggatatttacttatttgaatattgatcttttgaaagccctaaaactatataaagggtcttaaacacttagaaaagggaccataagtcactctctctcccactcacgcaacttcccattcattggacacttagtctattttctcatatcacttgttcagaatctgtaacacatcaattctcactattgtagcattcaaagagagtcatagctagaaattacaaggtttaagcctacaatctgcatggtgttgactcaaactcttaagtctccttatttttatgattaacaaatatttgattattatttgtcactaatgatttgttgataatattttctaaggcaaaattaacttcaagggtaaaatggtaatttgaccgaaattctcgaaagtgactcaaagtggattacaagactcaaagaactcaagacaagacttcatgaaggtttatttacatttcctagtcttgtatagtgattttcaagtccaagcttaaaaaagctttaagtacgaattttaacccactaacttgtgtgacaagttatttcaccaaatgatatcttaaatttttaaattaacttttaaaatcacatatcatttaactaagaga

SEQ ID NO: 239071 - DNA, 4633 bp, Cannabis indica
acatttatgaaaaaagcccaatttataatgctgtgttaggcagttttgagttttccaaggtgctatacacaatttttcacgactttgttcttttggctgtagaattcacagaaggtataattctttcttcttccgaggcatatttattgaataccaacttcaatatgcgagagtcaaattatattgccaaacttattatctgctcgaaatatgagtataacaattcttgctttgctcgattactctcgatatttaggtgatgtttggttcattgtaatggtaatcgtaatggtaatgaataggtccattacattgtttgtttttaccttttaactttagtaatccattacaatgtaatgcttattacatactaaaaccaatgtaatcaccattacattacactccattacaaagaaaaaaaaaataatattttaataaaaatatagtaaaaaaaaagtcaaagtctatattaccctttttttttaaatattttataattttataataaaagcaataaggttattttagtcaatacacattttattccattacattctcgtaccaaatcaaacacattacaatgttcattccaactacaaaccaaacattgtaatcaattcctattaccattcttattccattacattactattactattaccattaccatcattacatcaaaccaaacaatcactataaaaaatgataacttaatatgtaatatttgaaaatcgctccactttgtaggtgccacctcatatattatgatattgtacattgtgcactttaaaatgctaataatattatcattcgtagatatatcacacattttttttttcagaacaaaaatatccacacattaaaagctctcttataaattcaaaccaaacaaacaaatccaatcatatgtttctatgacatctatcaaatcaaaaaaatataatcccatcaaaaccctacatggccagcagtcttccacttcgatgtcatcactctattcaagcccttcttcatgaactcctttttcgaattatattcacaaaatgttttgcacttctcaagccttgctttgttcattgaaatcttcttctgtatcttttctatcttttcattcatctcttcttgtaactttgctttcttttcatttattattgttgggatttcagagccaagtagcttacttacttggagatagaagaaatatcttgtgatcttcctcaaaactacattcaaaaaatccacttcaaagtgagcacagtctttcgaaaataatatatgtcgataccattgttgaagaagatctttagtgatatctatgagcaaagtagaatgcatcttcttcatgactttacaaatgaagaaaaaacatatgctctttaatgtgggtgaagaagttgaattaatctgactaatatccccatatttgtgaagtaaatatttcataacaaagacataatttaaaggtatcaaataaccttcaacatctaccaatttcaactctaaatcactagatgcaatgtcaatcttgttttccaaataattttgtggaactcgttgtaaataactgacatgaattttctttctgtgaagctagaaaatcgtagaatatcatcaatattttcatcttagtttcattggagtgtgaatatgttagcatatgtaaaatactttccttgtaacgatgatgcttgagttgtggcattaattcagttgtatctaacttaaatattaaatcctctaagttcaattgtggcatgccattcttttctcttcaagctcagcattatcacattgatctataggaatgaatttcgacatatcttcaccaaccatcttcaaattcacatctttgacatctcccttgaatatattgataatctacaatgacatttaacccaataatattctcaaataagtaaataataaatatggatttctgttcacaatttatattcaaaatattaaatatctaacaagataacatgaatgttcttgataatttattcaattattatttaaatttataaatttaatatgtttattatgatagcacaactatcatgaagtgattaaattataatatattaaatagatatatatcttaaatttagaaattatataatttaaggtatgattacaaatatacctaaactacaaaaaatagccacctttaattacaattttttaatcataacataaatttttatgtgactttttagtcacaacaaaaaattacttgtgactaaaatatagcatttagatacaaattatcactaatttagttttagtcacaacacatattgtgactaaaaataaatttagtcacaacaaattgtaatttttgtgactaatacatttagttacggaccttttagttacaatataagaatgataatttataattagtcacaatatttttacttttagccacaagtattattgtgactaaaagtaagatttttttgtaggtacttaattaattatatcaaaatttcaaatagaagacattttgatgtagagatatgcaacaattaaggtaacttattacttataataactaaagtgattaagcattatacctgaggagccagacaatgtacatgagcaatgtacacacaatcttcacagtaatacacacaaactcgtggttctctttcactttcacatatatcacaacagtattctccattctcattttccataactaagtctgtaagagtgagaggatgtctgtgatactcatatttgatactccttggtaacattccacacaggaaatgaagtttaaaatcacatttcatacaaaaaaatatggatgaagtggtatatttaaattccacagaatcttgaagcattgggttttgacaatatgaatcgtagctatgacacttgtcgattttagtgtgtattttctccacaaaataaagaggatggtgatgatatttgtacttgaatatgggtaggaacactgtagtggcacaatttatgcataggtgaaaatcacactcaccacatccatatgtgaataagaggttgtccttgtagcaaattttgcaagtaatgaataatttactagcaacaaaaagggataaagggtgatcttgatcatgacaagaatgaggttggatttgtagtggcaattgtgcacatgatttatgcaagaaatatttacaaggtttgcagccataacaagcttcaccttcacccgaacatgtcacgcgacatgcgaagcattcgatgtcttcagtctcatctggccatagaagtggcatgggatgttggtgtgtgacatgttgtatatgctctcgatcatcatcacatgttataggaggcatcctaaaacatttgatgtccatgtagaagttacattgatcacaagtgaaacatggattgaagaagtggatttggtgacaagagctgcaaataaagtaaaattcatccgtacttaatttaagtaggtgagaaggatggaaggggtgatttatttggtcatcacatgatgatatgaactcttcacatgttatgtgggagtaataatcatcacatgattcgcattcgatgaaaggaggttgggaaatttcatcactgcatatacaacatttgatatgatcatttgactcttcttgtaggatgagattatgggtgtgggagttccccataattatagttgtctttctttagtttgggcaagctaccattttcctgtgtaatttaatcaaaacatgtttaattacataagaaaatattcactaaattcatgaactaacgaactactaatatgggaaagaatatgaaatattaaatataaacttattagagacttcatatttcacaggtaaatcaaatcatgacttaccaaagttatatatgctgaagcaaacacctataacaatttagctatgggagagattgagatgcagtagtactgtttcaagggaaaaaattaagttgaagtgaaatgtgatatatctatatatgtatttgtgaagtttaaaataaaagaagactgaactgcatgccgaaaatatatacacattttaaataataaaaataataaataataaggtaaaattaacattattctattttcttctttttctttttcttttctttttgtctcagttaagtgttaaagtgtattgtttcttccttaactttaatttttgcttctttcttctttatcctttccttcgttgtagagtaaaggataaaccagtaaatttatgttaatcatcttaattatttattttttttttttgcaagaaaaatcttaattaactatagggaacgtaaatttggttattgctagaatgtgcaaataagatgaatgaggttctatctcaaaaccaattgccaatggggggagtagctcatttatcttatatatcttaatttatttccacacattaataacgtcggacaaactctaatagttattgtgtctaggtttgggcatctccctttattgttcaacaagttttatctttaaaaaatgatttagatgaataaaagtatatactatacagaccaaaagaaccatgcccgcaatatagatctagccccattctcttcctggtccttatttctgaattttgaattatttatagagataattatataagatattattttt

SEQ ID NO: 239072 - DNA, 1563 bp, Cannabis indica
tgttaattatttatgattaggaaattcacaaagctgcaacatctatgtatgttagtctttatgcatatcattgttcataagagactcttcatgtgaaaaaatgccataacgtaaactctatattaataatggttcattattaattaatgaaagttattcataatgtttggaacatacaacgaaatatatgtatggaaattgtgaccgattaaaaattacaattggactaagaacattgtacagttcaaggctgaagaccagctccatctttcttttatctcttttttaatttgttttcttttgaagttgatatttaattgagctgttccacgctcactaattttgcaaacccaaccttctttctcaaattttcagctatgccagttgcatcaacaattccttctccaattatttcaagttgatttttcctttcccctctaaaagccactgagacaacacctaaaaccacgtaaaagttgaagaaacagaaagagaaaaaaaagtaaccatatattcattataagaaatttgttatgaaagaattacaagcctaccatttttcagaagagctatctccaaggccttggaccggtgcttattgttcttcatgtccacttcaatcacaactttttgctgcaaaatacattggataaatatataattaataatgaatgagtttggacataatattatatgaaactaattgaatcctggatataatgtgtttcaccttcattttttgaaatggcttgatatattgcgaaaagtgtaatactgatgatgacaagtaacctgagtgtcattatatataaatatataaatatatattatgagttgtgaacaagtaataatacacgtgattaaggttcataacatatatagtctaaggaataagtttttgatccactttttctgggttcaacgtacgttgtactttcgtaattatttctcagagaaggtttctggttagtttcgacgacgctgagacttattacaagtcttggtccaccatatatatatttatcttattattaagtaccgatcgagtcaatgtttaatactataatgctgttttcctgaggttaaattattgccgctgtgtggtataatggtgaagaaatgtaataaaataagttaaattaatgtgtctcttgatattaacatataaacacttaaaatattgaagctaatcttctatgattgtattcatatgttatttttccatgaaatctatggaattaatgtgttgtccatttaattttatttctcatatatctatgacttttatgttagaactatatataattggggcctgccttttttctatcggatccattgtctggtttgattttttttcttttttatgggacactgtgtatgtcaccactcgatccctagacggatataatatccataatttaggttaggttgtcaaatgtagtattttaactcttattggaaaataataatacttacaaataatcttttaatttatattacaaaattatatagaataaatatttataataatggaataacttttcaatacaaataataataaaa

SEQ ID NO: 239073 - DNA, 3281 bp, Cannabis indica
tttttatttttatttttattcgttcgttcaattcttagaaaagatctattttcactttaactaagcaaaattagaagattgagatatcgattttccaaaaacccaaagattatcgaccaaacccttgaatttgataagtttactctttgccagtgatttagatcacacatcggagtttgttttgattgccatgcatgtacacgactaattattgatgttattcttttggtaatatgtgcaaagaaaatataagaactatgcttcttacaattttaagatgtaagggagaaccaaaaagaaaaaaaaaacagaaaatagaatataaagatctatagctatattttacattacattctaacattggtatcgtaattaaaaaccactcaaaagaaccacttatgaggacaagcgatgaaagagagtgccggaaataggaaacattaaaaactctcacgtcgctactcctctcatcgcctcattttgaatttcatgattcttacacttcaagatttatgactatttttggtaagtttaattattttctaaattatatcatttctaattttattcataaaagatttttatatatatataaatattgaaaataacattttcagtgtaacttctaattaaaggagaaaaaaaaaaaagaataaggtaatatttaagccatagttatgtatttgttttatatatgacttattgatgtatttataaggaactatagcatgatatgtaatatttatcataaataactaaatcaccgcattaaaaaacatctctaatttatttgcttagaattaagtaaagtaaagccatatccagacagatgtgatgttgaacaaagttatctcaatattaattaatacattaaatctcaataacactatttgccatctccagtaattgcatccttgagcttctggccagtctccttggccttgtcaacggcggattcagccgcgtctttgagactttccttagcactctcgacgttctcggccagtttctcacctccttcttttgccttttccttcgctgactcggctgctcccatgatgttctcctttgcagcctccgcattctctccagctctagctgatacttctttggccttgtcacccagtgaagccgctgctccctcagccttctttttagtctcatcagcataccctttcgcactgtctgaaagatcttgtgctgtctctttggtcttttttatgtcttcctctgctcttttagtgatatcgtccgtgttgaaaccggcgtcttgcttggccgaggcaaagacttttccagacctcgagccccttgactcttctgccgcatttcgaccctgaaaatttatatgaaaggtaggttaaagaaaagacatgtatacaaacacacacacacacacacatgtatatataaacaactattcagagttttaatttaccttggagtatctagatgaagaggtgtagcaaaccctagatacttttagagtagctagtgatggtttgaaggcaggagcttgtggtaaagctgtggagaggttgaggaagatgtttttggtgagaaacttggttgccattgttgttgatagggttttggatgaggaggagagattacagggtttctttttctttgttcggtttgtaataatcaattctttattttctgcctaggcttatacttatagcgagtttgatcgaagaaagatggcaaattaatttggttacacgtgtatagatgactacacgtgtcgagatctttattgatcgttttattggtggatggtgtagctagtcaacacatgtcagagcttttctatagtgttaatcagtttagccttcaattttttgcaatgactttacttggatatgaagataatattcataaacaaatataactgggagattcatgtaaattaagttaaattaattaataaattgataaccccatggcgtttgtagaatattctaaatgctacttacactattttgatatataaatattaccttgcactcttatacaaatttaaatttttatgtggacccaaattaatacactaaatttaagggtatcaatatctactaattgattaattttccttaaaatctaatattactccttacatttgaacagacctttgtctttctttctcccttttctctctctggttctcagactacgaatacccaatcgactcactcgacccaccacctacgtctcttttgctccaacccagcttctccgaccagtgggttttcaatgtcgccaaggtaatatttcgttcctttcgtgtgttttataatgtattcaatatttttattaatgatttatggttaaaaatatattacattattgattgatttattgatatttaggattaacctttatgatatgtgagttttgggctaaatttaagattggattggttgttttcagagttttgggcaaaaatatgattttaagccaggccctatgcattctactgttaaaaagtgatataagttgaagacgtaggtccgatatatagggcctgatttagtgtcagatggtctttttgatattcatatttttatgttagtcccgataggaccgatgtatggtccaatatagtgtctgatgatccatccaattttcatgtttttgtggtagggtttagggtttagggtccaatgtagtgtctgatatgatgtctgattttgttttgtgctaggcttgatgagaccgatgtagtgtccgatgtagtctaatttttttttaatgttaattaggcctaaaaggactaatttggggaccgttgtttggtctgatagaggtccgttgtcgagcacatttcacaacaccaaaaatgaataataataataataataataataataataataataataataataataatatgatgaacaagtgcgagtattcaatctagaacggcgagtactcgaactgggaacgtaagtgcttaatgaaaactggaaatatcaagaaaacaagggaatatagtggttcagtcagatcacggtctgcttagtccactgttgcaaggatttcgtaggtgtccaattcatggtggatcacctcttcatatacaaaccaagggtccgattatttacaaagattgcattcattgtcgatctgtttatacattgatttacaataattaagctaaaacgtaaacattaataaatgaagaacggtttctattcactaaatacagaaccgtatgcgacttctaatctgcgagttggcagttcatattcaggtgtaagctcgcgggcttagga

SEQ ID NO: 239074 - DNA, 2464 bp, Cannabis indica
gaagtttctagagttgttttggacttctttgctaatggttacatgccaaaggaattgaatgacactgtaatttctttaattcctaaagtgtctgatccaaacaccgccaaagattatagacctatagtgtgttgctacaccatcagcattttatggaagctctacttaatcatcgttatttcccatctcggtttatcaattggataatgacatgtctgaatggaagcaactaccatcttctaatgaatggcagaattcaaggcaactttagggttaaaaaaggtctcctacaaggagatccaatgtcgcctcttctgtttgttctgataatggagtaactctctagacttcttagcttctactcggacagagggctttgggtatcatcctttatgcaaacaccttagtttgactaacccttgttttgtagatgaccttgtcctgtctagtaaaggcaacttgaattcggtcaaaattattcaagaagccttcactaaattctgtaatgctacaagtttatctgctaacaaagctaagtcatagatcttttttggtggggttaaagatgatataaaattgaagattcttgatttggttcaaattgaagagggctcctttcccctaatgtatttaggggttaaccttcgtactacaaaatggaaggcctcagattgtggtgtgattctagataaaattaataagaatcttaactgcgcggctagcaaggatctgttgttttctgggagagctcaattaattcacttggtcttgcttggaattcaaaattactggatgagtattttcataattcctcacaagatagttgctgccatagacaagaattgtcgaaatttcctttggggcaagaaggagaataggagcaagtttcatctagcttcctaggagaaagtatgtcttcccaaaaagttaggtggagttggttttcgagaaggcaagaaatgaaataaggccttgatggctaagtttcttcgggctatctctagtaaacaagacaatctgtgggtgaaatggattaactcggtttatctaaaaggtcaatctatttggaattacccctcaaagccagatacaagttggtacttcaagaaactgttgaagcttagggtgtcaacaaatgaaacaaatctgaaccttgctgtcaacaaatgaaacaaatttagtgaaacaaaattttataacctccaggtgatggagaacaaagttgacagtgcaggcttggtttgggttaaacttgtgataccaaaacacaagtttatctattggcaaattacaaattcccagctgcttacccgagacaaactaagtagattcttgccagttcataatactaactgtcatgtttgtgatcaaatggaggaaactcaaaatcatgttttgtctgaatgttctttctccaaacaggtgcctgatagaatcaaagattggcttggtcaaatctattggccaacttcgctctctgatcttacctcagcatggtctccaaaatcgggtgatcaatgctgtgattgcagcaactttgtatcagatttgaaaaaatagaagtgattgtctctatgatctgactagcgctactccaagcagtttaagcaacgaagtgagaaaaatatgaagttgacagtgttgagtaaaggtccctttaaagattgtaaaaagaacaattatttactcgatgtaattttgagttggtagcttgcttcagctgctgctctttggtgcagctcagctgcttgtttgttgttgtgggtttacctcagctgtcctttgtattggctttattttttgaataaaacattttcctcttgttcaaaaaatattatttaataaatataaatatcttatatatggtcagctttcaattcaccaattaagtcatttcttgatttaattttatgaatcaattgtcgaaataataattaatgtgaaaaaaatactgatatagtatctcacctataaatatagggtaccgatctccgagttcttcactcattctatgaaaacaataaattctatcaaaagagagtggagagggcttggaagcccgattacccacacgaactaatatttttttaagtattttatcttaaaaagtaaaaattatttttagaatgtgaaaatgaaagaataaaataaataaaagattaacataagctaaaaaaatattaagtcaaaataataaaataaataaggtgtcttaataaaatattaggaagctaatattaaataatactctctaaatatataaaaaattacatgaaaaatacaaaatgatattatatttacaaaataactccataaggtgtggacaacatttttacctcaaaaaggttttaattaccaaaatacctcttacactatcactaacacactctatcactcacacacgctatatgcacgtcatctcacttacacatcttttttcttttttttttcttttttctttatt

SEQ ID NO: 239075 - DNA, 3900 bp, Cannabis indica
tatttgctgaaatcaaagcatcagaagtaaaaaaactgatttcttactcaaagaagaagagcttcccaactttcttagttgtcctaatcgttaaattctaagaggggtcctgaatgacaaaacaataattagaaaaacacaacaagttagtgttattttctaagaagtcattcaccgaaaataaattgaatctaaattcaggaataaagagaatatttttgagcctaatatccttgttaagttgaaccacaccagaagcggtgactttaatttgttggccattaggcaaagtaactaaagaagcatcaatattatgatgcagtaaaacacctaatattattgcatatatagtgagtagcgccactatcaacaatccaaaaaatagagaaaaaattagagttaccaaacacattagaggcactcggagcaacatcacgggaagtaaaaggttgctggagttgctgactcaaaagttggataagttgttggctgtagctgtgaagtggtgtcctgtcccgtaacaattgtagccgaagcttgattggacttggcagaatcttatttgcgtttgtcaccatagccaggagagaaaccatggagaaagtaacacttctcaaccaaatgaccaggtttgaggcagtgagacaaacaacctctcgtctgaaccatggtggttagggttacggtttgaagaaagagaagggtttagaatgaggaaagtatgtcatctgataccatattagtgaaaagtggtaaaattctcattacccaataatgggaaaaatgtggtatttatacaaagtgggaaaaacccaaataagaagcccaaaacataaaaacagaaataagcccaatcctaatcctttaaaaaaggagatcatttttgcaggacaccctttttaaaaaattaaaaaagaaaatctgtatttatgaaaagagataacaagaaaaacccctagcccacataatttccacccactccagtaaaactcttataataggtcagcccataatagggtaatataacattgggccaggtcgagaaattggttaagagagaaagagagagagaagagagcctattcacctcgtttaccttcctttttcattcatcctttcttccctactcttcttccttattctctctccggccgccgtcgctctacaacagtttttcaatttcagtatatattatataacagaaacatgataaagcgtcgattctacaagatggaccatggtgacaaaaacgacgaggtcactgacgactcttcttcctcctccgactccgaagttgaagcacaatctcaaagcgatgatgatgttgatggagtttcccttgaacaacttaaaggggatgatgctgaagcttgctctacctcttccggatacgagactgaggatagctccgccaatgaacttggtatcgactcctcaggtaactacacttttacgatcttctcggatttttggtgtttatagctaagcttgctcacccactttgaatgcactaaattggtccgttcgttatcaatgtttattacatattattatcagtaaattttctcttgtggaatttccttaggtgaataacaagtatgcttatgtatgtataatggaaaattcctcattgtcatataatccgtaaaattacgtagtgaaaaagaataggggcataatatttttcttaatgagtggtaggtaacggattcttttgcttagtttttacaagctctttaactttttatttatttaatttaaaaggacctgagaattctaaactatttttacagctgaaaatcctcatactttttagctattataaacaaaataagcttagcaaaaccgagccaccatataactgataacttagatgagaaagcaaaaaggtgtggttttgagaattcgggtgttgaagtagttacgaaactggaactctttaagagcatttctcataaatgtttttgtgcaatttattccttaactaaaactatgtttattttaaatgtcattttgttaggtctaccaatagatgaagaggattctgattctggaaatgaaagaccaaatcgaattgacagtcagctgtcagacaatgagttggatttggcaggttttccagaatgtgttttgaagtccaaatctgtttttaagtgcaagttatgcccaagaatagtctgtttaaatgaggagtcattgaaggctcatttgaagtccaaggtaacgatgttgataataagcatcagaaatcttaccctcctgtaatttatagttactttgctctactattacggcttctcatttgtgtttatgcttttcctaacagtaaagcattatatgccatgatttttaaggctcaattccttattgggagggaatagcttttgagatttgaaatttaatctgggataaggtcattcctaactttcaacttgttactattgtagagacattcccgttcagagaaattactcaacgagggaaggcttaagagtatgctcaacagtgatggggaaattgacaatgaagacttacctgcaaagcaacatgaggaagctgaacctccttcacaggtttttcatttgtcttggattctttgggaatggaagccttgaaattgtgagatgcaatatttaataaatgacaagattgttgtttcaatttaggataaaccaaagagggaaaaaaggggcaggcagagacaacgtcgtcgattacagaacaagaggtcaaagcagatggtaatagatattgtgcggaatgttttgtttttattatttttaatatatgtggtgaggtttttgaaggtctcattgtagttaaatcccttgataacattatgcagaaaacagaacctgattctagtcataaaaaatctaagccaacaagagagaagccgcgggcgaagaggagtaaacatgacaagtgaaagatgttatttggctgctaaacaagagtatgcatactgtgagaaatggtatggagacatgacatcctcttttagtttcgttggttggagtgatgtggttagtgttttatgttttggtgttttcaaagttgtgtgccctattctgtcttcagatgaaggttgattcactctgttgtagctttttattcttcatgtttactgttctatgagcaataacaattttttcatttaatttaattttatttttttttaattttttttatttttgcctccttgcaattactgttatgcacacggtattgcataattctgaatgggcattgtaaaagcattcgtataaatgagataatataatatggatatagatataaaacagagttatatttgtgacccaagttcactttgtatacgctcaacgaaaatcataaaggccgaagtaagcaaaggaatagtaataattttgaactgtaaaaaagttaggataagattttccaaatctttttgttgccatcttttgggtactttattacttatcaagaaaaaaataaaaaaaatgaataaacttttgggtacttcttgattttacaacaaggatcacactggtgttttaattagacaattagcaaatccttaactgctaaaaacaccaatgaaacaaccacttaacttaaagactaagttttattcctaaaaaaaaaaaaaaaaaactaaaactacgtcagtcacaagcctagacacaatgctaatgaaagcagtctgtatcctttggtgattctcttgaattctagtcagaaggctagacacaaaactaaacaattctaacgagaactcaaaaataaagttactgttaggccttagggtaataaataaagcgggtaattgagtaattgtaatgggagggattatgctatatatatgagtgagtagcgagggtaagaaaggggaataattttagttaagtgagcttttag

SEQ ID NO: 239076 - DNA, 7807 bp, Cannabis indica
agatatttttatactaaaataaatttttttttttcaagtaaattaaaaattatgttttaattctaaaattacttctcaataatccttttaaatgaagttaaggaattcctaacacccatctctccaaatttatttttcagagggtgatatgtatcaatttacattctacttttatcttaattttctaacacttcatctgaatttcctgattcacattttttggtttatttataaaaaatttacacaaattaaaatatacactatccaaaaaaaaaaaaagaaaaaagaaaaattagttgccaaaattatcaattggtttcgttgtatgtattatccgatattggcctcctcttatttatccgctatctacacaatcaagttttgataaattttcttttattcaatataaatatttcatgacaccttaaatttacggtttagtaatttagtgaattttactactaaaatttgagcttagaaaattaaagtgcaagttgagagaatttaaccgccaaaaactcttaactcacaccaaattttgtactttgatgaaaattttacataaccccattcattcactcaatcaattcaattcttgtgaaagaatatgaactacaacaaactacaatcaaagaaatgatcatacactgttacatattatatattatatatataacagaaactaattagtttccttaacactattttatgttgtctacagaactattatatgttgcatctatcataaccagagaaccatgaggagggttctgcaagtttcggtaactcgccatcttcaccgttatagaatggttcaaattcctctctccatttatggtcacttgaatcatcttcttgacaaggctccccacctacatcatactttaccgtatcatcatcgaaagctggctttatcgttgtatgatcatcatcgaaagctggttttatcgttgttgtatcttttggtaaacgagaatcagcaaggagctcattaagattgctaatctctttttcatattttctcttcattttgtccatttgttgataggcattgtcagcttcttgcatagcctccattgcttgcttctgcaaaattagaataggtgagaacttagaataagatgttttgatgtaacaaattaaaaaccattagtaataatgatgataattttattcaatacaagcatgcaataatttgatgacttaattgagttttttctttaatgcatgacacggcacaaatggtgaatcttcctataaactaacaattaattaatatgctaaaagaactagttaatagtttttactttgatgactagcttgcatttacataatttattgggaaatttgtggcaaaaatcccaatgcagttcactttgttgcacttaaattccaccaaattaaattaaaataaattatgaaatatactgcactgaactcacctcagcagtggcaacagcttcttcggcttctttaagccgaacgagtaattcaccagcagcatgtacagcctcagcagtgtccctcagttgagcctgaagacctttattctcatccctaaggtaccgtctttctctttctctttcgactttcaaagctgaaatctcagaagcaagagcatttataaatttggactcagcaccccgaactccagctttagcagctgctttcttcacatcctccattccttcttgtatcttcctatgccttgcaagaagatgcatatgtttctcttccaaatccgcatactgttccagcatacgtgcatttccctccatggccagctgcattgcttccttaagctcttctgcacatttcttctcggtgtctagttcccgtgcaatcttttctgcacgtttcttctcagtgtctagctcccgtgctttcttttcagctagtgctctggcatcatcgagttcgattctcatttcgtcagcaagaaaaatccacttactttctgtttcagtccaacgctttctttcctcttcaagtttgtcatcaacactctcgtccttagactccgaaattgtattaagaggaggaggggccacactcggttcacttgcatatgtcaactgcagtactgggtttcgttttcgggatgatgatgaatccacataatactgaagctggcttcttaagtcttgaatttcttccaacaatacttcccgttctcccatatcatgaaagtttcgtaagttttctagctcatcttgaactctctttagctcaatttttgtcctcaaaatttctggatggttctcatatttctccttcaaaaagctgtaaaaaaaaaaaatcatggtaagctaattgcttgagagaaataactgttaggaaacatttgaatgaaccaatacctcatgctcatgtttgagggatagtagttcttcctccatgaagtcttcggtgggtaaaataccatccataaggccttcaagacgcagaatcttatcctccctcgtctgcgtgataatggaattgcattccctttcatgcttatactgttggacctgtaaatggaaagtgaaagggagtttttattattgctgattgatcagaattaaaaactagatatgcttcggttaaataaaactacgaaaatgcataccaaacgattaagctgccctatctcggaagtttgcttggcacataactcttctagagccatttctctcctgatagctcctgccaagaccttttccactgcctgagtagtaagagaaaatattagaaagaaatttcagaataaaccgtaattaccagctaatgccaacttaacttactttaggaactaattttaatttttcagcagattctaagccatcatcaacaggtactaactgcaggttcaaaccatcatcattggcctctttagcctcttctagttgcattcggttcttgcaactactacacgtgaattcgactgggtcttctgattgagtagtttgcacaccagcatcaactttggaaactggcaaaaaaatcttagattctgttggtttgtacgagaacctatatgttgacctcctaaaagctgaactctggcggttactgtcaaatacttcaagaccatggcgaatgcttgctgccaaatgctcagttggtgcaaggaaacttctgctagtttgattagataaagtattgacagagccctctcttggggttttctttaaagatgcactcttatcaactggaactttttgagaagcacttaacatagatgatgtcctcaaacttttcctgctgctgttagtttttggtgaaaggcttggagttggagattgaaggttaggggatgcatcacatgtaatcattctgagactgagagatgcaccattcatcgatgtattcggagagttgttgcctctatcttcaactggcatgcacacagtttcgttaactgattcagagtttggaagaggagcctgtactattttgctttctgattctacatttagcatttcagtagcaaaggagccaagggtattttcctcagcagcattatgagatatcagcgtattatcattagaactttctggtttttctccaacagcttcgtcggaatcaacaatcatcgcctcaacttgtagtgatattgcttcttccatcttgacatctgtgtcctcagaatcttgttcttttgtacagttatgaggatcattagaacttctcaattcagagtccacaagttgtgaatctgagtttgaatcagtttattgccactaccacttgcagctgattgcttctccacttgaatgcacagcttctcaacagcttcgtcatcaatctccatctcttcatcaccatcatcatcaatatggggtaatgtcattgggcgattaatggtagactttaataaatgtaaacttctacgtatccatgctgctgaatgtcctccattagcatcaactgggttaggtccatttgacttcattcgatgcagttcatcctgttgagtttttcagcttagtcacatccacatgttcacttatttattgacgaagcaaatcagatatcataatgcatagaaaagcatacccgtagctgacgtattacttcacgcaagtggtttacatcatcctccgttacttcattaacaactgccttgttcttgatagccttagcacgctgagcaaatctcaatgtgctgaaagtctcgctcttacaactggaacaacaagaactgatattaatttccaatcttgccaaaaaaaatggttggcaatgaataaagattttaaatatatttacctttgtgtgggtgatatagcacaaaccattgctaattttgcattccctccaagggattcctgcaataaaaatgtcaacctggaatctctataggggatatgtctttgctttcctgtctgtgaaatttcagcgagaatgtttatcaaattcctgcaaaagtaattgacatcagttagcaccagactaatagaatgaacatttggattaccaacctataaaatcaatgtacttatacaatttcacaggaaatatttccattcaaattagacaagttatttaaatctatcaagtacctaatagctatggtaagtgaacttagatatgctgcatgcactagctcagaaataaatctttcactatatttattaatttattttagttagataagacaatgtttacccaagctgtgacaatgaacgattaatatttcctgcttccttgaggcgctcccctgctgcacctgttaatttttgtctctctgaccctgctagatcaacaagatttattctgctggttttgaagctgctcagaccatccgtgctctgcgaaaaggaaagataactttcagatcactcaaagaaatatatgaataatacattaacacgagtcacatatttgaaaactactttacttaagtgctcatttaattgaaatcagtcctacaagaatataattttttcacagtttaacatctaaaaccagacaataaaatttgtcaccaccatagatggttataccttgcaccgagattcaagaacacaggtaaaaacagtatgggagcgagaactctcagaattaatgcttgttgcacctgtcctcctgttcaacagaccctgcaaagtgtattcggaagtggtaatgagaggcatgtaaacaagataattttaattaatagctcatcatactaaggtgatgagttatactgaaccataatttaaatgattttggtgaataatgctacgagttgtaatattcactcacgtgttacattttgatctgctctcaacattaaataaaatttgaaaacatgagtaaggcaaaagagataaagagagagataagactcaagcttaaacaaaaatacatcaaacctatgactgaggtgcaagagatatgttaagagtgcaaaccttcgttaaaagcttatttacatcctccattgtacgaacacactcttctgtaagattttcaacatagatccctgatttaacatcttctctaatctgtaagaaaggtaatgtgtagaaattcaggtcagtcattatttattcataaaagacttaactcttttgaagaaaaaagaatcttatttacctggtaggtttttttggttaggatccaataaatctgttatttgttcgttgtaaatctgcaaaatttagttagactttaatttagaaacataaaaataaataaacagctgatcaatctgaaacaaacggttgtggagaatctacctcaagaagagaacagtgacacaaatacttgagttgtttatcagaattcttgatttgctcctgtgagaatacagagataagttgaaaacaaatataggacatgaaattcaacgaatcaaaacaaagacaacttaaaattacctcgtttatgcgagcaaagagacgctcaaaaactcgaggagttaaaccttgttgatcacttgatatgttttcatccaacaatgcgttggctggaccccacatagtgtaagttttcccacttccagtctaacgagaaatcaatgtagatcaatacatatgtcacatatatactactaaagtgcaatgtaaaactaagaaaagccaaacttcaaaatacctgtccataagcaaagacagaactgttaaaacccgccatacagttttcaacaagaggcgcccccacaagctggaaaagatcaagctgcaaacaaaaagtataactttcagcattcacttcataatcattaattaagaacctggaaagatattcagcatttgatcatacctgtgttgcctctgtgtccgcaactgaatcaaatgtgaaagtttgcccattgatggttaaagaatcactcgaaagtttctcgactatcatatctccttcgtccctgtctttgcgtggtggcctcattcgcactactacctaaaaaatgagtaataataattatcttaacagttaaaaaggaatctcagataaaatagatgtaagataaaaaaaataaaaaaaaatttagaatctgaatctgaatctgaatcttcaagcagtttgaacagttcagctgaatctaactactaaactcgatagacccttttttccttaaatgctattagtatttttagaaacttttttccccttaaatcccaattttctttcatttgattaaagctattaccttctaaattgaaattcaacttccataattatctcatttctaaaaaggaaactatctcattttcagatttcataatatatatttttatacatagaaactagctgaatttgagcaaaactaaaaccaatttgaaatgctgcttcaaactcaaaaccccaaaactcactcaaccaatttcaaatttcaccacagctaaaaaaggaaagaaatgaatataaacaatacctgtacgccagaatcagaggttccaaacacggaattctccggaacagtctccatgtgaagcttcctcttaagaggattagaagacggcggacgaggaggcaacggactcttcaacttagcagcagcggaaggcgagggtttaggaatcggaggcaaggagtttggatcggcatagggcggagcattctccttggaagatttctgcttccgcggatgtcggatcttggcggtggtgctgctagggtttggagatggcggaggttccgtctctctcaagatgttatttcttggctgcataaagtgcttcatcgtcttcgtactaactccttagttcttcttcttcttattcgattcgaaccagaaggaatcaatcgaaaccagaaggtttagagagagaaagtgaagaagtacagaaatggatatagagagagaaagtgaggagtttagagaagaagagaaagaaaattagccgttagagagagagagagagagagtgggaagaaaatttgaattttggggtaaaagaaaaggcacgtgtgtaggccctattttatttatttttaattattaattttttttttagaaaaatataaattggaaagcaaatgggtaataggacaagttttgggttcagtggtccacacccgtatagtcgttttgttattagtgtcgtttattgtcgtttcttaatataagtgtcgtttatcgtcgttttttattacaagagtcttttttgtcatttgtgtcgtttattgtcgtttttattaactatgtcgtttattgtcgtttttcattatttgtgtcgtttaccgtcgttttttgtgatttgtgtcgtttattgtcgtttttttatgatttgggtcgtttcttgtcgtttttcattatttatgtcgtttttcctatttgtgtcgtttattgtcgttttcattatttatcgtttattgtcgtttttcatta

SEQ ID NO: 239077 - DNA, 3475 bp, Cannabis indica
tttataatttggcccctcaacaaattataaattaacttatggtatctacacattaattccatgacactttaatacccttttgatacccataacataattggtaacttaatttcgtatcacactttataatagcatatacattatacatatgtgcccacaaaggatttttaatccaacagtaccttactttgaaaaaacaatcttcaatcttataccacatgtactcattgaagaaccaaaagtacgcacgtctccagaaaccacacaccaacaaagggccaatgacacctacaaacccaactccgaatccaacagctatgcccaatcgaaaccaatacttttcttcttcatcatcatcatcttctttagtattataacttgtagtacctttatgcattgtctcttcatcttctatgcattttttgggaagtggaagtccacaaagttggttgcctatgaagctagaggcttccatgctctgtagttgagtgcttgtgggaattttacctgaaaagttgttgtatgacaagttcaagtgatttaagaaagttaaacttgacataccttgaggtatattccctgataattggttcattgagagatcaaaagattccaacatcgtcatattttcgatttggttaggaatacttcctttgagagaatttgttgatagattgagagactgtaatgcttggagatttgtaagctgtagtgggaattctccagataggttgttgtttgaaaggtctaagccagtcaccaatgtcaagattgtactgtattcatcctcccttccttttctcaccacaaatgcattttcaatgaacacacccaaataaaaggaataagagatgatgttattcgaacttggtttagtgatcatgcctttaagctttccaaaacatcttggtattgttccaaacaaattgttatgagcaatgtccaaaatttgaagtcgatcaagatagcaaagctcatgtggaatctttccacttagtttgttagaacgaaaaccgagaaacatcaaattggaaagtctagttcccatccatttgggtaaactcccacaatgttatttagaccaagatccataacacttaacattgtacaattctgaagggagacaggtatgtgtccagaaaggccattattaccaagatgcaatgactccaatttatataaagttcccatggagtttggaatttgcccaatcaaatttgcattattcaaatttatcaccttcagtgatggccagtacatccaacaatcagaaatatttcctgataaaccattattgtcccccagatgaagaatttctaatttattttcaacatgatgaatttttttgatcacaaagagcatgagaaatatcaccagaaaacaaattgttggaaagatctagctctgttacaaaagaagatatacgaggtaaaggaccttgtaatttattggaactcaggtatatcatgcagaaaaatctagaatgaaactgcatatcgggaacacccccgcttatttggttgtgagatagattcaggtattcaaaattggtggataatttccaaaaccaattgggaattgcatctgaaattctagtttgagacaggtccatcgatgataaaagattttgtgatttgagccaatttggaaattggggacccaagttccaagatgataattctatgtacctaagggtaaatggtggaatccaataaggacttactcttagtgttaatgaatttcctgaagcatataaatatttcaagtttgtgagattggccaagtgaatttcagaaacaacaccttccaaaagattatgagaaatatcaagtgtttccaaggcagagagagatccaaaactttcaggcaaagatccattgaattggttgaaaccaacatttagattagtcaatgctgatagttttctaagagaaggaggaatgagacccgaaagcttattacctccaagactaaaataggttagactttcaaacttctcaatgacttcatcttttagttgaccataaaataaattttcatccaaagaaaatgatgtaattccttttgggttgcaaccaatgaaactttcaagggcatctgaaatttcaccttccaatttgtttccactcaatgaaattctttgcaaattgcacaagattccaatagattttggtatttttccttccaaagaattatttgataggtcaagaccaaccatggaagtcaaatttttaatggcactggatatcactccgtacagtttatttgatctaaggtacagagtttcaaggttgttgaaactataaaggcaattgggaatataggtggattgatcaatgttattctgaacagatatatcaagatgttttagaaaggtcatgttatggaaacgacatagaatggaaacatcaagattgttgtatggagctataaaagtttccatgtttttaagaccaaaaaaccaatcttgttaatcagagcacgtgtgaattgattagttagttactctagttgttgagagttagttagggaactgttttctgttataactaattctgtttttgcaacagtcttctctcttgtattcaagagctttatatagctcattcttgttctctttctgtaactcttgtacaatcaataacagagttcattcttgttcattctctcttctctaaatctaatatggtatcagagcaggttcgcctgtaatccttcttcttcttcttcgttcttgttctttctcattctctgttactgatggctcgaggtggtggagctcaaaccagaagcaattcagatgcttctaatcgtttctctgctttggattcaggaacacgatcgttttgtgatgatgcaagaaatccttactttctttctaatagtgatcaccctggagccagtttagttccaaagatactgactggatgtgagaattttagttcatggaggcgtgcgatgcaagtggctttgattgcgagaaataagcttaaattcgtcaatggcaagctccctgctcctgaagaagacgatgacgaatttgagctgtggaatcgatgcaacagtactgtgatatcttggatattacatgctgtttcgaatgagatagcagaaagcatcatgtacatggacaatgctactacaatttggtcgaatcttgaagaaaggttcaatcagaaaaatgctcctcgtgtttttgatgctattcgaaccaaacagtctctggttcaaggatcgaatagtataacaacatacttcactcgactcaagtctctatgggatttaatacaggaatacagacctcagccagtttgtacctgtggagcaatgaagataattcaagattatcagaatgaagatcgtgttcttgagttcttagttggtcttaatgagtcctatattggagtcagatctcagatcttgatgcaagatcctattccaaacatcaacaaaagcttatgcgactgtcatcaag

SEQ ID NO: 239078 - DNA, 2148 bp, Cannabis indica
tttaaatattatttattttctgggatattacaatattgaaatgagttttatttaggacacaaaacccaacaatgtcaaattggcgctaggatttatttttgcccttttagaaattctaattggtccttgaaaatagtttaatctcaacatttttttaagaaagagatgatgcttgaaagaattttggaaaaactcattttttgtggcctagggtggcacgttcccatactgggcgtagggccagccccaagtgtcaaccttggctttaggccctgttattatttatgcccagaaatttgtttttcctacgaaaggacctgtttacaaattttttatgaagatggattcaattcaaaatttggaccttcaatcaaacacttaggccaagattgaaagattgtcaacctgggcactggatgctcaaggcctcggggccccgggtgctcaaaagtcaacttgctctgaatatgattataatgcctcaaatatgtctgcaatatgtctaattgatgtcctaatgcaagttttgggcacttttcactaagatagacctagaaactaaaacactagttgaggatgtcaacttgggcaccgggtgcaaaccctagttgcctaggttggcttctgggttgtatgtttgagtaatttcagctcttggaatttggatttggtcgctccatgtcattatggtatagaatactaaaatattgtgtgttggattcaggttattgaagcctaaacttccaccctggctgtagggcttgggtccccacctaggttgaccgctatgactcaggtctactaaactctatgacgtcatcttgaatgtcatgtgtcaaacattgatgcccacaacactagggaatatttttgggttaacaccatcttgatgaattagaaaagcttgtcgctctggtcgcggaactatcccttgtaggggtctttctaaattagctgcacagattccccgatggccaactggccatgcgagaactagtactaagcaaacaataaaaggtgagactcctcatagggaggcaaactttgatcaagagttcagaagggctcaagcttgagtgcgccaaccagtggcccctccacctgatatggaagaaccacagactattgagagaacaaacaaaactacctccatcaggttctccctgtcgctctaacgacactaggccttaagaccttgcgaagggaaagggaccttccactcacaccaaagggggaatttaaagaatatacttcaaaactagaggttatgagattcaaagagtaaggactaacgagctgctttatacttagaagtatttcaagatgagagaggtgagttgtgccattactttacctgtggcctcgatggccaacaatgagtaatttcctcaagtacatggagaagatttgaacttgagtaattaattcaattttctttgcacttgggatcatgctgaagactattttgagcaatgctccagatgactgctcttgcaacgcatcatccaaagatcacccgaacttctttctaaaaggatcacaaatatttcctacacgaccttgtttttaggagacaaaaaccagacataagtggtatagagttcatgatcaattttgaagaccaaaaaatgtgtgtgacacactaactaaaagatggctggttgaagtggaaacttctaaaggtgctctgattggacaatagaagttctaactgatatgcaaaccaccacctatggtgtgaataggaaaaagtttgataatctagtagccttgatgaaatgaatcatggtcctgaagttgtcaaaattcaataaaagtttgataacttttttctgcttaacatgtaatttatattttttcattttatacaaatatctatgtatcatttttaagaaaagtttgttgaaaattatttttctaatttttaattaattattaagagaaaaaaatatcaataaaaataatctatgataatgaacaaaaaaaaaaaaacaaagcacaagaccatagtcctattataactttttgacaaaaataaaaatttaaattttaactcgtaaaaataataaatcaaaatagggtaattaaaatacatgttccaaatggtataaatttttgaacaaaacataaatttatttacatataatt

SEQ ID NO: 239079 - DNA, 4127 bp, Cannabis indica
aaaaattaaggggagggttacaggtagtaaggatgaaaaagcatgtgattgggagaccaaacttaagagcgtgtccataaatgcactttcaaccatgcaatttaatgcaaactcagctacactcacaatgtcatatctctaaagtacacaacaaaatactcaaaacatctcattacatatcaaatcacaacaacaacaacaacaacatcaaagaacattcatcaatttcttcgtgtgttaaagacttagccaagatatctcgtgaagttcaaaacttagaaacataataaaacaagctctcttttttagctcctcaaaccttaagcttctttctctctctctctctttcaacaaaggatcctcgtgatttagagctcttatatttcacgagtttcatactcaaagttcagaaaattcccagctcttcaattctcttcttcttcttcaaataccccccaacatttcttctaccaaaccatgctgattcatcaaactcaaactcaaaatcaactcaccaaccatgaaatccaaaccccatttcttattttccatcattttcttttctttggtttctcaccaggtagcaaacactactactctccaaacatacattgttcagcttcactcacaaggcatggcaagctctcttttcactactaagctcaattggcacatttcatttcttgaacaatccatttcctctgatgatgatgaagaacaagaacaacacccttcatcgcgtcttgtttactcttacaattcggcattggaaggttttgctgctcggttatcagaatccgagctagaaaagctgcaaaagttacctagtgtggtagcaattaggcctgaccaaagactacaacttcaaacaacttattcccacaagttcttgggattaagtccaataagagaaaatgcttggtataacaaagcaaggtttggaattggaaccataattggtgtgcttgacactggtgtttggcctgagagtcctagcttcaatgactatggtatgcctcaggttccaaaaaaatggaaaggggtgtgtcaacaaggcgaaaactttaacacctcgagttgtaataggaagctcattggcgcgagattcttcataagaggccataaagtggcttcaagttcaacatcagcctcagtaccagagagtgttatggagtatgtttcgccaagagactcacatggacatggcagccacactacttccactgctggtggagcttcggttgctatggctaatgtgttagggaatggagctggagtggcgcgaggaatcgctccttattctcatgttgcagcctataaagtttgttggtacaatggttgttacagctctgatatccttgctgctatggatgctgcaatttcagatggagttgatgttctgtcactctctttaggcggttttcccataccccttttcgcagatagcattgccattggaagttttcgagcaatggaacatggaatcactgttgtgtgcgcggctggaaacaatggccctattgagagctcggtagctaatgaagcgccttgggttgctaccattggagcaagcacaatggacaggaaattccctgctgtagttcaaatgggaaatggccaaactctctatggagaatctctttatccagggaacagaatttcgggctctcagaaaaagctagagatagtttatgtcaacgaggagcaagggagtcggttttgccttaaagggtctcttccaaaggctcaagtgagtggcaaaatggtggtttgtgatagaggagttaatgggagatcagagaaaggtcaagctgtgttggaagctggtggattagctatgattttgacaaatactgagctgaatttggaagaagattcggttgatgtccatgttttgcctgcaactttagttggttttgatgaatcaatagtcttgaaaacttacataaactcaacaagaagaccaatgggaagaatcaagtttggtggaactattattggcaaatcagaagcacctggtgtagctcagttttcgggtagaggaccgagtttttctaacccttcaatcctcaaaccagatgttatagcacccggggtcaatatcattgctgcttggcctcagaacttaggccccagtggcctccctgaagattccaggagagttaacttcactgtcatgtctgggacatcaatggcttgccctcatgtaagtggcattgctgctcttatccgttctgctcacccgaaatggagccctgcagctgttaaatccgcgattatgacaactgctgatgtaactgaccattcaggaaaaccaattatggattgggacaaaccagctggagtttttgctgttggcgctggacatgttaacccggtaaaagctcttgatcccgggttggtttatgacaccaaaccagatgagtatgtcactcatctttgcacacttggctacactacatcagaagtgttctcagttactcacaagaatgtaagctgtcatcaaattctgatgatgaacaaaggtttcagccttaattacccttccatttcggttattttcaagcatggaatgaagagtaagatgatcaagaggagagtaacaaatgtggggagtcctaattccatttactcactggaaatagaagcaccacagggtgttaaagttattgtcaagcctaagaggttaagatttagacacaaaaatcaggttttgaactataaggtatggttcatatcaagaaagagaggtgataaagacagtgtgagctatgcacaagggcatttgacatgggtgaataatgctcatagagttagaagccccatatcagtgacatggaagaaacaaaatgaccataatgagtgaatgtttatctgttattgatttagaaaaatcctgagatttgtttgttgactcagatgatttgttatcttcaatatttgaggatggaatttaccatcaagattttaagaatattagctatgagtacaagtcttcttcattaaatcattataaacattttccttgcttcacttttgcctttataatttcttaaagtactagaaatagaaataggaaatgccactacagtaactggaatacacaacaaaagaaattagtgataaaaagaatgagaatatggatatgagtaagaacaacaaaattggttgatttcaaattgaaagtgaagtagtttcacttgtcttgatgacaaaaacaaacaaagaaaagtaagttgaacaattatggaagtgtaaaaagacaatgaaaaaggatatacaacatcttattttttaatgaattgtaagccatttgcattagaatatctctccatgaatctcatgaacctatcccaatctcttggagtcctcattatgtacttagcttcaataccagcaggttttccattcacaaatttagcacttacatcaactgattgaagaacaccttcttcatcaatcatgtaaaacccagttatgtcaccaacttcaccagatgaatcgaaaaccgaaggctgatcaaacttgaatatagccataccattagtaccatctcttgattttgttagcctcacatctggtattgtctgttcatcagttccttggatgaattggatggttggctttaccatcattatcatggaaccaggcacttgagcattctgtcttaaccgagtccatcgggggcgagttagttgcaaagattggccattgaatgtggagtttgaacttgcttggatggaccatgatactttacctattaaaacagcaaaagcatcacattagttctgatttcataggcttggattatacaatgttggatcctgtatttttcgaaataatacactgaactcaattttcgtcaaaacataacttaataataacagtgttatgatcaggttggttacattttttgtatttgttcgtgctaaaaacaacttgataaatataggttcgatttgtcatttaacacaatagaagattcaataagagtatgaatccatttgtcataacataagccaatattgcatcattcttctatgtctaatctcatcaaaacaaccaaaaatcaacacacaaaaatcccagaattccttaattccgaagttgcttaaaaagaaaccatt

SEQ ID NO: 239080 - DNA, 1256 bp, Cannabis indica
gatcggatgaacacccctagcagattgtatgttgatatttttcatcatttatctgatggggactatcttaattgtaatttgtaatagcttctatttattaataatatcagtatttattttagcaaggtaaaagaaaataatagataacagcaatacttggaagaaaaaaaacaaatgtacgtaaaatattataacaagttccagtacacctgaatatcagatccacaaacttgtaaaacacaagtattattcataaattcatggtcaatagagtaatgacattattaatatgtgaaaggtttatgcagggcagattcaatactactgcttctccaaagactgaaaaaaaaacttgaatcagatagatcatattccgaggattataaactcaacctcactcattcttccccagaatctgaacggatagctgaaatgaaaagatacaattacaacgttaggaaggtggttcattacaaatatgaacctgtattttgtagcaaatcaccaagtattgcattgattagtataaaatgtcagaaactatattgcatagtagaaacatgttaggacagtagtgtaagagggaaggggaatttgaggacttagaggaggagactgtgagttagtaataaaatggggaggcagtcagtgggagaaggtaagcagaaattgggtgggaaagggggaggccagactctcgaatatctggggtacaaatggttcactgctgaaactaacttaacttcagtaattcttccttaatttctctgttatgtttctattactactttaagtcatctcatttcagcaaagaaacgcatcaagtggttacaacatatataactgatttacatttcaacatcattcagtaacacggattaaccacaattaatttcatattgttcacaacataaccggtttgctcccatgatgtttcagattcaatcctctcataaagacctactcaaaagcaatttgcttaagtgctaactcccatagattatacatataatatatattatcatatttctgctagtacattttgttatgttgttgtaacaatgctacccaatacccacgaattaactatgttcgtacttacgaaagataagctatgaattaactatgttcgcacttacaaaagataagctgaattccagttaagactgacaataagttagcatggtaaaacaattttctgccgtattttttgactgatgtacttaactaattttatcaacgagcttggtcttttg

SEQ ID NO: 239081 - DNA, 1975 bp, Cannabis indica
tccttcagcaatttgaatcccattttcacatcccccaacttacaaaactcatcaatgaccatggtatatgtagcatcatcaggtttcatgccagcattcaacatctccctcagtgtaatttctgcatctatgattcttccctctctgcataatcccgaaataagggcggtaaaagctacattatcaagctcgattccttcctttaccatttccttcctaatctccacggcagtttctagatcaccctctttgaaacacccatcaattatcgtagtgtaagtgatcttatcaggcttcaaacctctcattttcatctcatgtaagagctttctagcttcacccacatttccatctttgcaaaaaccatttatgagcacattgtacataatcaaatcaggcttgacacctttgcccagcatcttcttataaacctccatagccaaatcaattcttccatttctgcagtgcccattaatcaaggtagtaaaagttacattatttggaaccaaaccactcttagacatttcttcaaacaactcacatgcaccatctaacttgctctctttacacaacccaccaatcaaaacactgtaagtaaaaatatcaggagatacaccactctcctccataactctcttcagcttaaatccctcctctaaattccctgatttacagtatccattgatcaaagtattgaagctaacaacagttgggtgcaaaccccgtttggtaatttcatcaaacagtaattgggctttcacaattttacattctctacaaaacttatgcaataaaatgttgaaactacataccttaggaggataaccacagtccaaaatctcagagtaaaacaaccaagcagactcagctgaatttgacctcatcactttaccaagcaaatactcacaaccacgaaatgggatacaaaatttatgcttcataaccaatctaaagcactgaattgcatctgagacaaacccacaatcgatataaaccttaatcaaagaatcaaacacaccactctgttgaaaacagatacctttactctcaacaatagcagcaaaaatagaggaagcggaatccttccccttgcgagaaacaacgaagcgtaggagagattgagcttctggaaccatacgattggcgcaaaggaaccccgccatggcgccataagaatggagggtatggcgaaaagttgagcgggaagacagccaattgaagaaggagagaagagagtgtggggagagagagcaggggttgaaggtgatgaggtcgataaagtgagaagcagtgagagaagggagaagagagttgagcgatgagtcaagagactttgtttgggtgctgttgatagcttgggagagagagaggagtatgggatcgggattgggatggtgagagtgagagagagtagggaaggaggagttgcaggcgtaccaggcaggggtggagaaggaggtagagctagagctacgagagaaagagagagagagtagaagaagaaagtggttcttcttattatgggttttcaggattaccgccattttcattactgctttgtttctttctttcttttccaaattagtactcataaaaggaaatgtttcacttctttttcttgttattggtgtaatttaatagcaattaaaaaatacttttcggatctgcatcaacttatggagtatctcatcacgaatactagatttgccaacggtggttcaggtggttatcatggttgcagcatataactttgttggtattacttttttctccaaactcttaatgaaaacacaaaaatatttattgagatttttgaaaattaataaaatataataaaacttaaaaaaattaagggtaattagtaattttccccctgaattttgacatgtaccaaatcgtgcttcctaaattttttttggccgttaaaaattcccctccgactattgagattgttaaatttaaggactttgttcta

SEQ ID NO: 239082 - DNA, 2215 bp, Cannabis indica
cctacttatataaatatataagaaaaggtcaagtactagacttgttcgaagatgaagttagttgcttcaagttccaaacaacatttctgtgccgaaattgatgccataaaacaatcctagatgttgggaactttctttataccaagtaaggtccatcactccctagaataacattacttcatgaatcttaacctgtatatatgtatagataaatatatatacatttataagtgcacacgtctattttaagtgtcagcaattcaataaaaaactcttagtagacgagtgggtgataacatgatgtgcttttatcttttttaagcaatggcaattgggacaagcattaatttacatatctgtaatgtcaacactaagattgaaacacttggtatattagacgggacaacaaagtaaatgaaaatgaatgaattcttagcttataagagcaatttatgggcgagaaacacggatatataaggcttgaccaacatgatgatataggtcttgaaaaaaaggagaactttaattgaattatagtaaagaaaagatgaaatttatatatatatatatataaatatttatatgtaatgtaaggataattttgggttgctgaattatttgaagtctgatccgattaacaacgacaaattacgttggcagattagtagaaatataaaaggataacagtgattgacttaaaatataattacaaagattgatataatatcttcaaattccaaaacgacagtagtctgatcatcctttgaattttatttaatatcttttatattttaggtcaatgtaatgtagcatgtagtctaacattgtgggttaccaattttctgttccatgcatattctaacaatgtcacaaagaaaaattattcataatcattaggaagaaaaccattaagtactaaaaaaaaaacaattagcatgaaatgggccttttaaaacacaaattggtcatggttttgatagctttatgcatcttcctataccattttcaaaaatattataatttgttagttttttaataataataataataataataataatagataatttatattggccataattatagcttttgtttatttatttatcttactttggatttaaataagagaaactacttgcactcgtgttttgaccgaggaagatcagtccttgttaactaaggaaactttcgaaaagtcttacatgacaaatgtatattaatttttacattttttaagtctctatagatatattccattaaaaggcactgcaataattttaagttacaattttttacatttttcatggtgttttttcttcaattttaatctaatataatataacatataaatatattttgttagccttaattaacaacaccccttcaattacgggtagaatggaaagaattctctccagctttttgcatttgaatttaatttgtatattaacagagtggaccgtcaagacttgagggtacttaattgtgaccgtattttcaaaattaaactaattaagtccctaaattaactatcattataaatatttgaaatacctcttttttgtgtatattaattaaaaaaactcttatattatatttcattaaaatgtacgcatttttgtaagtgaattgcctaatatatcctcattctccacttaagtctagcacataattttcattaatttaaggggtataatgaaacatattctataaaagtagttatatcttaaaaaatatggaaataaaagtaaaaattaaaacatgtaaagtaaagtgggtaataggtatacaatgtaattttctctaaatattttttttagaataaaacctgttattataaatcaaacgtattcatttacaacaacatatatagtataagagaggggacatcctctaactaaacagagacttcatccaacactaaagtatattttgttaagctatgagcgattttattagtatctctacgcacatgagagacaacaactctagagaataaggataaaagaccccaacttttacaataatgtctgtaaaagtagataacataggtgaaggttgattgattgtcgtggagactttaagggctcgtttggaacgccgtattaggtcgtattgtattgtattgtattatattgaattgtattttatgtaatatttttatgtaagactacatgtggtattaacttttatggatacctaaatatataat

SEQ ID NO: 239083 - DNA, 1837 bp, Cannabis indica
aaaaatggtaataaaagctataacgtatgtatacgccaaccatatttgaaaatatatttgaccaaacatgaatgtatatatatgtatttatatttttacatgattttgatgtttactaacacaaaagtctcataatatgtaattaattaccattataattccattttaatatatggtacactaccgacacttgatctctaccaaacaaaaaatagaaaaaagaaaagaaaaaaaagctaaaccagatatagctaccatgccattatataattaataagtgtcattgttaattaattaacaccaaatttctaccaagtttttattatatacaatattcatgaatattcaaaactggcgatatgaaaggtgtaggccctggcctgaatatcacattaatgatcattcaaacgtggaaccttcaataaattcacttatcatcatcatcaaagtcattttatgtacatataaaagtgaagtgaacagtttttttatatattatcagtacgatctactagctagctagttcaaaaacaaaatgaataatttttagatttatatatattcaaattcatttttaagatatatatgatatggatcatatgttcatgggaaaaaagagcaagcaagagttattgcagaagttcgacagttcaaatgtttcatataattgagactctcataatatatttatatttatttatatataattaaacatccactttagtcaagccctctgttgatgattcttagagttttttttcctggtcatgactcatgacctaattaattgattgatagaccacgcgtttccacacactaactactgcatattgtaacattatatcttggaatcatttaggctcatgtattttatatatggtgttacatttttatatcttaacaatgtaaactctgacaaaatttgataatttttttttacaatgatatggatttatagtgtttttttttagtatttttaactttatttcacaaaaataggacggttgttaacttgttataatattattttcaaaacagttttgtttttacgttactagtattagtatagtactgattatatgatgttttccgcaaagtaaaaataacatttgtttttggaaaaatatactggaaaaagaggacatcagtaaaaatatgaaaaaaaaaatctataaaaattaagagaaaattattaattttataatttttttaataaaattattttattagaaaaattacacaataaaaaaattaaaaaatagggaaaattccaagtaaggatagctaaaggtaaccaagtatatatataccaccccttctaaaaatatgtactgatgtaccttctacttgtttcggtatccagaaaaattttttagtcttattttttttttatatatttatgtacgttatagctatttaagatatcctataaaattttgagaaattcggaataatttacaatataaaaaacaatattcaaacaatctattttacactcgtataaaataaaataatcaagcgtgcaacacactgtttgaacgcaattttcggcatgttaaacttttttaaatttcttaaaattttgcaggatgtcttaaataactataatttacatcattatgagaaaaaaatttgactaaaaaattattttgtatattaaaacacatagagatgtatcgatgtattctttttaagagggtacattatagaattttcctatactattttccatattttttaacttttcaaaaaaaattactttttttgattgtaaactatatttttacaaatttataccttaaaattcagaaaaataaaaatttccaaaaaaaaaaaa

SEQ ID NO: 239084 - DNA, 2963 bp, Cannabis indica
atcagttctgctcaaagatattaattagacttcttcatcaaaggactaataatatacagctttatatatatatatatatatatatatataatatacatcggcaatcgcagctcagactcatcttcaagcaaaattatgagaaggagttgagctgttaaaagagatgtaaaactctcggcaagtctgatttcttggctctctcactgaatttttttttttgtttgttttttcattttttttgttcttgatttcttttcccctatgtttattattatttttcgaaaatattttttgggttgtgattgtatacattgtgtttggtatatttgtgtatggagttgtggttattcctccatatatataatgcatgcatattgctgtgttgctctgacaaattattgatatggaaataaatagtgtgttttgattttatatgaataacgaggatatatatattcttctccgacgaaattctggttctctaaataagctacttaattttattttatttatttattttgaaatcactacttaatttaatttcaatggctaattaagatttttgttcctcgaattttgacatgtactaaatcatgcccctaaactttgaagacccttaaaatttattttccccgtaactattgagattgttggatttaaggaattttgtcaaattttagtaagaaaagtctaatacggatgaaagttgaggggcatgatttgacacatgtcaaagtttgagggacatgatttgaaagatatcaaaattcggggagcaagatttagaacatggataatcaccgaataagtaaaactgaatgaaattggacaaaagtcttttaatttaacaatttcaaaagtttaggggaaatttttaacgaccaaaaaagttcagaagacatgatttgttacatgtcaaaattcaggaggtgaaaaatcctaattagcctaacttaattactaattggaattctaactattttcataatatatttcagttagtgtatataatagtattattgttaagcacgagtacgtcatagcggatgtgacacatgatagtaagtgattagcgatttcccgtactatttgtttaatctaccgtactatttatttaatcaaatagtgtgggattccatagtaaattgtatcattaaaaatatatcacgaaagatggtattagagttagttccacattcttaatgtgtggaaataaattgtcttatataagatgaatgaactacttctcctattcccaattggttttgagatagaactttattcaccttatcccaaattctaacatagtatcagagccatttgtgagcccaaagtaccaccgatctaaaaagcaatcctttgtgagctaatagtgctattggtccaaaaagatacttccactgtctccccttgaacctccattgtgtgccaatttataatgttagggtcttttacatgtttcaaaatccataaatttttcgacgtttacactcacaaattttccaatatttggcctttatgggattctttcaaatgtcacattcggccttgtggtttctgaaggtcattcattatactcacactttctaagcccaaacgtgaagagggtgtattagagttagtatcacattgctaacgtgtgaaaataaattgccatatataagatgaataagatacttctcccattactaattgattttaagatttaactccatttacattttcccaaattctaacagatgcttaggacattaagatccaccttaatttttctcattcatataaatacattaagtgaaaaatgccgtcatctaattttttcttacgaactgaaactcttcttacaaatccatgtatgttgatccattcaaaatcagtataaaaatgtaataaatttcacccacagtacatgccaaaatattatatatatatatatatatatatttatacagcaagactatggtaggacttagcataagtttcctatcggtaaggaagcttttttgaccattaattttagatcatgtggttattaaaatataaggtgtatactgttaagataggactgcttgtatacaattaaaaacaatataaggtggttattatttattttttcttttttgaacaagagaaataattttattcaaaaaacaaaacaagatacaagaacaactgaggcaaaaccagccccaaccaaactagtggagcaacaacaagaacaacacaaccagactaactaccagtttgatattacatcaatgaaataactgttctttctactactattgaaagggcccaaacataatattctaggcttcatcaatttcttcacatcctggctaatcctgcttggggaagaacaaaacaagttaaagagacagttatttctattttgccaaatgaggtagaaagtggcagcaaccactgcattgattactctgttttggatgtcatgccgagccaagaaacacctgttacaaagatcattggatgttggccaaataacttgaccaagccaagacatgagtagttacctgttttgcacacaaaccatcaaataagacatggtcatgcgattcttccttcagctcacaaacgggacatctgatgtcatgaatcgacatgattctaatcatcttgtctcgggttagaagctgcgagttgataagttgccaataaaaaacctgtgttttagaatcacaagtctgtcccaaacccagccagcttaatcaactctattctctatcacctgttggttatagaatcttgtagcactgaatttcccacctttgacagcaagggtcagctgataatcacttgtagttaaaatacaagcttgtatcaggtttggagggatagttccagatgggttgacctttcaagtagattgagttcacccatttcacccacatattattctgcttgcttgatatagcctaaaggaacttggccatcaaagcctt

SEQ ID NO: 239085 - DNA, 1032 bp, Cannabis indica
gctgaccttggcttagagaagtcaaggtgccgcacgggtgttccgctgcctgaaaaggtgagcccgtgacaccaagcaaggttggagattcttaactcatctgaactctttggtcactagaatctacaaaactcactatttcccgcatgatgactatctgtcgactgagcttgggaggaatccaagctttgtttagaggagtatctggagcgctcaatccttagttcgttaggggcgagacgaactattggtacaggtttcaccgtcaacatcttacatcaaccttggctgccccataccactaacctgtatgtcacttcctctcatgtgggtctagttggtcatactgtgagctctcttttctctgttgatgatagaacctgggacattgaacttgttcgggataagttcaaccaacgtgacgctgatcttattcttaatatcccattgatcttcttgacttcatgtgacttttggtcttggtctggtgaacattctggggatttctctgtcaaaagtgcttactgtttgctccaggacagtaaggatccaaggtcaggcaacaacaattcggggttttggcaaaacctctggcaccaaaggttaagaacttcctctggcaagctgcatctgaggttttaccaacctgtttaaatctcagaacaaaacatgtggacatcccctccacttgtctagtttgcattctgcttcagaaactatatctcatgctcttatttcgtgcaactttgcttcatgctgttggattaatatgggtctacctgctggaatttctcttgaagactccttcccaagctggtgagataatatttttcagagccttgatactaatcgtatctgtcagattgttatggtttgttggtccctatggaaagcaagaaactctatcgtctggaaggacaaagttctcactattgcaaatgtcttagcttcagcacgtatatctcttgatcattggcttaaagctcaggatacttcttccttatcttctattaatttccataataatggaga

SEQ ID NO: 239086 - DNA, 3705 bp, Cannabis indica
aaggtatgattctctagtgtttctatccttgttttctttaagctctagcttaaatattgcatgagttatggttttagaggctatgtgatttagatttgtttgatgttatattttgactttaagttatggttgtctatgcaattttaggttggattagttgattattagaggttgggatcaagttaaagcttgtaagctcttacttggtgctttaatgatgtttttgttttttggactcattgtggagttttattgcttggattgggtctattgtggtgtgtacaagtgttctggaaggtttcatctctgcacaaaacaggtttaccgattttatgggacctgagaaatcggttaaccggttttgccctcaggaaacccagtgaaccggttaaccggtttaccggttagggtttttccaggaaccctagttttccctaaattgttgattttagggtatggtcatgtcttttatcgatactgttattcctagttgattttaaagtcaccgagaagtgttttagcgtgtctctcaccaaaattacaaatgatgtgatttagggccctatgaaatgtcgagctgcaattccactcaggctgaccggcacacctgggcacgaaaacgaggtaagatagcataaagcatatatatgtgaatgaatgtatgttattatttgtttacactactaacactagcaaggatgtagtttaggggtgttagtacagtgtaggattttagagtagttacagtattaccaatacgagtacagaattggtactctagtgcatgtggtacaacactcggtaactcctgggagtacaaattggccctaccaacacgagttcgaaattggtactctagtgcatatggtatagtggtcgaccctaccaacacgagtacaaagttggtgctttagtgcatatggtatagtggtcgtacttccattaagaatgttcttaaacatttggcaggctcgattattgagctcaggacggcttaagcataaagttggtacatcattactgttatatatgttatgcatatcttactgagtctgttgactcatcagtttgctaccatgtgtaggtaagggaaaggctaagctggaggagcagtgagtttgagcttggcaaggattgtacgtatcgagacagtgcaacctggagggtttcggttttataatattttgagctgccctgtattttttgtaagaaaaaaattattattatactatatattgtaaaggtaatttttaactatgttttaaactcgggatcccgacctataaggttatataattataatatgataagattaattttggtttagcaagtttacaaatacgggcgttacaaaatagttcatcatttttctacaaaaaacatcactccaagtccaattctaccgaaagcgaaccaaaacctccaaaccacctagaaatcacataataaacacatttcaactgaaaaatgcaacatcaatgcattgaattaaaacttgtcattattgagcaagatttgagttttaaaactcaaacttgctcaacacatggctcacccataacaagggcctcaaaacaaaaacaaacactcacaatcaacccctcaaaacaaaccttaaatcccccaagctcagacacaaataaaacacaaaattgcatgctcaacctaactttttttcttaaaagttaaaagagaaataagagtcaaagctttccttggttaacaccgacaactactaggaattcctgttgagttgagcttgaattggtttgaaaatctttggtttttcttaggtttctttggctgaacaagaaagaaggaaagagaaagataaggttttgtattttgactttttgttaggataaagataaaataaaaactaattgctaattagtaaaatcagaatatcaacttagataactttagaattctcattagttttaataatagatcataaagcaaaatgacccattttgcccttttcactcagaagtaatttaataatctaggagtaaaatggtcaaaaactataaccctgattaatctcaacattctaaatatctaactttcttgccccgctaattctaagatactcaaccgtatctaagtggctttaatagtcaattcgttgtattctactgttatcaggcataacttacgaaaatcataaaaattcatacataacataggcttatttataccgtaggtccttaaattatataagttctggtaagttggtccataaactctattttttaacaaataagtccccaaactatataagttttgacaaactgatcctcaaactttattttttttgtcaaattagtcctcaaacttttattttctttgatacataaagtcttcactcttaaatgttggtattatatttatttatttattttgttttgtattaattttaaatatcttaatatcgatataccttatcaaattaaaaaaaattaaatattttttatttatatatttttttttaaatatgcaccaaaataagaagaaaaaataaatgaagacatttttttaaatatgcaaaagtaagaaggaaaatatatatttttatttatatgtatttttttaaaatcaaatcacgacgtattttgaacaatacaaaactatatatacatgtgaaccaacaatttatctttttataaacaacacttacacaaaatattttttctaccgaataattcatttgcacttcaagcaaatattcactctcattaaatagttgatgtttgttgccccgctttattcctaatatacatggcggctgctgtataacatgtggcaggtataggcacgtcactcggagatgagttgaagacacccaaacctcctcaagaaccaataagtacagtttaatggccaactcccggaaatgagcaaataggccaatcttcttctcggtgagctaaagcgcgaatgagcttctccgggccagtaaagctgtagttaaatagtcacttcgcatttaatgcgacatgagaaaaatgtctgggaatacccataatagaatgtatcagacgtcataaacccagctttgggcgattacacgataattaagggagctagtgatggatccattatgaagaatcacatcaattaagaagggatgaaggctaatctcacctaaaacctaaacagcctactacgtaggtaatgcatgccctattttgtactttctaggaacttgtgcatgcccatagttggcacttaaagacaagttactccttttcttcttccctccaattgctaaaagacaccaagaaaagtctctctaagaaatacccacccattaataacagagacttgtggactatggctcattaatgctcgaaccacgtaaaaactacacgcactaattatccctcagctctcattattacgttagatatttggttgtcgaaaaccttggtcaacattttggtgctttcattgagagctgtacgaagcattttcaagaggacgacaatagaagatttaaagtgttgggttttatgccctaaataaaactccatttcaatgtaatctttatcttttaaatatcaataaagaaacagaagtatttatcacttatttgtgtgtgatttggttcatgttatcatttacttgtttatatgattcataaattcatcaaaacccttatcacatttatgttcttgtttattgtgtcgtcagcacagtgga

SEQ ID NO: 239087 - DNA, 2415 bp, Cannabis indica
ttatgttctacatggaaaaataaacccaatgtttcaacaaaatcaacaaaaagaagaaaagaaatatcagagatcatattcggacaagaacatgaacagaagaggagttatagctgcttcaaactaaaggttccgaaaactgtctgctttttcgagtctagttgtaccagaacttgacgactcgcccattgcttctggagaggcagaggctgctggtggctgtgatgactcttttttcagagaagtggacatccctgaaatctcctgttcaagtatgaaaaagttcactcaaaccatcgcgtatgaaaatacgaaagagaagcagaaatgttgaggctgaattgctctactctctcttgttttcagatgggtttttcaattttcatattatccatggtgttaaacatgttttcctcttctgaatatttcaaaattctttagtcataagttattttgacaccgaacgaaattagcgattttctcattgcacttaaactactctcaatacagcaaaaaagttgaacttaccttcatcaaatgcaacctcaagtcactaggcttgacttgatttccaatgcatgccatcacaaacttggaattttggaacaatacatcagctgcagcttgctttttctcttcaatctgccacaacaaagaaaatagtccaagaccgaaagatataagtatctaactcaacaaattaaaacacagatcattgttagcagcaccagggattaagtattaaccacttggactaagaaaaaatgttgttatatgtggtgttgtgatcaagtgacttgccacctaaggagccaagtaagcactcggataagaagacagttaaattaattatcttagctgctatcctctccagatttcagtttgtaccaaagcctataaaaaggctgtcataacacttgtaagggttaatcccaaaacagagaaacagagagagcattagagggtcgagtgtgtgtctttgagctccaagaactaagtgtgtttattgttaagttcttagacaaacattgtactgttttattgagattgaataaagattatcaaaacctgtgtggctttgaaactgtccctatagtggactaaatcgggattgcaaagcttgcggtggaaccacttaaaatccttggtgttcatctttttcaatttagttttgtcaatctcgagtttgtttagttcttggtaatttgttaagttcttgggatcttgatgtttggtaaggtttttcaccacattatgaagaagacatgaaagagattagccacaatcatattaaaggcccccaaaattttatggtttacacagttcatttgaaattgaatgttaaaaccaaaccccatagcaacttgtgcttcatgaagaaactactaatatagctacttagatgctaattaggattttgttttcctcgaacaatgctatgtactaaatcatgccctccgaacttttcaaaccgttaaaaaatcttcccaaactattaaaattgttggattcaaaaatggaaaatttaactaccgtgatgcctaacaaaggcatgatttggtcaatgtcaaaattcagggatcctaattagccttaaacaaaaaaccagttagtagtttgtaaacacaaaaaggtgtgacattggattttcaagttacacaaaaaggtatttgattatgattttccattatcagaaataaaaaaaaatcaaaagtagtaatcatttaagtatgaactttctttgaaaactcaatacaaacaaaccaactaaccctcatcatagaatagatgaactatgtgtggttacttcaactttctccaactcttccatccaaaggatcaaacagaataaagaaaagtattactgaatctgtagctaatccacaaaccctttctcaaaatttaacataaataaattcatatgaataaatcacaaagaagacacaaattttctcaatacgaaattttataaaaacccaaaaaagggttaatgattttgaaaggaacgactacagaaagttattaaattttttcaagaactacaattaaacgcttatgccaattggatttagactaattattaaaaaaaagagttattaagattaaagcagttagaaatagaatcaaacctcgtaatcttctttcatggcggaaactccaggacccttgttctacgaaccaactacagcgaatgaagagagagagagagagaacatgaatttgaacttgtgaagaactgtgtctgaatatgaataaatattaaaaatggaattgctataacatcaaaggcctattagctcagctggttagagcgtcgtgctaataacgcgaaggtcgcaggttcgagacctgcatgggccattttttttctaagttaattttagtatgatctaattaaatatttatttttttttt

SEQ ID NO: 239088 - DNA, 6340 bp, Cannabis indica
acaaatcagattagattgaaatgggtttgatttagggcataaaatcccaacacctcttcccagcagttatggaaccacattccccttttggacttaggtttttgcaagggagctaactgttgggtttcttgtcttcagatgagtgaatttcttcaggatcttcacaaacacagttttttctgattcaactaggagattcttgagcttcattaaaaaagtgcaatgtctaattctcaagtaccgtccaacactacccctgttggtaatcctccctcgaccaaggtagcacaaaagctcgtccctttggatgtgttatgcaaggtccagtaccttacaaaaagtacatttattgttctaacggctgagatgctgatgaattgcacttgcccttgacgtgtgcccaccatctaaataaaagtgtggctaagaatgaaatcaagccaattagttcaggagtttaccatagttttcccaaagatgataaaacacccaatcacagctataagggctttggagcatggagacagacccacctcatgtcaggagccatgataccgctttaagattactttatagaattttttgtttttattggacttaccccataccaacttatcccacgagcttacaacctactttcagacctttttatttttatgctgctaggggttgggtcacttccagccctacaaaaattttgtattttcacaaactactatatgtccccaagaagggtgacattcataaggatggctttcataagttgcaagcccatgtagccaacgaaacccctatttcttttaactctcaaaaaaatgttaaggaatacaattaaagcttttgaacgcccaaaacttgtgaccaagtgggtcaggattcctcctttgcacaggatagcccccacttaattattcttgaatcacgccaatgtgtttgcttgttaaaagagggaggacctgaatgttggcgactttgtgaccacctttaactattacaaggctaaactgatcctgggccatcaaatggtcgagggttttaatttatctaaggtgtcatttcccaacgctcgaaatctgggaactgagaagaagctttagttggaaatcattacaacgactatggaaaaatacaattaccgataaaagaaagagcaggagaaccattatgcacgccttcagagtgcctctagaaagactggctaggagaagaccaggaaagaggctacgtctaccaggctacgttttcccttcccgatgcccaactctgggacccctggagccattacctctggtgcttgtaagccccctttgaactttcattttgttccttcggctcaagagtacccttacttacagccagtctgctttgacatgaggttatatagattctagatgccctatactcagcggggtaatagggaaaaagatttttctttttctaacacgagtggcttcttggaccggtctcaaataggttctggtctcccaattcctattctcttggatcatttctgctacataacctcaagctggtttctcccatcaaatagttatttaggagatgacgaccccagttctttaatttatgaatttgctaagacaaaattaagacatcggggtaggattagtatttcttatttaatgtctctttatatatgatttgtgtatttcgtatttttaaattttctttatttgtttccaatagcgaagcccactctcttagccatgctaaacgccacacatagccctgagtcagaggtggccgatcctccatcagtggtggtgaaccccaggggtccaagcgaagaggtgcctggtaactaagaagttgtgctaattgaggaagaggaagaggagtttcccccactcgaccagaaatagaagagtgaggtttccaatcccaaatcttttaagaagcccaggtcttcatggaatcttgcaccaagcactgactttgggatcccatctaaggttaaagactttcctaccccacctgtaatccttctgacccccaccaatcctgataaagagcgagtctaactttgcattgcaaaacacaactatgcttttgacaagctaacgaagggagagggagaggcagaggcggaggctttaaaaaagtggctaagggaggctcaagatggtcttttctgggggaatacactagtgatgtttgggttttgaaccttgatcccatgactgactagtttaagcgcttcttgggcctttctcttgcaccttttgcctcggagatggtgagtaagtttacagctgaactattaagcttcccataaagagttttgcggtttatgattcctccaacccagtctaccaaattaaagacataagtgtggcccttacctctgtaagtttatacttaacacctttcgagtttttcactcacttttgttgtcttattaatccctataattatttattttaccagatttatgtagaggcatgccaccttttcaagactttgatcgatcaaggactctctatcttggagcaaggcggcatggatggagtgttaaagaagcttagggaggctaaaagccaaatggagactctctaaaatgacacactgtcagagaaagctcttagggagcgagatcatgatacgttgaaggccaaggatgaaattattgcctctacccaagccaagctaacccaagcagagatagacttgttgaatgcctgagaggaggtccaaggactggcgtccaagctcaagacccttgaggacttgcataatgttgacatccaaactatagcaaatatgttagtgtagcttaaagagctgtgcgagttcagggaccaagccaaaaaggaggtcgtgaaagctgccagagatgccttgtttgctctagtgaccagtaagcatcgtgtaaatgcttcgaggatggagtcttcatgtgctagaaattgaacgagtttgaatctcaccttactttcatgctaaatcctgagactggtaggctgctttggctcaattttgggagaaaaacaagaaacttaaccaaatggtggctgatcaagtgggtcctcgccttcctcccaaggcaaattaattgacaacttttcctatactttctcttattactactaccactagaacaatactttaatttttattttttgcatgttggggagacacttaacatagcctttccctgagcttttcttgtccctttttctttttgaacatgcttttttaaatgttttaagtatatacacttaactgtgttttgctattttttcttgtccttgcgtatgtattcctctaaaaccccctaagtgacttaagtaaattttgggtcacttagtctatattttgaaggataacataaacattacattttattcacaatacgtgtctttaacttggaaatataaagatgaagttaaataccaaactcctaactattgatagtatttgcagaggtgatcagcattttatgctcttgggactaaacatccatccatatattttagcttgtaggccccgaagcctatttcatctgtgatttcatacaatccttcccaatttgggtcgagtacccccactcctggctcttgagaaacaagaaatactctctttaagaccagatccccaattacaaatttccagtctttgaattttgaattgaaatactttgccactttcttctagcatgatgccatgcatatttgggactcttcccggaactcttctacgagatgtagtgcctcttgcaatagggcttgatttgtggctggatcataagtagttcttctattggaggggattatactttccacaggaatcatcgtttcacatccgtatactattgaaaaagggaatgtctggtggttgtccttgtagtggtcctgtatgcccataatatgtgtcgcagtttctctggccagttttttttgcaagccaaaagtttttttcttaatggtgacctttaatattttgttaatagcttctgcttggccatttgtttgaggtcttgcgactacggagaaactcttgatgactctgtatttgtcacaaaactccatgaattcatcacaataaaattgcttgtctttgtccaagactatcttatgaggtagtccgtaccggaagacaatatttttgattacaaaatccaaggctattttagttgttatggatttcattagctctacttttgtccactttgtgaaataatccatggcaactattgcatatttaactctgccctttcccggggagggatcctataaggtcaattccccatactatgaagggctaagggcttgtcattaatatgattttctttgggggggcccttgggatgtttgcaatcctttggcatgggtcacacttcatgacataatctgtgtaatctttcttcatagtgggccagaagtaaccttgtattaaaaatttcttagagaggctgggaccctcagtgtggtctccacaaaatctttcatggatctcctgtacaatttgcctagcttcagggtctgacacacaccttgaatatggcatgctaaggcctcttatgtaaaagataacgtcaatcatgaggtaacgggtagattagtattgtattctactagatgtcgcttagtcttgaggtaactccccctttgtcaaatagttaatgattgggtccatcaaactggatacttgctcatttgccacaatctcagcctttgtaatactcagttccatgatgtactcgacagggactacccaaagttttttcgtttcttggtttgatgctaacttagctaaggattctacatgggcattgttttctcgggtaattcacttaatttttgagctcttgaattcttggagtaactctctcgcagttgagacagaggcacccatcttctctccttgagtcttatattctcccaatacttggttaacaaccagttgagagtcactaaagacttatatcttgtgggctcccttgactttggctaacctcaggcctgccaatagggcttcatactcgattattggaggctggaaatgtgaacctcaaggcagcttggagcctcaccccgtccgaggatatcattgctattcctgctctgtatccaatttcattggacacgccatcaacatatacttttcaagtaggaataatatgatttggcaagtcagcagttgcttccatttcatcgcattcaaccatgaagtctgcgagggcttatcctttaactgaaatgaaagggacatattttatgtcaaattgactgagctctttttcccatttgaggagcctcttagaggctttcagtttcaagatgacttgctagagtggatggtttgtgaaaactttgattgtgtgtgcttgaaagtacagccatagcttccttgatgcaattaagaggcaggaagctaacttttctatcaaagggtatcaaattttagcccctatcattttcttactgacgtagtacactgggtgttaaacttttccctcctctcagatgagggctgcactgaccgtgttctctgagatggctaaatataggtataagtcttccttgtgaaccggttcggacaacactactggcttagccatgtgttctttcaacttcccaaatgcttcttcacattcctcggtccattttaacttttgactaatatttagaatgttaaaaaatgggatacatttatcgatggatcgggagatgaaacaactcaagttagctatctttcctgttaagctttgtacgtctttatgcttttgggggggaaggcatatctagtagggcttgtatattttttggattttcctttatccctcattggcttactataaactacaaaaatttccctaatttgatgccaaaggttcatttcttgggattgagcttcatcccatacttccttaccacgtcaaaacattctttgaggtcttccgagtgacccttacttgtcttgaacttgactaacatatcatcaacgtatacttccatatcccttcccaataggtttttaaatatccggttcaccatacactgatatgtggctcttgcattttttaatccaaagggcatgactaaatatcagtatacccccttgtcatttctgaagctcgtacattcttgatctgtcaaatgcattttgatcttgttgtacctagagtatgcatccataaaagacaatagctcaaaactggaggtggcatccaccatctaatctattctaggaaatggaaaataatcctttggacaagccttttttagatccataaagctaatgcatattcaccatgttcttttttgtttgggtacaagaactgggttagccagccatttggggtaatactcatccctaatga

SEQ ID NO: 239089 - DNA, 6533 bp, Cannabis indica
ttctttgcatagtagtaaacaagcacatattactctattcatggacagctaatataaaagtcatttttttttattaaattattttcagtaaaagtgcttttcaagatatttctagattcacgtttttatctcattctttgttttttgttgtgtttgtttctgtttttttgatctctttgtagagctggaactatcatatctgagacatgggaagacggccaagctttaaaggatctcaacgctcatcttgtatgtgctgactgacttcatacttgatattttatctgtttgaattattaaatttattttcacattatttatttatttattattaatttacactatcgaagagtgcctactgaatttgggttgcaaatagggatggaaatggggagggtgcaaggaatgcaacccccgctacccatttatgtcctcatcgctgtctaatatcctttatattaattttttttcatttattttaaatcgtcacattttttatcagtcttgccttaatggataccccgacgggttccccataaaagatgagtattcccctaccccaaatctgctagatattagacggagatgtggggcataaatgggtaaacgggctaagaataattgctccgtttccatccctaggtgcagatagtgactaggaaaagaattaaatttcgggtcgctgtttggatttttgcaccaacgatttcaatgtatttccttttctatgatatgcttagagattgacacataggattgtaatcctagatgatcccttattatcttttgaaaacttttcccttctctaatacaattgttgtttcttacaaaataaattctttgctgatatgagtaatatattttattgtgaatacgtaataagaacttgcgtatgaagaaaatgaattttaatggtcacgttctctttaagtcactatatttccacagcagaaaactttagttctatgctacacatctcaagctatatatatgcttgtagtttgaacaattttctgtgtgttcttgcttctgtattcctctatttggatttgtatgcttcttcatcatcttcttttttttgttacacatcattattagaacaaacaaactagtctcatatgctgttcattttttttttttcgaaaaaaagaagaggccgttgttttagattgacctcccccgttatgtattgatagtcacttgtggcggaggaaaaccgtggtcaaaatagatattttagttcagatcagggaaaataaaaatacagtacaaaactaagccactttataaccagatgtctatagtagtgttttccattctctacacatgtgatagtgcatatctgcccttcaatttgttcattgtgtaactgtgtcatagtgcatatgtgagttttattttaaaaaattaaattggattttatttggttttgatactaacacggttatgcaattattgtagagacaattgctagaaacaaaagaagctgtcgagcggcaacggaagtttctaaagaaaagacagtctggtatgtttcatctatgtttattatgaaagtttaagctccactgttgttttgtttgaaattactacttttgcactttaagctattgtattggttgttattacaggatgttagattattatttttagagactactgaaagtactttgagtaataccctttattaggttgtaaataatccacctttcatgttcacaaagaagatgtgtgtctattaagattggatcttgactggattagaaatgatagagttagattgtatccaactttctgcttggtaaactgaaacttggaaaatcaatcctatgtttggtactggacaagattggactaaaaaaataacaaaaaacttcaaaacttgtaaaagcttaattgaattttaaggaaataaaaaaattacaactatttatttcctagctgaagtttgattaaattagattttaatgaaaattattatcctggtttaaaggcaatataataacaaaaataacatttagctgtaataaaacttctgaagcataaaagatttgtgaggaaaaaaatctcagccttctttggtactaggcagctaagcactcacaatttggagatagtgagttgaatgcatatgattaacaaatatagataacgactgggatgccgatttcagtgggagccaaaacaggaagagcttccctggtgttttcctcttcaccttgctttccccttgggaaagtcaagcattatctttaccttgattctgtgcactctctgcaatttaataataataagaacataaaatctgaagcttattcatctcttttcacaatccaacacaatagtcaagaatagaatgttgactccttccaccctccccagataacctacccaaattcatacatgacaaatccataatatttctctcttacagaccaggattttttttccccctgaaaatgcacaatgtgagagatagggtaaaagagagggaaagaaaggtggagagaaagggtcacgagagaggcgagaggagacagagaagaacaattagtggaagaggacaatgatggcggcagcagccggtgtgggaagaggacatcaaccatgtcatggtctcagtattaggaaaacgggttaaagagtttgtgttgaataaataatccaatcactgttaaccccaccatatcttttgggaattccccaacaattttttgtaattacaaatgaacctgctctttcccctgttcattttgtgcctgccttgctttactggatccagcataatccctgttctactctggtcactattatggttgggcagtaatgtcaaccttccatatgcttgatttcagtgctgctgactatctaatcaacaaatgtctttccttgattgtagccattcttatgtatcattccaattataatgttgcaagagtcaattttcacttcatagtttagtttgtcattgtttttatcaacatatttaaatactgaaaagtcctcttttactcttgtagataaaggagacgtagctgattcagaaacagcaactcaagaagaagatattctcatccaggatgaaatctacaaggcccgtctaaccagtatcaagcgtgttagttcactatacctaatatggctgcattggttatttctctattttgttattttagttttattgtaagtatgataaatattgtgtatgtcttttcatcaagttgttgctttcttctaggaggaagaaactattctgcgggagagggatcgatatgagctagaaaaaggaaggcttatacgtgaaatgaagcgtatacgggatgaagatggttctcgattcaacaattttcaggttctaaaccacagatttgccttgttaaatcttcttgggaaaggaggattcagcgaggtttacaaggtcagaactttgtgaaagatataatgtctgtatcaatacaaattattttatcacattttaaaagatgattcaatttacaaaacaaaattctagaatggttccttgcctgtattggcaattgtaaagaagcacctttttgcagtgtttgaagtaagaaatttccagcaggcttatgatttggtagagcatagatatgttgcgtgtaagcttcatggtttgaatgctcagtggagcgaagataagaagcagagctacatacggcacgccattcgcgaatacaatattcacaagactttggtgcatcgtcacattgtccggctctgggacatttttgagattgaccagaacacattctgcactgtcttagagtactgtagtggtatgcatttgttggattcttgttctcattcttattagctatgtacttattcttatgaaagttggaatataaaggctttgtttctttgaaacgttgctcatcgttattatattttactcatcagggaaagatcttgatgcggtacttaaagcaacacctgtgctgccggaaagggaagctcgaattattattgttcagatatttcaaggccttgtatacttgaacaaaagaacacagaagatcatccattatgatttgaagcctggaaatgttttatttgacgaacttggtgttgcaaaagtgactgattttggtcttagcaagattgtggaggatgatgttggatcccagggaatggaacttacgtcccagggagctggaacatactggttagttataagactgtcagaataatcatctgtcactactatgttttgcctttgtgtacaataactttgattttcggttttaattctcggtttataattgcctttcttcttaataccgtacacacgaactatttggcttggctaaaggacatacaatttcacttgcaggtatttacctcctgaatgctttgaacttcacaagacacctctcatatcatcaaaggtcagaaattgctggaattgggttctctttgggatgacaatgtacattattaggagagcgcaaaaaaaaaaaaacacccttaggattttattttattaaaactaaaaaaggaaagaaaagaaaaacaaatgaaacttctgtctggacctggacatgcaagtccaaaaacggttgtggaggtttcctcaattagaaatgggctatttaggacgaataaacaagtttcgtcattttttttttttggttaccaactctttctgattagctctcttcaagcaggttgatgtatggtcagctggtattttgttttaccaaatgctttttggaaggcgtccttttgggcatgatcagtctcaagaacgtatactacgtgaagacacaattatcaaagctcggaaagttgatttcccttctagaccttctgtatcaaatgaggcaaaggtgagttatatataaatatatatatatatatatattaatatattttgcatggaacattattttgtcaactctctctgtttagtaaaaataagaaaaagacagataaataatgaattaggtgtttgaccatttctgcattgacatgggttaatggagcaggtcacaaatagcattaatttcttttaatcacaatgcttgtaaatattatagaaaatagcaaacgaaaatgtaccaaatgtttgtagtctggtctgcacaatttttggtgggattataagcttttggttttattatcttattcgttctacttaggattgccttgacgattgtttcttcttcctttcggttacatatttattgttcttcataattatgtttgcaggaaatgatacgccgctgtctaacatataaccaagcagataggccagatgttttgactattactcaagatccatacctctcatactccaagaggtaaaataagtacttgtttccacagccgcagccgcagctgaatgttaagagtttatttttcctcttccccaatagaaaaatcgaacgatttatggctaccccccacatgccaatttttgtataggttgtaaatgtttttgtaattactggctgcaccgagctcaattttatatcggaatatacatggacatgaaactagtttactcaaacaaaactacctaacatgggagttaggttatcagagctcttttcagctaggacatttaaaattaaaagtataaatttgcatggtttctaccatcacctgtgttcctctcttggcttggcttgtattgtatctaaccatgttgagaatgccaaaatttggatttttcattcaaagaactgttagactacttccaccattatgtgttttttgcaggttggaagtagagttgtgtgttttctaattcgtatatctttatcttcaatgctgtatcaaagtgtattgtactgtatacattatagttaaagatattataatacaagttatcatggtgtgtaccaaatcatacatttctgtacttataccttctggtgtaggaagaaagaaagctgtagaatgttaaagatattatagtttaaaagattttgtacattagcccaaaattatggatgacaacatcatcgacaagctcttaacgtagtagtcttgtaaaatgtggtgagggatctcattggacaaatagcggtataaatacttaaagttttgagtttgtaactaacataaattcgataatttttaatgtagaatgagtatttaatgtttgtaaaattgtaattttctttagttttattggtataggacaaatgtaatattgtcttaaacaaagcatatataggctcaaattctaaatcattgagtttggataaaaacatatactattagttacttaaattttttttttaataaattcaaaattgagtccctattgatgaaattgaaaaaaaaatacaattttacagatattaagtatttatgttgcttaaaaaattgagtttatgttatttacaaacttaaaactttgagtaattatgttactatttatttatttagtgagagcttgcattaatctatatagcggtgttagagagtttggtgcacttattatgataagatcttcctttaagcaagaatccaaattttaaatatgtgttttttttttgaat

SEQ ID NO: 239090 - DNA, 1947 bp, Cannabis indica
gataaaaataaaaaataatgattaataccattaatttaactggagttaagtgccaaaacgtttttaacaacctaatatatatatatatatatatatatatgataaaaaaaagttctatctaataaattaacccaacattttaatatgtaaagctaaaatcaaagtaggtatatagaaactattttagtatttgctactattatatatataaatataaagaatattattagaatattgacttatatatgtctacatgcacataaatttatggaacaagtgtctataataaatatatgtatatatggatattacaatacctggagtcggcaaataaggtcgctactaggcttcaccttgtggcgatttgcgtagaaattgagacgagcctctccgatttgagctcgttcttcaggactacctgcctttggatcaaactcaaatgtttgtctccctaagaaattgttggtactaaacaagtatgcctctcctgctccacttccatacttgatcttccacatatccaagctactcctacgttgattcaaattaacctgtacgtaatattattgtaataaataaagcttcaacactacgtaacaccttatacatatattatatacacatatatttatatatcaagaatatatatatattttatacactatgacaatacttaattaacttaatcttattcttcacctatatatatagatacatattctcaaatattgtcaagggaaaaatatataaaagaagagaggaacttaattaccgaaagagctagatcaaagaggtcggaagaaacttagaattatatgtataggagagaaagtttagaatatatatcgagtaagtggtggcggtcaacacctacttaattattgtctccactagtttcatggtaatttcaactatatgatcctatatgcattgactagatatatattgctcagttcatttgattttaattccaatatttttttgagaactgtattacttaattagtaatatgtgtatactcgtagaaaatagagactttgaaaagtattatatataatatatgtaaatgtgtcactcattttatatatatttattaatattatttttcaacaaatatatttatcatattttgattggagatattactctaattctctcgaatagatgtatcaattttttggtgtacgcgttatacgcttgtcccagagattaataagtctattttaattgtaattaagactggtatacatgaggccaaaaatagttaggtgtgtgtaattagaaaattcttagaagatgaatcattttctaatagtagaagttatacagtatattgaaaattataagagtttattttttttttatggtataaataaataacattataagattataggtaagggcggatgcacattaaaacttatggtggcaatggtccttagctttgtacaagtgaaatataagtcttatatagtgataattaatattaaataaagaaaactaagttaaaaagtcaatgaaagtatagtaaaattaataggaataaattaatttaattgctaactgtgcatttcaaaaagataaaaataatattttaatatatataataaaatattaattacatttcaaaaagacaatatatatatatataatattagttaaatgaatgtgtataagtgtggttttatataaattaatacaataaattaaagatacttcaaaatatgtatgattcatatacatttatctcgacttataatatttataaaattttaaattaaatttaggagaataatatattggatcaccaataaatataattaacaccatctagaaataaaaatagggaaatttgattttatatacttaaaacattaaaaaaaaattaatattaaactaaaaacttaaaccctaaaaaaactattcttttttttcaaaaccccaaaa

SEQ ID NO: 239091 - DNA, 2086 bp, Cannabis indica
atcaaaggatcaacataatttgtctgtcccagagaattgaaatcagtgtttctgtgatagatctggttctttaagtccaaactctgatccaaaggaccaccagcaccaccattaacaggcatcaaagaattcattgagctagacataatatttggtctgtaagaaggatcatgcttatggttatcccagctcggaattaaggcaccgttgttcattgcagaagtttggcactgtgcatctgtaagcgagtcatgggatcgaatcgagactgatggaaaggatgaaacatcaaattggctgcctccaatttgtggggccataataggcatattgttgtccctcgagataccaggatgcattgtagcctgtttgtaacgatcattcaatggaaaagatgtcgattggaacccagatgtctgagcagagcttgaccagtcagtagtacatctaccaggatctggcaaagggggacaaaattctgattttaaagaggttaatgaaacagaggattgattcccgaattctcttccaccttggggatcatgagagtgtcctaacatcatcatgttgtttgcaacaccaagagcattgctagaattattactagtagttagttttgcatccgaaaggggaaacaatgtcgaatcatcaagaccagtggaaagatctccaatgtgaggaacacccttaatgtgctgttgattgatttcaaatggcatgggcattccatgaagtacattcccgtcatggttcccagcaggaagggtcgactgatgaaacttcatttgatcatgggagctgtttggattttgagtatggctgagttgaaccatacccgaagatggaagaccacgcagacccatagcagatggagtgttcaatctaccaacaatcccacctggtgggaaggatctaaaagcgggattttgaaactgcattgatccatttaaagcattaaagtttccaagtccattcattgaacccatgcgcagataggaagaatctgaactgcgtaaggctgcttccatattagcgtgttggtttgcatggcaactgattcttttgaggtaaagcctgtatttctgaaattcaaacaaagcaaatataacagtaagcttcttaaaataggtagaaaacatatcatagtgaagtaaagaaagacacaacaggcatctgtacctgaagatggctagcaacattttctcttgtaagcttatcaacattcatcagatcaagaatctttttaggtacagcctctgcattggaaaacaaattaacatttgaataggacaatatgaacattgataaagaatgaagatcacttactgtctatgccaagatgattaacagctgtgacaaattttcgatgcagctctacagaccaaacaactcgaggcttcttttgtgctgatgggtcatcgctgtctccattatcgtcattctcatcttcatcatcatcaaactgatccttacgtttcttattgattttctgatctgaatttcctgtccctccacacccagattctccttctacattagatttgtcctgatttgaacaattcctttggctctttgtatctttctttttcctccttattacatgttgccagatatttttcagctcctcgattcgaacaggtttaagtaaataatcacaagctccatgagtgattcctttcatcacaagtttaggatccccatttccagacagcactaagagaaaaacatatataacattttagaaatcaaacataaacttcaaaaatgatttctcatgctagaaacaaatcagatgtcaaattttctttgagattcaaaaactataatacagaattctttaaggggtttttcagaattagctagctataaaagaaaagtttcattcaaacatggaaaacaaaaaaaaagtattgtttcattgaaaactgacaaaaagataacttaaagtaataatgatgatcatgtaataatgaatattttgtggcttactaatgacagggaggtccatctccaaccccacaagctcaagtaacttaaatccatccatgtctggcatttgcacatcactgataaccaggtcaaagtt

SEQ ID NO: 239092 - DNA, 2384 bp, Cannabis indica
tttcttcaaacttatggagagcagttttatccttttgtcattggagcagccatcaatgttcaaaatgctttgctcaaagctaagttggagagcatggtgaaggtagtagttccttgtagctttgacgctttcctttcagaatccgagctcccttcaaaagggcattttcgagctgacattaacaaaaccatgattcatttgctcacatttctaaccaagcatagctctcccttctttgttaccatctcaccattcttaagtctccaccaaaacaaaaacatttctctcaactttgctctattcaaagacactgcaaaatctcgtaataacagccaccgagcatacaaaaacagctttgatttgagctatgatactctggttacggctttgtcaagtgtaggattctccagaatcggtattgttgtggcacagatcggttggccaacagatggagcagccaatgctacctcggccaatgcagaaacctttacaagaggcttgatggagcaccttcacagcaaattggggaccccattgagacctaaagatccaccgattgatacatacatacttagtctcttagatgaggatcaaagaagtatagctgctggaagctttgagagacactggggtctcttcacttttgatgggcaagccaagtatcaatttgatttcggccaaggctcaaaaaaccttgtgaacgcacaaaatgttgagtaccttccaccaaaatggtgtgtggtgaacaacaacaaggacttatctaatgcaagcgcgagtgcattgcaggcttgttcttctgctgattgtactgcattgtctcctggaggatcttgttccaatatcacttggccggggaacatatcatacgcgtttaacagttactaccaacagcatgatcaaagtgcagctagctgtgactttggtgggttaggattaattacaaccatggatccttctgtgggtaagtgtagatttcctgtcgaattatggacatctcattctcattcttttcagagggcatctgttcttaggactacaatcttgctagtggcagccattttggtaacgtgaaacattttagcatagaaaattgattagtatataagggcattttcttagttcaaggcccattcttgcaagggagtatctaagttttgtgaagcgaggattaaatattcatgatatctcccatttgaagcaacttttgaaatgacaaaaggagttttggtgatgaaacatcatttcatgtagtgtatatgaatttatgtatgtatccccttgaattggttagtatcgttttttatgattgtaattctttctttatattaaattgttttggattttactatgaaatttacagcctaatttctctctcaccatcttcttggagtaaaatcacaccatcttctaaactttcattaaagtagaaaatatccatagctagaaatgtgtacatatgacacttacataatgttttggatcaattctcactaactttcgttatttttaacttcaccctctcataaaaatgttgattattagttttggtttgagcttgtcgattaggctgaggtcatgatggtcgtacgtagcttgggaaagtagagtgttgttacttgttaagcattgataaacagacacaaggaatgggagatgggactcggaaatggtcaatgtcatcatgtattgtcttggagagatgggttggtaatttatttgtaagggaaatttgattttttatgcatgattttaagggttaattagttaggaaagcttaaactataggtaattgttagaataggctcactttatttaaatcccaaaactaccccgctcaaaattccacacccattctctctgttcgcccaacctaaatccagtcgtcccaaccccatatcgccccaacctagccatcccaaccccgatcgaaaccccaaatcgtcccaaacgtcagccacactcacacggaggagacccaccggcccacgacgctccctcactgacccacggcacaccaccaccgacccacgatacccacgacgcaccaccaccgaagcaccaccaccgtattttatttttttattgattttgtttgtgattttagtgttaaagatagattttgttagattgagggataggtctgatggggtctgatagggtcgaatgaaactgtgagtttgcgaggtagaagacattgatccgatgaggggtccgatgggtccgattgtgtctgatgtggggtccgattgtgtaaatgagggtgatgtaaatgagatatattttaggaatattataaaagttgtcatatcttacaaatattaattattagggttatttgcggcaaaaccccctaaagtaggcaggtttttgcaactaacccc

SEQ ID NO: 239093 - DNA, 2184 bp, Cannabis indica
ttttagaaagttcatattaagggtgttaatcaacatacttgaaaataatttccaacagaagcccaccaagccttttgggacgcgaaaggcacgaagccttctaggtgtgctagaggacacatggaagccaaccgaagaataaaagctggatgtttcccctaacatgtttgcttctctaacacaggactaatcttgtctcctatggcaaaccatggtagtgcacgacctcctctacatgcgttctttttttatggctcatctgacgactttgtctaccaagggtgacttccacatgacacttgccctgcaccaaacgtggtcctagatgtacggaaccatcatccaacaaaaggaaatctcttattgggtagaaaagtcatgtatattgtgcattttccctcaatagtggacttgcttttgcataaaacctaaatgggtcatgggatgcctagatctgaactctagcctttataaagtccatcacaccttcatggaaaggggtgaagaaaaacctagccgcaaactctgctacattattctctaagctatcttctttctcaagagaaacccaaagatatttccttatagactgagttaggtttttcactataaaacttatttgtaatacactttcaagtctaaaaggctaatatacacacacttgttcactagggatttttaatacccgaaccacataaaaatcttcatgtcattcatttaatttcttatttaactttttaagctctcacctaattttatttttgaaaatctcgataaacatttttgtgctttcattgagagttgtagaaagaatctaagttgcctatcatctttaactatggtggctacaaggaaaactattgtcgaaaaacctctccctactggctaggactttgccatggatgacattaatccaccccctccaaaacatgattagccaagcctggtgagtgatggagaagtgtctgaaactaatggccggatgcctgaaacgaacacacgagaagagaagtttgttgagaaaaaccttgaagaagaggaagatggagaagacgatgatgaagaaaattataggtttaaatcaaagacagaaactataaggatgtatagtattatgagaaggatctaggtctgctctgagtgtccagtgagttacttgcaacttagcaaaagttagcacaacaagaaaatttctctcaaacgataaggaaaatgatggctcgcctccggtctaaactcattgacctagacaaagactttgaggaagatgccttgaaaggacctgtcgatggagaaaacagagcaaaccccgccaacgttggaacctcagctcttacaaaagataaggggaagccaaaggtgggcgagcctcagactaaaaccaccatgttttctcttcagaaaaatgtgaacacaaccgaccagcccttacggacagagaaagaaaccaatacctcttggctttgacgcccttttgctccacaatgcaaggttgcgccacacaaaagccctaatatgaaagtaccaaagcctaaagaaagagaaaaccaccctagttatgccattaaccaggacgatggggtggaggaaattctttctgaagatagttggtccacggtagaccttcagaggagtctcgatgtcaaatatgagaggccaaaggagaaaaggaaaaaccccaggagaatgactttaggaaccatttaaatgataaggtttgcggatgcgaccttctagatagtgacaccaaaagattggaacaacaaattgctgctcttaccaagtgggtcaagaagaagagtagtgccctcttggattcgaaagatgaagatccggagccatgcgtcagacggatcatagaagccccactacctgacaacttcaaaatgccatagatagagttgtatgatggctggatagagcccaggatgcacctattcaaatacaactagatgatgcaagtggaaaaagtaagtgacgatgtcaaatgcctttgtttttcactaacactaaccatgtccatggaagacaagtggaagagatttcccccaaatcggttcatggatggaaagagttgcagtcagccttccaaaaatagttgatagttgtcagagactatgatatggaggtcggatctctgaccaacctcaaacaacaacctggtgaaatcctgaagaacttcat

SEQ ID NO: 239094 - DNA, 4408 bp, Cannabis indica
gacattttctagtatgctggcataaagatcaaatttggcaaaagaaaatatcctaagatcaattgataaaccattacatgtaagtggatacggggttttcagagcagacaagcctgcttgtaaatatatatttagcaaaggctcaagagtcatgccatataatttacagaactcctgtttgaattggtccacaaggtaatcccattgctttggttcaaataaaacctggaggacatgaaaatcagcttgcagaatggaacaaaaatacagttaaaaaagtaacttacagatcaaagattcatctatgcacccaagtcattgtacattactagttatataaattaagttgagcttctgtaacaagatttttttaaaatgctaaatagcctgtaagataatacacaatcaatttacaagagtctaactaataccaaacaaactactataacaagcaacaacatgaatcaagacaaatcctcctaagatttaaaaaaaaaacctcttacacatctatattgtaatttggaattgaacttgactatcatttaacaccagtggtgcaaacaaggttgcccatttaattttaagggccttttagaggggcaagggaagggaaggaaataagttttttgaaaggaacaaaaaacaaatgtttctatgttcttccatctgtccaccaaaatcaagtagagaagttcacttggaaagaaaactaatgctgctaaataaccaacaaacaaacaaacaaaaaagcagccaactatttgaactaaagagtaaaaaacatattttagaccaagcaaaaaggtcaccttgtatgtagaacattcagtagtactcttatatgctagtgtgacaaatacccgctgcaattctttcatatgggaagatccccatggtgcaaggtacttccgagcatatgtaatagctcgaaggttattttcagctcgtaccaactctataaattcttgaagtctcaactgaaattcgaatttgctctgctattaaagaagtcaatacacgtacttggcattagaaaagcagtacaatttattcgtgacactagcccaaatcttattcggttaagctaggaattctattttggtttaattttagataaggaaccagtttatagtttcataattaaatgtttattaagaaacctttaccagcagtaaattccaagagtttcattttatctggtacaacaacagaacatattatttagaatgattcacattgttacgtatttaaatacttcagttttgaattatttgcaccttaaaatctcacttctactccaaaagttatgaacattagggatgcaacagcacatatagcttgttgaaaaggtaaaaatggaatataagcatataactactaatcattgtggagttctggaatatcatattatagaaagaatgaaacattagcttaaagagttactatgtctgttgtttctgctatgataaaacactcatacaacaacacaaaatactagaacatataaatatctaactctaaaaaataatgcttaacatagagcatagcgagtaaagattgacaatgcctaaagcagataattatataatgttactcaatccttttcatcttgctacaccagctatatttggagtacttggcagaaataaaattttcaagctcaaacaagtatttaatctgatgtaatgtaatattttcgtatatgcataacctctgcctatatacatgttgtttaaaattatttgcaccataatatctcacaattttgaagtatactcacacaaaacacatatatagctttcttaaaagtaacacaaactatgcgaataatagtgatcatctaggtttttattttttaataatcagatgaaagaaataaagaataagccatatttagcttaatgagttagaaagtctctccgtggggaagcacacaaaaacaactcaggatatttccagcaaaccatacccctttcccattacccgatccttttcatctgatctgactagttgctacatcagctatattaagtagtttggaagaaattaaattgtcctcactggagcatgtggttaatttgatgtaatgcaggatgtatgtatattagctccgtcacacttgcagaaaagccatgggaaagtgtatataccttaaacttcttcaaccttgacttgttttccgcacaccacactagtgcaggagttacctctttattttgaagagcatcaataaccttctttgcttcttggaatacttcaatatcaaccagatcctaacacatgaattgttatcaaagtactcaaaatgatgaaaagttaacaaaaacagtatttttctattcataaaaaacttcacatatatgaaagttccatgactatcccactgcattcaaagttaattcgtcatgcaaagaaaaaggtgacagccaaaccaaaatgctgagcactttcaactttgttttgatttaatagcataggagtttgagtgaaacatggaatgtgtgtttagaatttggatgaagaactgacaacaaacttttcaaagacctccaaacaaaccatgaatagagatcattgaatacatctgtggtaaacaagtagtacctgcatattgctgctttctgccaacttcaatgcagtgtcatagtatgacatacgcaacatgtagtccacaagaatgcgcttcaccttcatgttgttccattcaaacatattctcagcatccgccaactctaaatgattgagtcgagctcggcacctctgtgcctgtaaatgttccactcgactcccctcttccaactagaggtgaaaacgtaaatccaatattatttttctttccataaagaagcaaaattcaattgcaaataaacacctacaacaatttccagtttcaaatttcttgaagctaaacacaactactcttcattagttctccaattagatcagatcgacaaagtataataatttgatcattctcgaactcacccaatccatcatcttttttataaacagacagaaaactcttacctttaaactaatttattttacctaactgaaaattctcattttcttggccattaactaaatctaaatccaaacaagatgatgaagatgatcagactacaatcaaattcaaacctaagacttctagcttccattaccttccgtttaagcccttgcagtcttgacacaagcgagctcagatgactgacagcctcgtcacgcgacatgtcgtttcggtcagcggcttcagcgacaccggagatgacggcggatacctctttctcgaagacgcggtggttggttcgaattgttttcttgtagtgctcgaatggaactctgagaaattggtgctccaacttcacggaatcggcaaaatgattgagcttcgaggacggaggagctgaggcggtgggatcaggtgctgaatttggatttgaaacggcgctgttaccattgggtagggaatccatttccatgtataattgaaagtagagagagagtaagagaagaagagaacaaggaaattggtgatttgattgggaaaacgttttccggccaaactggaagacccaactccgaaagggatagagtagcaagtaaggaaatgtgataaaacgtcgacgtatctggttttgggacttgtttggtagcgtgattctacaaatccctaatccttggtaaggattaaacctattgacttaaaattgaaaacaatatggggtgtttaaggttatgttttagtaggaatagtaatattttacatttccatgtttggtattggattttttttttaattttatgaataggaatattattactatgaaaataagattaactttttatgggataattttaaatactttcgaaaagctgggttctaaacattaccttcaatcttaatatcatggattaaatagggtgtttttacaatgcatctctttaaccattcacatgtttcggtatctagaaaaaaaatttaatccaatttttattttttttatattcgtgtatgctatagttatttaaaatatcctacaaaattttgacaaattcagaataatttacaatataaagcagtgttcaagcaatttatttcacgcgcgtataaaataaaatagtcacgtgtgcaacacactgtttgaaccctattttcggtgtgttaaataattctaaatttcttaaaactttgtaagatgtcttaaaaaattataatatacatgaccatgaaaaaaaattgactaaagatcattttgaatacaaaaaaagagaggagtgcattcgtatatcccttttaataaggtacactgtagaatttttagattaaatatattaatatttttacataactttttacaaaaaattatcatattcatgtgtttaataaacaatttaactaaattaa

SEQ ID NO: 239095 - DNA, 2890 bp, Cannabis indica
tgtgggtatttttatatatatatatattaattttaattattattttgtttagtttattcgtttgttttgcatacagtctaatctaatgtctgtttcttcatatggaatttcaaaataatacttttagacaaattaattagtagatcttcttaaagtttcatgaccatgagatttcatacatatctgaatatcagaatatgcatcctagtcccccataaaacgggtcactttatttgggaccaaaaattaattatagttaattatccaaacatttgttttaaacaagttgtaagaatataaagagattggtgatttgaaactgttggctaacacgctatattaaaaaaccatatgtttagttttaaatttaaatgcaagggtaaaaattctctcttttgtttctctatttcagtgtagctatgaccatggtagggagggggcggccaatgaagaaaaagaaggtggtaggcaagaatcgaagcccgatagtggaaaagaataaggggtccgaactctggagattcagcgaggaaggttaaaatgatggatgaaagtttaagtgtggagacaataaatttctcggatgaagaagaaccaccgattgagagcctatactatgcagatatggaatcgaagatgctttcaaatgaagagagcgaaacacagctaattcttcgagagaaaattcaaaaagagttttccatgttgctttctcgtcgggatacaccaacaggagttcaaacacctcaagttgtgcgaaaggagttgggtgagtctcctaaactagattctgatatagtttataaaaattctcagttgaaaatttgtgtgaaaattgttgaatatatatgacatatgtaaagaaattatgttttggaactcctctattgtgtgttgggtgatggggcgaatcctcctcctcagatcatggatggttttttaggatttttagaatgtgtttggcaggataaagttgggatcattcaaaagggagtgttcattgtatgttttaccacaatggaaaatcaggataaggtgctttcaaaggggttaaagcttagaatccagatgaaagggacactaagggagatgttcagacaattccgatttggattctgcttaataaccttgaattcaaatagtggggctctatccaaaatttttgaattgttagggacgtttatgacagtggatgcgacaactcaaaattgagatcagcttaaatttgctcgtgtggtggtggaagttaacctatcacaagagtttccaaatatgattgaatttgaaaatgagaaaggggagatggtccaagtcgaggtggactaggcctggaagccaaccatttgtgctatctatgagacatgatgttgaagtttgcaaaaagagtaaaaagtcgcagggtatttgagtggaaaataattttgctccttccaatactatgatgaatggaatctcttctcaggctaatgagattgttcctaatggtcaaaataggggtgaacaccttattatagatgctaatagttttaaagttttaaaggaaataagggaggataaagtgactattggtcagaatttatacgatttgagtgctgaaaagaagggagggggaaggcctccgaatgctaatggatatattgttatgttggaatgtaaggggttttaataagttgcataagcaacaagaggtcaaaaggctttcgatgaataaaaagatcagtgtagtttatttgttggagacaaaggttaaggtggataagatgggagagttgtatcataatcttggtatcccgaagggaagattgttcttgcttggaatcctaactcatttgatgtcaacctcttggattattctgcacaatttatacattgtcagattagtccaaagaggggtagtggtttcttcattaattttctttaaccttctaattataagcatgaaaagaaaattttgtgggggcaaattggtatgtttcagaagtgtgttactagcccttggatggtgttaggtgattttaatgcgacttgacattcttggaagagactctctaaaaaagatcattctcatggttgtgtggatttaaaagattgtatagaagcttgtgactttgcacatgtaaaactcttagctcaattttttactaggagtaacaaacaggatgagtccacaagactgtatgctaagctagataaagtgcttgctaattcagtgtggttgaattattttgaaaatgcaaaagttgtatttttctcagaaggcaatttcaatcattgccctacccttatttcggtataccatgtaattgaaaatgaaaagaagtcttttcgatattttcaaatgtggaagaactctctaggttatgatgatgtcgcgactcttaattagaacaagcctatggttaaaactctaatgtttgtagttactatgaagttgaaacaattgaagcatgtctttaaagacattaataaggggcttttggtgatgttcatgctcgggaacatcaggcacttaatagaatgaaagactgtaaggaaaagatgcataaaaaaaactaatgaagggctctttaattaaagaagaaaatgatgctagggaggtctataacagatgttgattagatctcttttctttcctttagcagaaatctaaatttttttggcttaaggatagagatgagaatattagaatttttcaccaaagttttaagcaatgaagaacgtaaaatacagtctattcaattcaagatgagaatggtatatgggtagatttgattcatgttgtgaatggtgctttttttagaaaaagtattatatgtctcttctaggctcgaagatgggaaatcagaagaaagtggtgcaaagtgtggttaatatttcatgccctgctgtt

SEQ ID NO: 239096 - DNA, 3109 bp, Cannabis indica
agatatatagatatatagattatacatatcctagatatatggacattagacctaaaatattatttataaataataataatgagaaaattaaagtaattgacctcctgctaattttcaacactactgttctcgacgacatggaaatcatcttattaatttattttggaaaagggatgagatcatcttataaataaggacaattaatgaatggttcatgcatgcaaattaatttgtgactattgaaattctgaaggaacaaatatagtcgttctacttctagataccaataccaatattacaaatattaagtaaaaattaattgttacccttggaaatgtcataattatgatattcattggtcgttgaaacttgaaagtagacacttcgacttctagaaaagaattgatcaatctctttatataaattcagtccaatattccatctactctaactaacaaaacaaaacaaaacactcttcaaatcacagtcatggttacaactggtacgtacttacgctttactataccatagttaagattaacaattttccataaatatttcatctttaattatatttgacttgtgctatattgtttggcagatactagaaatcttccaccagctcactatttgatgaaacttgaatcctacagtttattatcagacacaaaagaaaatttcgatagttcttcttttgaggttggaggctacaaatggtaacgaattagtaacctttcttcaattttaattaaatgattttatttttaattaattataatactatttgttcgtgtcttatgcataggaaattatcattttatccaaatggggacaaaaggtctaatactaacaacaactacatatctttgtacttgacaatttgtaatactgatattcttcccattggttgggaagttaatgccaacttcacattatttatctataatcatacatacgacaattatttgactttccaaggtacatgatgagtggatattaataatatatacatatatattttctgtatttgtttaatattctttttatattaactaatgtatgtgtgatatttgtgtaattaatgaagttgtgaagcgttttcatgagatgaaaaaagaatggggtttcgatcaaatggtatcacttaatactttcaaaaatgtatctaatgggtatctcttcaacgacacatgtgcatttggtgttgaagtttttgtcataaatcacactctcaactctgaatcactttctgtatttggacgcaaaggtataaaaaatcctattttccattgggagattaaggggctctctaagattaagatggacgattcttattacgtttcagaggttttcaaatctggaggaacaaattggtatgctattagtttatgttatctaatatttttactctcaactcacttattaattgttatatatatatttcttctttgttctaggaagttaattatctatcccaaaggttgtcaaagcagagatggcaaaacattgaaaatgtttttaaagttatcagctgattccaataatccagataactccacaatttatgctaaatactgtcttcgtgtaattgatcaaatcaattctaaacactatgaagtctcaggtcatgattaccaataattattaagcttctaattattatataatgctgattttctttaaatctcatgctgttttacttttcatattcttcagaacttgataaatggtttaatagtttccaaggatatggttccgaatttatgtcacttgaagatcttcacaaatcttccaacggctatattctgaaggatactctaattgtggaagttgagttcttcgtcatgtctcgatccaagttttctgtcaaatctatggagaattgaacccaaccaattgagataatggcttatttttatttatatatatcgtaagtcgttttattattattattatttcataaaacatttgtcatttaattagtaatctccagttgaaattttctattctccctacaataatatcaatcaattacatctagttataattttatatccagacaaaaagaaagaaattaatcttatattttaattatgaaaccataatagttttcatcacgatcgagtactattgctgtgctgctcactactactatgaaatgtatttattatatgtttgtttggaaaacatgaatacattacgtttgaactataatatgtttaacaaacttgtagaccccatttttgacatgaaaattaaaattttcatctaaattcatttatattttatatcattttcaagttgtgatgtattatgtcacaaaattgtcagtcctatttacaaatgatattttcttttttgacaaaagattagtataataattgataacaattgttaagtaatatcaaaaaatatatattatatttccatgtaaattcattttcggtacaaagtacaaacttaataataataggagcttttttatttttacacttcaaaagaatttttttatttcatttttacggaattctatatagaaacatctattgcaattagtgctgcaacttaaatcgcaacaaaatttttttatagaaacccttgcaactggaattgcaaccactttagaaatccaaaccgtaaatttgaaaaaaaaaaaaaaacgtttaaaaaccggtataatgagataattccccgtaataatgataaaagaaagacatccttaatatggttttttaaacttgctcatactcatactaaatttgctctttctttaaaaattgtgagagtatggtggccgaggctatcgtattttgtttgagtttttagactattgccttaatgatataattcattctagttaaaaaaaaatagagttattaatagagaaggcatcactataattataagaagagcagagtgatttagaatgaatttatcattaaaaggcaaatagacctaaaaactaatgtcacaaggactcccataaaattggataaacttggtcactacacttactcctaagccttatcaaaagataaactaagttaggaataatattgtggagcattagaatttacaataaatattttggcacgatcacaaatagcat

SEQ ID NO: 239097 - DNA, 3730 bp, Cannabis indica
gagcgagtcaccacttgataatcctccacatcaatagtctctcagcttaaagccactcatccaactcacagcttcaaaacccttctcacaatcaaacctctccaccaaccagaaccttcttttgtgcaagacccacgacgatctttcccgcttcgtagacatggctgacccaaataccactctctcttccctcaacctctctcacggttcgatcgtttttcttgcctacgatggcgagagaactgttcccggaccggctgttaacccagctgggtcttttggccggaagatgaccatggatgatctcatcgcaaagcagatgagggtctcgcgccaggagaatccgcattgtgaattggtctcgttcgatcgcgattgtgctaacgcgttccagcattacgtgaatgatgctcttgcttttgcggttaagcgtggtgggtttatgtacggcactgtttcggaggaggggaaagtggaggtggatttcatatatgagccgcctcagcaaggaactgaggagaatttgttgcttttcagagacccagatgaggaaaagatagtggaagcaattgctgttggtctgggtatgacaagggttggatttatcttcactcaaaccatcagtcaggataaaaaggactatactttatcgaatagggaggttcttcaggctgctgagtttcacgccgaaagtggcttgaaggaatgggtgactgctgtggtgaagcttgaagtgaacgaggatggcgctgctgatgtgcactttgaggcttttcagatgagtgatgtgtgcattaggttgttcaaggaagagtggtttgagactgagtttggagaagatgctgatcccaagctctcaaagatgaagaaagatgttgttgttggggtcaaggacactaaagaggtggacaatgatttcttcttggtggttgtcaagatagctgatcaccaggtatgtttaacttgttttctctttattcttttcatacttgcatagttgggatttatatttatgagtgttcttgtcttggtgttgtattccttcaaatgttttgctattgttcctttattgattatgagattaaagcgtagtctgtttaggaagtgatttgtagaaacctgcaaatgtatgaaatttagattaaccttaggattcaaaactctggttgcatatttctctctttgaatttctagagatgtagccataaggagtagtggtgatgacccactattgctatagaatcccagttggaaaggattgaattaattgaaaaaatgagagaaacttagtccacatataggtggtgcctaaatggttaatctttgttatggacactaatattattgacattgtgtcgttgcgtggggttcagggtattttacggtaaggggaacaatttttcacttaaataaaaaaactaggacctccgcttagtcctacaatatttggggatcagaacactataacaattgctatataggtactcagaaggactcaaaccttagattttgtcagaacaaagtacatacttgaccattttagcaattttagacctcctattgtatgaacaaatccacttattcatttgctatctaatttgtccaattcctccattggatgatgactgtcagctcactagatcatagtaggattaatcctatgttttatctcattattctctagaaattctgacatcttgcgtcgttctagtttcaggtccagtgattaagcataacattgaattacttgatttctatttggtttgtattgtgatggagtaccggtatggattcagtcttactaaatatgtttattatattagttattaaaaccttaatggatgctgtttatttttaaaaagagtttactttgtgatctaacttaagaaaagactctgcactcgctgttttatcaataaaatccccttcatcatctgatagaaaaccaccctttgttcatgagtggatgccatacttgctggaactttgtctctggcttttggcttctgccttgatatgatagaaattttcctttgctcatgggagaaattggtttcagttatcttaaacaccacctgacatttgcaaccaagccactcacatggctctgttaatagcatgatgtgttttgtgaattaccaatctttttttgaaagaaaagatttgttaacattaactttctttatggttgttttgtttaccatattttacatgtatagaaattggaagagaatttgtttttttttttttcttctttaacttttgtgcctatattgcaaaataatagtactctcttgctcacatgatctcgaatgaattacagggccccctttcatcaacctttcccattgagaaccggaataacccagtaacaatgagggcactgaaaaatcatcttgatcgagcaaagaatcttccattcgttaagcggatttcagattttcatttgctgctattgctgggaagatacttagacctcaacgctgatgttcctgctctggcagagtgtgtgcacacagagagccccgttcccgaaggctacaagctactaattgaatccttggcaagtgcttctgcttaattgctacactctgggaagcccttttggaaaatgatttcataaatatctatgtgcttgatctcattacctcatttgaagaagtaatatgttgccttatgatgttgttcatcatcacccaaaagatggatttgaaagttattagatgcctttgtcatcacccatcgtgttacatcagttcatctggatatttattttaccataaccatagctgatatatatatacagtttgttattttaagcattttttattttaggattgttgcttatgttttgattattatagaatataaataaatagtttaacaacaattacaattttttccaatttgatttatctttgcctgtaatactaagcaactatctcccctgtggatcctatttcctccaaagaaaaaaaaaacactaggtggcttggttggaggaataaatcgaatggaatatttttattttattttttttatttggttgcatatttaagtattgatatttttattattttggtagaataaattatttcatattgaaatggaaagatagaaaaaaaaagactattccaattaagattagaaaaaatttaataatttttgtatgtattttaaatttgatctatatttattaatcatgagattaataaatataatttatttgtttagttctttatataaataaaagaagtaaacgatgtattgacaattaaatatatatttacatatatgaaagagattttaatagttacatcaaatatgtaatcgtgatagttacatttatttttagctatttgagtattattgaatggttacatgtatttttagccatttgttatatgaagaagagatgttttgaaagtacagatctaggattcattggcttaaggatggggataagaataccaaatattttcataataaaacttctactacgaacaaaaataatttaattagctccatcaccctggataatagttctactatccataatttgcaggatatttgtgataatgttgttggtttttactcaagtcttttctcttctcagaatgttgatgtcgattgtgttaatgttagtctctcgggtatttctaagagtgttagtgatcaacatttctatttttcaactagccgtttgattaaccgaagtcaagcgagcttt

SEQ ID NO: 239098 - DNA, 2279 bp, Cannabis indica
tagtacaaaagaacccaaattaatccttcagtgtagtgtcttacctaaaatatattcaaattaaactgattaataatacatgtattatcatatgttatattaagtaacatatgatacttactacatttatccttgtaatttcaatctcatctgcattatatgcacaaaacttttctctataatatctctctttataaccaggacaaacaagtttcacctgtaacagaaacaagtaaaccagttttattaaatcattctccaaagaatgtacaaaacaagaaattgaactttcagatatggaggaagcatgtactttgtcaatcagagaatcaacgttgttaaacaagttggatttcctacaaaggttatctttcactgtttgcttgaattcctttgtgttcttaattaacatctgcataccaatgaaaaatatatataaatatgatatatagaaaatactctctttaataagaaatgaaagttaattacttacttcagaatagtcacaagatttagtttccaatgacacaattgcagaagcattacaggaatcatagttcacatgttgtgaggaaacttgtttaagcttttgctcccatagttcagatcttctcttgaaaatcttctcttcatatgtaccaaccaagagaatgaacttctcaactctagatagtttgataaactctgcttccttatcctccacctgattttatacatgtaaagtagtagtgaatagtgatcatttgttataaatttattgcttaaaaaatacaagtaattgcattgaggttggaattttaattaccttgaccatatcaacaagatagccaccaatatttttcaactctttcttataaacatccattaacaaatcaatggctccctggtacaagtaaaaattgtataaaacaaccatgaataacataccacatcttaattagagcaaaagggttgattgagcatataatgctaacctcaggaagtttcaaggagggtgtgcgaggaagaaaatcatttccaacaaagaaacacatgaagataaagtcatctactattcgctcaatatcgaacttaaagctctcgggaggatcagaaatttgcatgtcaagctccaaatactctctcaatatccaaacatgcagaaactgaagaaacagattaacaaaatgaatgagatataagtcataatatagctgaaatactatttaacaagtaaataaaaaggattacctcataatgcttcaatttaacagtggagtagccatgtttttttcttctgagtttgatacatttggaaaccatcttctacatggaagtgaagatgaagttgctgctggtgtaagttggcttgtatcaggatatggtttatagctcaaattgctctgctgctcttcaacatacacaacctataaagatgagaaaaatattaaaccaaacatgcatgcatcttcacgttagaacctttactgtacatttcttattaataacaacttgtaacgagtaactttttgttgcgattaaaaatttgtcactaaaagtctgctttttctttgtagtgaatacatttgcataatgcaaagatcaacaaaagcacagcttagctagttatcatactaaactattatatcttacacgtactaattccattccaaaacaatgaacattactcctaacaagaacagataagttttcccagatatttcaaatttgaattaaacctctctcaataatgaaaaatgaacttcatgtgcagccaatgccagcataatgagatcagcatcctgcataacatcatggtaaatgtaaagagaaaacaagaacatatataacataacatgagattataatcattaattttataccaatccgtataagcagtgacgagtgttgggattgtaagaaggaagtttacgctgttgccttatgaaagacatgattttgtgctctccttccccaggaacattagaatcagaaagaatcacctaatgaaaaatgacagttcaagtttatcatttctgttctttttcaacttaggagactattatatattaagatgtgatcatagttatatataccttaatgttcctccaccccaaatcattacttaaacgtaacttaatatagtttttaagtgcatttgacatgtcttgcatgaactttgttccaggtgtgattatgttgggatcagataattcagtttcctgctttggaagtacttcttttccatccatttcaaattgtctcttgactctaagttcttcttcttcctacaatgttaa

SEQ ID NO: 239099 - DNA, 2053 bp, Cannabis indica
aattccctttatactaaggtaagttggagtctcttcagtcagtttaattcttatgtttgttgaaattggtagttaggacaatatgagtatattagtaatgaatagatatacttgtgattaaggaattgaatatattagtgcaagtctgtgagcttttggcaatgcttgtatgatgcttatgaaatttacaccagaaatatgtctacatcctattctgattgactagattggtagggtttttaacttgtcagtgttaatgtgtaggacacccgacatgtctgcgatgcatcacgacacatctccagatctgaagaaggttgcaagcaagctaaaggatctcctagaggtgcattactttgcacatattactatattaataatcatatcttctctttcagtttcatttttttttgttgggtagttaggtgaggaaagactaactagttagggacagttcaacctttgagttgattactttctctgccgttgaactaaacattagggccctactaaacatcttagaatatattattttccttaattagtaccagtttatttccacgtttgatggttataataagttgtccatctctctttgtcagatatctaacacctccctcaaaacgagaaaaacaatagtggagatttgtgatattgtcgccactcgaggagctcgactatcagccgcagggatcttaggaatcctcaagaaattgggaagagacacagtaaaattgggagataaacagaagtctgtagtggcattggatggtggtttgtacgagcactacactaaattcagggtctcaatggaaaaatccctcaccgagttgttgggggaggaagtttccgcaaacattttagtggagcactctaatgatggctctggaatcggggctgctcttttggctgcatctcactcccagtacttagaggtagaagagccttaaagaagacggtaaccgaaggacaaaatgcatttcagttttgtatacttactttccccagtccaatttttacaacttcctcctaaatcattaagatctcctctcaccatcaactttgagagagatcttcttagccctttattttttctgttaatttatggtgttatggaggatacaatccacaatggacccaaacatgcaggcagagtgagcagagccgagtttaaggttttcttgcttcaacctctgtaatgcatgtttggcaccagtgtataagttcattcgctaaaagtatgcaataaagggggaatgtaaacggttttttagctgtcataatttttcttatttttaatctgggctattcttttctaggagcatgtggatccccatctacactattttgcaaaatatatattggattagttattttagttgggtaactttgttttagtgttgaatatttaataattgattattatatatatgtcatatattttcacaccatttttttttgaataaatatattttcacaccattaaaattaataaataaatagttgtagattcaatttgagcaatattatcacgcttgaaaagatattgtttttattaaaagtagatttcaattagagcctttttattttcaaattaattaaacctttaatttattgtgattaaagtcttcatttttctcaaaataataataataataaacgaggtttttttattttattttattttttttgagctcaaccttaaactaattcaccgtgaatccaatatgagtggattcgaatcacaaacttttacatcaagagatcccgacctcaagacttggaccccaactttgactggaccctaaacctaattgggatttcttgcctggacccgagaccccaacctcaaccttaactcaaacaccaactatgaccctaattctgagtttattacaataaaatctaagttcatgaatactataatacaaactagtgtaaattttctttattaattatgtatgtatttttttttgatagatgcatttttaaattatatttttaagttacagattcgatcctataacccctccacttacacacactctaatac

SEQ ID NO: 239100 - DNA, 2339 bp, Cannabis indica
tgtgtgagagagaagtatgtgtggaaaaatgtgagttgtgaaaaagagaagtgtgtgagtttattttgtggtgacaatgaggaagaagcaaagattatattgggatttggatggagagattgagatagagaacatatgtaatttttgaagtgataagtgaaatatagctctccttttaggtttggtagttttaccaaattgaataattgctttgcttcgtttctttgttatttcactccacttgaaatttattatttttctctctcccaacacttagtcaaattaccaagtgttgctccctctcccaacacttagtcaaattaccgagtgtcgctcgctcatcataagtataggtagtgatggaaagaatacgaaagggatgtacgaccaaaggcgagctcgttaaagctggcatgactccgacaatgcctgaagagagaaggttgttgtacaatgaatacaacaagtacaagcactttggagatactatttatctcactctaggtacaagctgacatctgactatttcacaacccatcaaacacgctgaccctcatggtacaaaaagaattttgtcctctaatttttaggtccacttgtattctggagatattagagctctctatagatctctctctcttccattgaagaggggttggaaaataatcatttataagggagttttagataattaatacaacactatttttctctattaatgttctatgtttctcttgagattttcattttcactctttcacatttgattttttaattaaagtttagttgacgagttttcaccgtcaacaactaattaatggtagattacaaatccaaaaaaaaaaaagtggtaagcaaaaatgtcgaaaatgttgatacaaattaaaatataaggtatattataagaaaatgtcatatctgtttatattagtgatgggtaaaaactaaaaaattagaggatttcccacttgtgtatatagtaatcatgagcttgaaagataaaattttaaataatttcttgctagaattgacttataaatgagtttggtgatatgcaagaaagacacttgtgttttaattttaattatcaatttaataatatttgttgaaatatttttttacttaaattgtagtatagtttggctccttaatatctatctccgcccctgattcccctgctagaccctatgtagcgtaggtactttaatgctcaacgattatcatttccatttagttgaatgcttgctaactataataaatgtaagttataataaaatcagggataatatatgcagtggaggtggaataacaattttttccagtgccaagaaaaacaaaattattagcaaccaaataagagttaaaaaaacgttcgcaataaacgggagaaaagaatgtagggataagtaataattaatggttgctttttttcttattgaaaataataatggttacctttattgatttggtaacattatgtgggtatatctgcttcaattaaatgctcatgttatagaaacctgtacctataaatattttgattgtacgcccaagcattgtcaggtcaccaatcgcaggccttgatgtatgtagtaacaaatgtatgtactatattcactttaaaaaacaaaatatgagacttgtttggtaattggtaatatttttatttgttttatttctaaattgtgcagatgagtaaaaatatttgttattaaaattttattattaaaaataaaaatatattcgataattatttttattttttaattttaaaatagaaaataaaaatatattttataagtttttcttctcattttttattttattttatttaagataggtctaggttttggtctggggccagggccgtggtccgtgtccgtgtctgagactggggccaagatcggagtctgggtcccaaagtccaagttggggtagtagtcaaaaataattattaagaaaaaaaaattgtttaaaaaaaattggaagtatttttttcaaattaattttttaaaattttgattgtcatttaaaaaattgaaaaagtttacttttttttttttataaaaaatatttttagaaaatattttcacttttatatttaaaaaaaaaacagaattttttttaaaaaagtgttaccaaactaaaaaaatttctatattagacaccttatttggttcagtatagaaaaaaagtttaattttttttatgatcgtattcgttaagtgtaaattttcaaaaaaattctgaataatttagtgtgtcaaaagtaaaaaatctaaccagttgcataacacgagtattagaaaaaaacatcaatatatacaatcataaaaaaa

SEQ ID NO: 239101 - DNA, 2506 bp, Cannabis indica
cattgtgatacctacgcctatcccccttccttaagctacaaggatactctcagggatcctcctgaaacttgttataaaaagagaaactttgagctttccaactcaaaccctttcgaagaaaaaccatctctggctaacacttctgttcagggtctccaagatgcggtcaaccagtttcttctccccagcctcaataacacagctttagttcattcttctacacctaccacccatccaactaccactctcacctccaatccgacatgccactctaatccaatcaccatcggtacaaacattcaaacctttacacaccctgttacatctaacaaagtcactacacaacctttattttaacccatttccactaatcctatcatgactaccactgttactactgctacttctaaaggtaatggtcctatgttccatgagcctgtcaaggccccttctttggttttttcaaccgcccgagcttctactgctactggaactaggtctggcacgaagaggactcttattaggtagaattaccaagtgggatatgtcattagaagtatgctaaaaagagcttgctcttccaactctgactttgtcgtgcttccttctatgtctgaccccgatgaataggcgggtgttgcgaggcaaccctgcccaaaaaaatgagttttatcagttggaatgctcgtggattaaggagttccaagaattccaaaatctctccctcctgatcaaacaacatcaacctcaacttctttttatgatggagatgaagctggctgctaattcttgtcatatgtttaaagttagattatcttttgattatgtgtttgaggttcctagaaatggtttaggaggcagattacttctcttttggaatgatgttgtaaatgttaatattttatctttctcggttaaccatattgactgtactgtgtccatgaactcccatacttatttctatctgtcttgtttttatggttcaccctatgttaatgataaatataactcttgggttttgttagatcgtctctttgatgctcttcccttttccccttggcttataataggcaatttcaatgattatttaggttataatgattgtaatactactagtttgcccctactcacacaatccataattttcaaaattttattggtaaatacaatatgtttcctttgcactactctagaagctgctttacttggaaacatggtagcaccttagagtgcttagattggggtattactaatcagtcttggcttgatattttccccaatatgactcttgttcacctcgccttttatggttccatcagactttgcattaacaattgtctttcctcccccatacaccctactcgaggtatccgtcaaagagaccctctctcaccttacttgtttctccttattgttgaaggcctttctcctctcatccgttctaagtcccatgacaatcattttaaaggagtaactacatgtcgctctaccatgtcgatttcccatctcttattcactgatgatagtcttctcttcacaactgtcaagaaccataattgtgaggctatcaaagctatgcttgacatatgcaataaagccattggacaatccatcaattttgccaagtcttctgtttggttctctcctaacacccaggcccaagctaaaatctctttccttcactctctccaaatggaagataagcccttcattgacaaatacgtgggtgttccttaatgttttcatcgctctgaaaaatccttgttctttttcatatttcaaagatccagcaataagctttctgtctggaaccaaaaatcattctctagagctggcaaagaggttttgctcaaagctgttatccaagccatcctttcttacgttatgtcttcctacagaattcccatttctatttgtaaacactttggaaagttgatttccaacttttggtggggatcactgggtaacaataaatgccaagttcattggaaagactagccttcgatatgcaaatctaaatttttggggggtttaggttttcgtaatattatccaccacaaccaagctatgcttgctaaacaagcttggcgtatttttaccaaccataactcccttgtggcctccctcttaaaagctaaatactttaggcatacgactttcttcatgccaatcttggacatgtcccatctttcacttggagaattcccctttggagtgggaccttctttaaaggtttaatttggaaggtgggggatgggtaaatccattcatctctcaagcccgaattggattcttggccttaaatcggtctccttcaaaaataacaatatccctcctgaagaaactgtttccttttatatcaacaatcaaagacattgggatatcaataaacttgactcttattttgacaaggacaatgttgactctattctcaaaattccaattaatccttgtattcaggactgtctctctaacaccctaactagcataggcgtattacgtgatt

SEQ ID NO: 239102 - DNA, 1660 bp, Cannabis indica
tttttatttctaacttttttttttgtatgattttaggtgaaagtgtatccttttgagggttcaaggtttgagctttatttgtttatttatttattttatttgatgagtacttgagatattgtttcctgccctttcggctagctttcacaaaatctattaatcaacattggaagaccattacaatcatgtgtgatactatgtctggaccacctaagccaggtatatacatatatatatatatgtacgatgatgataaaagttctaacttgatagattgtcattatgaaatttctttcaaatcatttagtatagaaaagttattgaaccaattttctgtaataacatagttttagataaaagcctaagaatttttcaccacttgagaaaggcattagacataatgtactgatgatttcatgaatgatatataaataatctacaggaggaggagttgaaggaaattgtcatgaggatgagaagaagacaaaacttattggatctttcaagaagaaggcaattaatgcttccaccaaatttaggaattcattaacaaagaaaggaagaaggaacagtagcaaggttatgtctgtaacctttgaggataatgactttaatcctgaggagttgcaggctgttgatgcttttcgacaagcactaatcttggaagagctattaccttcaaagcatgatgatcactacatgatgctaaggtcatcatatatatatatatatatatataatcatttctctctaattataataatctctaatccttcattcataaatatgatatggtgtagatttttgagggcaaggaaatttgatattgagaaggcaaagcaaatgtgggctgatatgctgcagtggaggaaggaatttggtgctgatacaattatggaggtatatatcctttcggactctgtagtttgtaaaaattaccttttctgttttgataaatgacaatgtggactctgtattttctaaaattgtacaaataggaccctgaactgattttttgtcaaaataaaacttaataataatctaatctagagatgttatgacaaaactagttacattttctgtatctgttcgtgttagaaatcgttttaaagttagttatattaaacaataaaattgttgaaaattgagctcagggtcctatttttactattttagaaaattcagggtttattttttcatttaacaaaatagagtgtccaattggtaacttttccaaaatacaaggtctaaatagtataaaagattgattcttaaatgccattttgattttgattttaatttcgggttttatttttgtcaaaggaatttgagtttaaggaaatagatgaagttctaacttactacccacaaggacatcatggagtggataaggaaggaagacctgtttacattgaaagacttggccaaattgattcaaacaagcttatgcaagtcacaacaatggaccgttatgtgaattaccatgtcagagaatttgaaagaacctttgttgttaaattccctgcatgttctatagcagcaaagaagcacattgatcaaagtactaccattttggatgttcaaggagtggtaaaatatttgatttaattttatgtttgatagattgtttggttaataataattactaattgacatgtgc

SEQ ID NO: 239103 - DNA, 3029 bp, Cannabis indica
tctagatacaactgagatgggggaggcagttacaatgtcagtgagcttcacgaacccctctctgcatcatcctttcgcattctagtcagagtatccaaatcaaacaattcttgagacgtagaagcctctgccaactccaatctgttttggcgtgctggagcttttcattagtttggttgttcccttctcttgttttaccaccaatgttattgtattacttcttgatgtgccttcctttcagaaattctatgagaatcaatgactctctctgttttactggcacgtgccatatctacgtcatttgcatcataagaccctctacctgattgagcttgttgagtacatttttgacttggacaccgctccatagatcctggatgcgaattgtaaaccaagtttatgttttccacctcatttgaaatactagattcagactgcttgattgaagttttctcaatattactattataaacttctgatatatcagaggctagttgggattttcctcttccattagcttgttgacttgtttgacggtacggttgctcccttgctcgaagtgaacttaaaacatttgttctattcttttcaacacctatgcaaatttcagaacggctctgctggacagaggtcacttcagaattataatcttgaacttctgaacttttaccaaattgctgagttttcctcaaatcatctttttcagctgattggacaactgttttttgccgctcatcttttgcttctcctacaaaattcaaatctatatctacatttccctccatgctacttggtctcctccgagactgtgaagttgttttgacatcatctctgcagatttctgaaatttctttctgtgataatttccttctagatgtagacacttcagctgtttggttcccaccttgagcataatgtcttcgtgaatccctgcccaaattcactgccaaagttgaaatctcctcatcattgaattgcttatatgaactggaggcattttcatgaagaccttcatagtttctcgatcttctattatgcctttctgaggattccccgctatgttgtgtgtcttgacccaatctatcactaggcttctccaatttcttcctccaatcccagtcaacaccacctgatattgacaaattcttctgttttgatgtttctccatggacatctatatcatctacacgcctcctatatctctcttccacctggccattgaatcttccttcacctttcacttccaagtcctcattgccagataaagaatcctctgctaagagagtatgcttatcatgaacttcagtctcatcatcaaaatcccctgaagatgaaaacgaataataagatgaacaactagaagcttcttttcttaacctactagtgttgcctctcaaactagctccattttcattcttcctcctcaactcttcttcccgcaactcagttgtgactgattcaagaccatgattcttattaccttccaatgatctctgcccaccatttttcttcttctcgcaactacaaatgctaccatcatttcctttctttttcagttgtaacctgtcagataatcttaaattactctctctaccactaaaacctttacccttagcttcaactgtcttataggacctccaatttctcctcctaccaccaacataatcctcatcaacttcctcacacagcaagctgagcaatgcctcggcctcatcgagacagctcaaatcataagcctcactatctccattctgcaccatgcaacaacatcttcccctacttctcctactggtgtaattataaacactcctcgccttgacagagcaagaactgacataacaccccctgtcaagattataaggaggataatagcaacaatatcgttgtccaccacccaagaccaacttcctataagctgatcgttggagtagcgaagattgccgcagcccatataaacagcttaaatttatgggaactttctgcgtcgaaaatgcacagcatgaacaacattgggaacatgatgatgctgatgaaacattatgaattgggtttctatcaagtctttcattaagtaagttggagtagtcattgaaggaaaacgaaagagaccctttagttctaagaccatatacagttgagctgatataactgtggtgcataattatttgtctgtaacgagattaactgagaaaatcagtgaccctttagtttgaagggagacgaaagctcaaaatcatcaatcccatggcagccttcaagaatcaaatcctccaaatgttgcagttgcaggatatgtggaaggcattttccagtaatctgcagtacaaaaccgtaggtagatattactatattagcattgaaaagaatactggacataaatatatataaatacaatcaagtatagaacagaatatataatctcataggatgtcaattctctgaatcatcaacatcaagtatgaacagaatatataatcttatacgatgtcaattctctgaatcaataatctctcttcctataaggcctcaggtaatgctaaatcattttgtactggggtatgttttcatcgtataattatatttttggtagaccacattcaatatataacgactaaactacgcaaataatttcgcccttataactttttctaactaatactaccacagaaatgtggaaccaaaggaaaagaaaatcatggaacatatgagtaattaataaatcacattgtaatgatacttacgttaaaatcaattcagctttcacacaatattctagacatctgaggcaaaatgtgtactcgacaaatcacaaaataacttgacaagtgagactatcaagtagatgaaaagaactgacagcaaactactccatagttcataccccaagaagctacatgaggcttaatatctccagcattactctgtttttttttttttttagataactcttattattaatatgatacccccatttcacatcttatctcatactgaatcagtaaatgccttcatgcaaacgaaaagaaaaa

SEQ ID NO: 239104 - DNA, 2736 bp, Cannabis indica
aaatctggttttggtatagaagaacaagaagagagctatgaataccctggtccggagcacaacgtctactctcagccgaagattcgacggatacgagccgttggatcatcaagatcaacggagcctgatcactagggacgatagaagccaggttatgaagaggataggcttgtctaagtctaaacgaagtgacaagaaaatattggagggaaatcgattgagtaaaaataataataatagtcgaagctacaagaacaagagagccaagcacaggcaaatatttctgaaaagttacacgttgacgccggtggagactcggaaagtggaggacttggctactaaggttaagaaagctctggtttcggctttgtcgtttattcgctttggctcttctccgttcggatcttgtaattgtcgttcaaccactgctacaaataattcctcagccaaacgcgtccttatttaaaatgaaacgattcaatattattaatgcttctttttcttaactatatattggttcgctgttttaattttattatgtgaagctgaatacaaatagctagattagtggttgtatttttggaaagagtgaattggtcaataaatctcaagtctcaaattgtccttcattaatcttatataatatgaattacatattttatatcctacaaagtaaaagggggaaaaatgatctttgtttgcttatatttataataaaactaacacaactttgtatttggtaactaatagtataagttcgaaattacatgtttttaatttaagtaaatctattcaaaccatctggatatcaaatttcactttaacaaatactcaaactcaccgtattaccaaattgaatgaaagaagaagtggcgttagattatctccaattcatttgatatttttctacaaaattataagaactttggctgacttatttttatacaccaaacatagtctaaatatagaattagacttctggataaataatacattacattattacactacaattcataaaacaaatcttactatataccaaattgaaacccaaaagactcggcattgacaattcaaggacaaaatcctctgttcctctacatccatacacatgttacaaggcccttaatacctggaaaacaaatctaataaaataaacatatacataaccaactcattcaacctcttcttttccattttccctgccatcttattcgcctcaattcaaaaatctagacctaaaaacaaatcacaaaattcccaaaacaaaatcctctgtttcattttttctatcttacttcttactatgcccgcaaaagggcttgttaatccaaatccccatattgttatttccaacaacaatggctccggttaccccaaaaactacagtatgttctctgaaaatgaaggcggccttaagccgccaccgtaccgccggaacatccctcggtaccagtcttataacaacagcaagaaatctagctcaagctgttgttttcggtgcataggctgcttctattgctgcctatttctcctggtttttctctctgccatcctcactttctacctctacacaatgtacaggcctcaggtcccaaactacggcgtcagcaacttttccgtcaacaccttcaatgtcatgaaggacttcagcctcgaagccgagttcgtggtcgtcgtgaaagccgacaacccgaacgagcatatcggtttcatctacggcaaggaaagctacgttattgtaacgtattcgaattcggaactctgctcggggaagctgccggcgtttcaccagccggtgaagaacacgactttgatgagtgtggtgctgaaagggaagagcgagttcgggtcggggatgcaggaggtgctcatggataaccgacacaccgggaagattcctctgtttgtgaaggttaaggtgcctgtgagtgtggtgttggggagtcttccgttgagacaggttgtggtttttgtcaactgttctttggtggttgataacttgcaacccaacaagaaagcaaggattttgtccagtaaatacagttacaatgtcgagttttgaatattatttggtaatgatggtgatgatgaagattttgattaggggaaaggaaatatataaatttaggttagtttttctgattgatgcatgcaaatctattcttttgttatgtattgcaattaaagaaggagaaaactctaattctaaacaaattattaattgtacgtaatttacaagtttctaccttttttttctttttatatataaattttgtcaatacataataaagcaagagctatctaatcatacaagacaacataagaagatgcctaaactgatctacggaaacacctttttagagaagagaaggtgtactattaacttactttataaatttataacactgctaaattgttcgataacgaaaaaaaaaaaaaaaaaaaaagattcgtagatcgcagagctccctaatgcaagattgttaacccaaataggggatatattctacagtggttaatttagtgacagataaagaaactatgtataatgagtgtaatgaaaaaaaattaatttaaggggtaaattattaataattatatataatatttagatacatatttattatatatgaatatatattttatatattggaattttctctaataagagtgtggaaaattaccccatgggaggggtgtgttcgagcgaataaagaagttgtagcgttatat

SEQ ID NO: 239105 - DNA, 3489 bp, Cannabis indica
catttatttatttgcttttttttattattattttcttcttgtcaaatattatgtaccacttatagaagaaagaaaacttcctagtcaacgagcaacatatgagtatttgaagggaaagatactagatgtattttctgactatagtaaagaagcagaggaccatctctcaaaagctgtaagcaagaacaaactttagctccatcacttgtcgtatttgagtagttttgctgagtctcaattttatgaatttatttcttacctttttcaggttaagttgaatccatcgcttgcagatgcttggctgtgtttaggtaattgtatttggaagaagggagatttatctgcagcaaagaattgttttactcttgcattgagcaaggtcattgtttgtaagactattgtagttgtctcttcttactaggaagacaattgtcttcatctcttcatactatgagacctactgggaatgtgcctaaatgattgatacttgctttgtgtctcatgcagggtcctaacaaaaagatcctttgtcaattgtcgatgcttgatagaaaaatggctcaaggtaagttgtggtagttttgtattcgtttttcgtgctatactcattactaatcaggtaattgcttatccattgtgaagggatattgtttagtctattcctataccaaagctttgactcattagtttctcatcttatatgcttgatatttgagaaactagaactattacagtaaatattagttgtcaatgataggcaaacaatgcactaaaaagaggtgatgtaccctgcacaatggagctgtagcaccataggacagaaaaacctgaagatattaatggaaagaacttcacagtaccgaagcttgtaggtattcaggagacctatactctcccgatgcaaatactcaacactgaatttctgcatacctcattctcattccccgacccacttatattcttgttgtctaactaactctgaaattacaaatatactcaccaagattctgaacaaccctgccaaactaccctcaagccacaacctgcccttttcccctcctagcataggtgaatcagattaagggtctaacaaatgggagaagaagtaatgatgatgtgccttgcctttctctacgttcgtttaactttcctaactttcattctatcactttcaaatcctcttcgttggtttaatcttttcttgcattggaggatgatgtctttgtggacacaattattatctttttttttttctcgttcatagttataagattttatgggagtgtctgtttttccatgcaatgtgataattctatttggcatatacctttgctttcatgaaaccatgcaactttacttgaacttttctaggtagtgagaatcaggaagaacttgtagaggaaagcattcaacatgccaaggctgctatatctttagatgttaaggatggaaattcttggtgtaagaatttattatttaatcaataaaatgtcacttctaaaattgttattatgcttacatatctattcgttctgctatatctaatataacaagcacatttacagataatcttggaaatgcatattttactagttttgtcatgactggtgcttgggattacagcaaacttcggcagtctttaaaggcataccaaaatgctgtaagtgtgcagagtaagaactgttcctgggattccattttgttactgcatatggataccttgtggtgttttggtactacatttgagcttcttgatttttcatttctgtaagacttgttttgtcatgatgattcatgcaggagaaggatgaaagaatggagtccaatccagacttatattttaactgtgccactgtaagttcatatattttccttattgcttgttaagcaggaaattatgaagatagtgcatttttaattttcaccataagaaggatacaatttaatgcaattagtaatgaaaatattaagaccgccatgaaagactcaaatgtgctacgatcctttctaaatgaggaaatttgtggacagtttagtgttgtgagagtgagagttagagcataggctagaaaagtcaagcaacaatgtaaatttggtctcttgtctacctgggttgtagctcttctaatctcttatgaggtgtttatcattttgaggaatatctgtcaagaaaatctttctttaatattctttgtttctgtgatcataaactctgagttctcgttttagtattaactcatatgagaatgtaaatttcacagctatcatgcttttcatttgagattaaattaaagatagtgctttcaagttttgttaagtggttttctactgacttaacatgtgtaatggcttgtgttcattacattttttctctcttttgattaatgttttcttacaaaagaaaagagcacatttatggttaaagtacttcattcttgaggtgaaaattgcaaattattgcttaattgccatttttttttttgttcaataatcattttgagtctctaacaggtacacaaatatctggagaactatgagagggccctcactggctttgaagctgctgctttgaaggatcctggtctcaaggctgccgaggaggttcagcagattgttaatcttctcgataagatagataatatgttggtaaggcatttctctgtgctattgcagtactatagggtctttaattctctctctctctctacacatacataaaaataatatatatctgacatttgattaataaatttaaattatttaagaactggattccaattatagttattgaatacaaacaaggtaagctagtgatagtgaatgcagttatgttggagcaaaaccaggagggactcaacaagataaataactataattatgtaggtatccaggagggactcaacaagataaatagctataattatgtaggtatccaggagggactcgaacttcagatcttgttggagcaaaccgcatgtctgaccatttgagcttcttgggttttggagagttatacttggatctatcaatatcttaatcccaatgtttgaaattgcgtttttgaggcgcgcctcattgcgcgcaatagattgaggcgaaagaaaatcgctttattgcgtgtaccttagttgggagaagagaggcgtacgcttcagccatgtgaggtggttagatatggcctgaggcggtacaaacagtgaggcgcacacttcaattaaaaaacctgaattttagggctttgtttaacccaaattcattcagcaactaaaaaatagcccaataacatttaatttttacaaaggcccaataaaacacaataagaagcccaagaaaactcaaataaacttggaaaaaaagcgcaattaaacatacacaattaaaaaaaaagaaaagaaaacaacattttctttcttaaggttagaatagaatagccaacacgaaccagaaaagaagagaaaaaaaaaatgaaaaagtgacagaagcttcctc

SEQ ID NO: 239106 - DNA, 6029 bp, Cannabis indica
tttttaatatttaaattattaatattatgcgaattaataaaaaaatttcatgtgtaatcttgtgtacattgtgataatttagtttagcatttaacagactaaagtgaatggaaggagtaccgaataaaataattttataaattaagaagttcaacccccaaaattttaatgtgataggttaatcgtaccatacttcaaaattcaaaaaatttaaccgcaaattaccaaaacacaatataatggccgtatatgacattcagccaaacttaatatcattatatataattagtgatattcaaaagacaactataatttgtgtgctgactaagacatccaatttagctagtgcattagctaggttagtgcatatatgtgtgtggccggccaaaggaaattaatccattcattcacttccatttatacattaattatagtctaattatatagaattcattctatataacttccatttatacatattaattacagtctcacatagaatgaattaaagtagcaactataccatttaagcgttggtcaaagggtctcatttataattagtagccctagtcaaacattttcacaaaggttgttaattataaatgaaatgtatagttgttagtttaataaaagctacccaagtcaactctttgaccgatgcatatatatatataaatatatattcaatcaacaaaccagatgctttgcaccctaacctaaagtttaatgcaataggtggaccttatcactctctcatattatacaactatggtacatttaagtataactaattacaaaatattacttctaaagtggtcctagacatcactaaaatacttaataataatgatctaacccaaaacacatcataataaaataaggcaatgctaaagttgtaaatattattctagactcaatattttataaaagttactgataagaccttgtattttgataaatgacaattcaaattttgaatttttcaaaatctacaaaattattccttaagctatttttatgtcaagagaaaatataataataataacctaacttgaaagtgttattactagactagttgtatttttcacatctgtttgtattggaattcagttttacgttggttattttttttttctttcaaaaaaaaagacaaaaattgagctcaatacacttttttatatagggttcaatttttcatataaccgaatagacagttttattgataatacttacaaaacacaatttctaaaatagtatttaaccagctaaaaaaatattttaatgtaccaagcattacaagaagtgtcatattattattgtacattttaatatcgagttttacatattttgatttaataaataataaataatataaataatcgctaaccaaatagtgtaaaatcatagtatagtattatgtactactttaaggtgtcgtataacaatatgctcctaaataaataaatacctcttaatttttctgaatatattgttaagggattattaatggtgtataacattatttgacgtaatattgaatctcatatattttgccaaatagtgttcaataccacaacaagatggtatcataggagtaaggaataatatataataaattagatcatatgagttaatatttaattgtattaaatatactacttgattgctccactgtatcatttattagcattgaactttgaaatatgtagtatataacttactctaagtctctaaccccaatataatatgcataaagtgaaattgaacgcattccataaaattttactcaaatttcttttcaccagtccttttacttctgataaaattcaaatacaaaattttcagcacatgctaaaaaaagatcctttttttattcttctatatatatgatatattttgttgttgttgctcttctcgtcataattaaatatattttggcttgtcatggaaagattccttctctcttctctaggggtccccaactaaatttaagttcattatatataggtagagtaggccaactactccttataactctcatttcctcaatcctccctctccctctactactcagtctctttcaatctctttcttcttcttcttcttctttctctctcttcttctactcataacaacccttcattttcaatctttttatttttatcttcttattaattccatggctgcagcttccacatcatcacaatctgatatcattactccatcttctaatgatgacctaaagatcatagttgaaagcaatatccctccttcccgcttatcagaactgggtatcaactcatggcccaagtgagtatatatatatataaaaaaatatatatgttttataatgaattaaatattatatcgtaatatttataattaaaattatatatatgtagatggggatgtccaccggggaagtatacactgaaatttgatgccctagagacatgttatttggtgaaaggaaaggttaaggtgtatccaaaaggctcatcaatatcaacagataataatgattttgtggagtttggagcaggagatcttgttatcattcctaagggacttagttgcacttgggatgttttaattgctgttgataaacactacaaatttgattctaattcaaccactacttaatacctcttaataagagagtaattaataattacaattaactaagctagagatcagcacaaatatatatatgcatccataaaaagaaaatattattttttttataacatatatatttctagcaagtttttgtataatcattagtactaaatgtccttatattaattatgagttgtgtaaagttatacttatgaaccagaagagtagtattaattcctctgaaaagaaaaattgtggagcagagaatatataatatataagatggaaataaagctagacatgaaagttgtattataaaagaacaaaacaaatgagcaaataatattatccacttgcaggaatatttgtctccatgatatttttatttatttataatttgttcctttgactggtcttggtcagcttcttagggtttcttatcttatgtcatcactgagaaaatgcctcctttaactttgtagttttgtgcacgtgagattcaaacccatataaattatatatattttagatatatttgtacaagtctctagaatccatacttatggacatgtgctagctatataagaagccaacacctaattaaattgtttttttttttctaattttattttttgtatgtcatctatgaataatatgaatgatttcacagcatgaatagtgtacatatatatatgttttacaacacttacgacggtccaaaataattatagattttaagtacaaagaagttagtttaattagtaaattaacatactctttattatactgagatgaacggcaatacaacaaattaatatttaagctaaacaacgaaataataaaattaccatatctatttattctatataaagtgtgtctgtataacagaatttttagtttaataatacctttttagatatttctacattaactttaacagaatatgctattaattaacaaaatattttttacaatgattgtatttgtggttatacacccatttgcaaccaatcggtttgtatcgaggaggtagtttggtaatgatccaagttgacaaaggttgagtttcattgtccattgcttcaagccagtgtttaaattgggaagcctcagcataattttgaggcttggtttgtgtgtaggctgcaagaacagcaacccgaaatgttggatgaagcttaatgtaggacaagaattgttcaatagggtgattagtggaagccacatgacaaacataatttttcaaatggggtggtttgacaataggtctaccttttttttgtggtttgtatgtcaagagagggaatagtgccaagtctggttgttgttgaatcaacaacagtttgctgatcttgggacgattgggctgctgatgtagctgatgcagatgcatcagactgttgggaagatgaatctggtgcatgttcgactgtagcaggagtaatatgttgttgaagtgatgagtgtgttgtattgggtactgttgctggtgcaataggtttttgacatggaaagattgtttgagaaaaacaatgatcaatctaagttaaagaaatggtagaaaagtatggaaaaatgttctcatgaaatataacatctctagatgtgtatatttgatgagattcaatatcaagtagaagattggctttcatgccggatggataaccaatgaaaatagaggcactgctgcttggtgaaaatttgtgtgtcgtttagaatttatagttgaaccataagataaacacccgaatgatctaagatgataataagtaggggtttttggtataagatttcaaaagatgtactactttttagtaaagcagaaggtgtacggtttattaaataggtagctatggcaattaggtgaggccaataaaccagtgggagatgagattggaattctaaggcacgagcaacatttagaatgtgctggtgtttcctctcaacaacagagttttgttgaggtctctcaacaaatgaatggtaatgtattactcctttggatgcatatataaaaggatgaaagatttagttctttggcgttatccgagtggacaaccttgatattgtgggcaaatagtggaaatcattgtaaaaaaatctggaatgagttttttgtacttcagatttcgttgtcagcatgtatgtccatgtgtatcgggatttatcatcaacaattgtcaagaagtgtctataaccttcagtactaattattgaaaaaggaccccaaatatccatatgaactaagtcaaatatatgagatgcaaagttgttattggatataaaaggtagtttcttttgttttgcaatatggcaaacatgacaatgagtattgtgaacaatggaagaactaatttttttattgaatatgtttgaaatgtacaaagatggatgaccaaggcgattatgccattggtctacatttgttttattgaaagctaaactagtagctgctatgggagtgtcttgatgtatgagatatagctttccttggggtttagctgtcccaatcaccacacttcgagaaggatcctgtataacacaatttttggtgttaatgaaaaggcagtaatgtgtttgatcaaccaaggcagtaacagatagtaggttgatatgaaaatctcgtatgtaaagagcattatcaagagtaaggtatttgtttattcttactatcccaatgttggatacaacaattttgtgtccatttggcaaaatgacatgttttggaaaagaagagtctttgaaagatgtaaaacaagagaaattagagcacatatggtgagtagcaccactctcaagaacccaatgaaaagagtgatttgaaagagaattaccagcttggttagatgatgcattgttcatagcaggatcagctcgaggagtggactgactaagctgctggctgagcaatgaaatgaattgctggcattgcgaactgagattcgtagcagggatagcagtagtgtgatcaattgggttgcttgtagaggcttgattgacctgagccttgcctttgtcattgtgtttcttgtctccataacctggtgggaagccgtgtaggaagaagcatttgttgactaaatgaccgggcttgccacaatgagaacaagaaggtctaggttttttgtttcttggagggttattggatgatggacggacagaggaggccatgggaggattttcagatgaaccaagtgtgcgttgacgttcttcttgaacgatcatagcaaagacccgagaaagatttggtagaggttcattgagtagtatttgggcacagactgaagcataggattcgttaagcctagtaagaaattgaacaacttgattttgattgtaaaaattaagaaaaaccttcatagcaccacaagtgcaagttatatttgttggaatttattttaccaggatct

SEQ ID NO: 239107 - DNA, 5025 bp, Cannabis indica
atatatatatatatatcgatcactttggggtttttcaccaaacacacatagtcatcaaacatgcatgcataatgagatgatagagtgagaaagaagagagagaagaaaagaataccagttaggactacaaggtctctatctgtgagccctttccttagaaatttggcctttattagctgaattgagtcactaacctctggcatatcgctcgccaaaagaaggttcgaaatccgaccatcccttcgccctgtaggcacctcataaaccggtccccgagcctaaaacattatatatatatatatatattcatcattttcacaaataattaccaaaataaataccagagagagaaagaacaataaataattaccaaagtaatggcgtctcttgcggccaaggcaacaatatcagcacaagaaacaacaccagggcaaatgacttctaattctcttttggccgtatctataacttcaaaacctcctacaccttggtgctgaaatgcatctttctccgcattaggaacgctttcaatcagaatcgaaccatcacaaccctgctccatcccccaaaaatccaaatatatacatctcatgaatcacctattttttaaaatgtatacatattatgacatatagtacatacatacatatatatatatatacctggacaaaacagtcgtgaaaatgaagacgaaggagcttagcggcggtgttggggtttgaaacgacggcgtttcggactactgtccggacaatggcctctgcggcggggcatgatccgccgtaaaacccaactctaagctgagcattagaggtggtaataagaagaatttgactaaaaaataagcctaaaatcaagctcattttgtgtgggtgtgtttgattatagttgggctatacacacatcgatctctccacaatttctttttcttttttaatttttaaatttattttatttatttattttggtttggaggtggagagagtttagagaagagggagaaatgatttataggtgaaatgagtttttttttttttcgtagaattaatgtaaattgtttcggcagcttttaagttggcagcatttgaagaaaaattattatataaataagaagtcctatgtaatatgttttttgaattgtgtgtacatgaaatttatcaccttctttgtcacatttcatctattacttttaaaaatgggaaaagaaatataaaatggttagaaacaatatgaataaagtcgtggagatacgacttccactaggaccacgttataatatgtgttatctataaattaaattgaacttttaatgcataattttttcttcttttctagattgatagaaacaataatttattcatatttattaaagtgttgtctattttgactggcaataagtaattcctcacatggtaaggcagttattacaaaataaaattttagggaatgtagtaaggtacgtattttttacctaggcacaattatttttatgcatgcaaattatttagcattctaattttttattctaagacggtcttcatttgtagttataaggtgcctttaaatttttgaaaccttttattattatttttttttaaaaaaaaaaaaaaacaaaagctaaaaaaaatgtttttcgaacacaagtgtttgatactgttctcataaaacaattttagaaacaaagtaaaaaaaaaactgtaaaattacgaaaacatgtaaaaaaaaaaccaaagttttcatcacttactctttcaaattattttatttcattattattaaaaacttttaaaatatttatcattctatagatatattttttaaaaaatatcaaccaaacatttttggaagaaaaaaaaaacctcttacaatgtatcatatgaaatttttaaaagacaataaattggagactaaaagatttctaaccatatgtagttttttttaggtgtcacttttatcaactagacaattttgtgtcaatattgaaagctcaaggacattttgtcatttcgaatggaaaataacaaaatccatatacaagtgtatactgcaaggaatttgaaacatgaactcattattttgtaatctttgagaaagatagggcaagtacacacaaaaattgaagtattgaatattgattctttctttatgtttgttttgtcaatttcttttacttcccactactgaaagggaaaatctgcagtaaataataataaaaatagacatcattctctataattggaaagaatgaaaatgagttgagaaaatacacctaattcaagtagagaaattgaaatgctattagcaaatagcaacaataaaacctcatcctcatacacaaaaataagcaaaaggttcaagcccaaagaaaatcattatggaggaggtcttgtgtacatattcagcctcgtcatttgagtttctatatgtataccatttcatccaaatctatatatctaatatgtgtgcctataatttgaaggaaaggatagtaactggtaacagatcaatgagcaaaactatgtaaccaggtaaagacaatactcagtttaatctaaatataatatgctataggtaagatgatttagttttttttcctgggaaaaaagtggggtatgaattatgaaatgaaataaaagccatggaagtcttaacttccggtatgaaaagagcaagaggggtatgtgtatgtattatacctatatgtatgttgaattgtccagtgaccaaacagctttagatgactagtcagagcaaatttcagaaaatactggcaatctctttttggcagggccatagagaaccccattgatgtatgcattaatactttctcttgatggagatttcttggttgaggaagaacatggcagagcgacaataataccgtcgtcttgaaggcaccagtcccttgaggccatgtcaaaggaggtggtgccctttgatgtggtgagtgaagtggctcgggttggtgtcatagcccgaagaggggattttgggctatatgaggattgtcctgggctattcttaggcttgctgctcactggtgtctagacatgaacaaacaaaatctcagagaaatagaaagatagaatgattagcaacttagctataagatgctgtgttaatggtcaatcacctcggttttgtttttgttgatcaaacgagttggacggaggttttcttttccatgagcagcctagtgtgtagaagcgattcatcaattcaaatatgatatcaaaatcaaatgtagtaatgtgatcagaagtcatccctcaatcaagttgaaaagcagagaaaagcatgataacataaccaaaaaaaaaaaacaaattgaaacttccaagttgcaatgtagtaagcaacaaataggctcatttagaaaagcaaataaaaggaaagggcaaagattggatagagtcaatggtaaacaacatagtaccataactagagaacaactaaaaacaaatgaaaaaaaattggttccttgtgcaacaatctagccaaatacttttactagagagaatataccagttccagaatcctttcgagtatagcttctttagtaaagggtattgattagaccaccatggtaatgcaaaatatgtcttttatagaaagaaagatgtactgtaactatattcactttagcagactctaaaatcaagacttcagagctttaaaaagcatatctacttcccccaatatttgagaaggatcaactataaatgtttcaaaaatgtaaaaccgactacttggcataacatatcgtaaatatgttgtattccctaatatccaacttttggtaaatatgccccgactgactattcatataatactttctttaataagataaaattacttgaaagtttttgaattaacaaacgacacaaaattaaaaactctgcattggatgtgttcttacggaaactacttttccttatcaaaacatacattattttatagttaaaagaacagggaaagaaagaaacctgaattttggagctgtagcgagagcttccaactccgttactaaccggaactccgtccattaccaaaacttcctctccctccaccgccttcactggtgtcctgtaaacctgcgacgaccggtccatcatgttcttcatcggcgacaacacagacgacgatccgaatcctctggaaacgaaaccgctgtgtccagaattaccattaccgctgtaatgatggaacggattacaatgttttgcagcatcgatcaccttttcttcggccaatgcaagatttccggcgattgcagaaccagagcgcaagtacctaatgatcgaagagttgtggtcaggattatcggcaaacgaatcgaaggttgcgctaatggcactggtctggtaacggccgctgctcccaatcatcaactgctgtgtcttcatccccggcggaatttttattcttgaaggtttggagtaattgttaccgccatgaaagttttccatgggtctcgattcacgattcgccttaactctgcatgaaatcaaattgagaggaaaatttattcgatttttctaaattcccgcccaaagaaagaaactcaagcagagaaagataatcaaaacggaaaaactttagtcttccgatatgtccttcctctgagtgagaagtgaaaacggaaattgtcaaatatagcaaataatgtgtaataaacctgggagttgagacgtatagaggagagtgacaatggcggttgaactctgaaaacgcctcagttcttataatctcaagggagattatcaccgaaactagaggaaacccttattctggatttcttggaacacaaaactcgaaacttgagtaccgaatactgattggttatttataggttgatggtatgtgtgtgttgctcactatagctaatacctgtgcccactggcatcttgaatcgactctaatatttattccaatagaacacacaatctatatatatatatatatataaaaaagaagtatgaggctgtcacctaggggtgttcatccgatccaatccgcactttt

SEQ ID NO: 239108 - DNA, 3702 bp, Cannabis indica
ataaagatatatatattaattatagagaacggctaagggtatgattgatattcaatagctctccaatggtttgaaatggaaaattggaaatggtccatccgttcacatttttacggacttatggatccctagtttacgaaacattccttctcttctttgttggactcctaacttgttagtagctgatttcctgacctttcaagggatttggaacaagcagcttattatccatgcgggttttcccaaagacatagctgaagaggaatagaaaccattcctttccccaactctcatggacatgataatgtatatggtgatgctgaaaaataacaaactttatatcatcagataagcggtagtggctaacgaatgtatgaacaaaaaaaataaaagagaatgccacaattatagtaatttactccctgatgcaacgatattagagctacggtcaacttaaaacttttatcatcacaaaaactaatacttcccaatttttaaagagagaagctctgactttgtagagagagtgaggaatgtgccaactaaactgagggagctctccttttatagaaaaataagctaattaaattacaataaaataatagaaacattagtacaaaattcgtcggaaaattctgcactagctagcaagctgattacacattaaaatcatggcaagggtgtgagacacacttagatccgtcttgaaaatagctttcatatgttctttgaatcgcatcatttggataaaaatttagtgagttatggccattttactgagcggtatgcattactgaaagtgacagcaaggttaagtcaacctttagccgcccaagttgatatagaacgtcaacctaggtgcccaaaatttggtttcttgagctttaggcatattttgagatgcttgaatgatatgatagctatccttagttcattctttaactccggtgaagatctcttagcaattttacttaatatgcacgtgcaatgcttaggtgcacatgagtgtcagtggacttgtacgtgacacatgtacatgatatattaacttgcgcaagcgtccaaatcttattttggaggagaaataagactgatgcccagaatagaactgacgtttgatggaccaaacactaagctccaggttgaatgtcaacttgggcgcctagtgtggtgcctgggagacgaaccaccacttggatgatatttctcttaattcaaagtctcgtatcttgttttggagcaaaataagaaaaaaatccctagacggaatcgcagtcggatcgatgaaactacatgttcgtgtagaacacgtcaacctgggcgcctagtctcaggggagctgtcaccctgtgtgcccaacttttgatctgggatcccgatggcttcatttgtttcccaaaacaatttttatctaaattgtggatgatgttggtttattgtggtaataaatcaagtgttaaatagaagcatttaagagattcattgtaccaaacccaaggagctccatatgtacatatattaaatctgaaataaaaagttgaaaggcgttgacctagaaaagtgatcaaccaacaacgaggacatatggatttgatgcttgcaatgtgttacacaaatagaatgaaaaagtaaagagcacatagatttgttatagaggttcgaccccctttaatagcgggtaatgacctactccccttttagttgtattaataccgagggttaatagtattcaaatcactataggtagaatttgatataacacccttaaggatacaaagtaagaatcgagattagtaaatctcaagtgtagagatagcttgtatgggtgtgtgagagagagtgaggaagagagttgtcaaacttagaactttgtaacttggaggctagtatcaagcttagttctcacttaggtttccaaggttagagttaaggcctttatataagacggctaaaaccctaattcacaactaaaatcttaggatatttacatattaaattagttaattacaaaagaccaaaatgcccttaaacatagatattattcaactattctaatgggcttttagggcccaatttgtagcccaatcatgttgtccacgtgtagaattgcacagaagttcctataagttctctcttggtcggccagacacctgcaaggagcagcctggctggccatacggccagctagggctggccaggggtggccgactagcttctgtgaggaagctggtctgtcatttgatgcccgcttgagtgctagggtgtctatttattgaggtactgacttggcctttttgttggtgagctatactaccacgtggtactaatttttttccacgtaagcgctgccgtgttaggtggaaaaaaatcaggataacatttacccctcatgttcctatgggaacgtctatatgaatagggactttccagctatattggtcaggctggtactgctgtagccttcattgaatagaagttactgtgttttagctttttgaaatactttaccttaactatctgatctcatttgtagtagaaaaataattgatttaattgtctctttgttgtgtaggtggaataagtgaagaaagggtcccacatgtactatataagtgctttttagggggaaaggcctttttcacttttcactttttacatcttactttctctcaccagtaatttgcatttgaagaagctcctccttctctttagaggaccgaacccattcaggcaccattcccttgagatttttgtgccattttgacgatccaagcttcccttattcttcctcgacgatttcttatagtgggtaagctttttcttctcgccattgcacttgatttggctgattttgccatgaatgcatgaacattatttcttgctttgaatattgtttgattcctatgttatattgttgtcctttttggtattttaatctgcatgataaccttaggatatgcaatgtgtgatttctagatgaaaaagacctgaaactcaccttcgttgtgattgttggctctttgagtcacgaagaacacaaagaacgcaacgaacatgtttgagttcttaaaaaaacacaagtttggatccgtataagccttagccggtcatggaggtcttgtttaagacttggccgaccaaggagggctaccagagggtctggccggcgaaagggatttaccccataggctggctgacctatgcctagaataagggttcctggtcggcctctagatgaggttagggggtttggccggccactaaggctttaaaccctagctgacgaaggccaaggctccaaggggcagccaattttcttccctctattgacctcggctagggtctcgtgacgtccttagaggcatataaaattatagtcttatgcatgaatccccttgggaactctttataaagcttggtagtgagtctatcatagtcaatagcataacttaggagatactatgtgtcttagtaagtgtacttaagacaattcttggtcgataattgaccttgcacactgtgatttagctggaaggtacccttaggtactatagactagactatgtttgtagctttgtcagattgctcacctccccttatcttttctatgcaggtggaattgagtgttggatagaggagttgacaaccacgtagtgttggaatttattttaccaggatcttagatctactcacaagtatgtt

SEQ ID NO: 239109 - DNA, 2068 bp, Cannabis indica
taataaatttacaccaaatgctctctctcgttctgagaagagccttctattcgatatgctagaaaaaacctatagataccgtggacgatcttcttgccaaagtttcaaaccttacagtcttggatgaagatggatgggaaatcaatactgttgggggttctgtagtcggagaacaatgtgcgaaggccagattctgctccaatcgaccgatgagccgtcctctgctgaagacaattctaggtcgagtttggggcgttgctaataacaattggggtgtggaaatcaaattcaacaataacaaatccagtttcttggtcttctctttcaaatcggctcaagacttgaaccgaattctaaacaaatgtccttggctccttaactatggaactctgattcttgaaagaatggagaacctgccgtgtgattgggaaaaagaattgctacgttttccgatttctgggcgagttcttcacttaccctctcgatcgattacgaaaggcaacttggttagttagcaactatggctggtgaagtaatagaagtccaacccgtcgacatccctagaatcgtgaccaagggttatttcacattcaaagtttggtgcgatataacgaaatcacattttccaggtttcctctttccttcggaaggcagaaagatatggcttcctttcaggtatgatcgtctcccttttatgtgctttaattgtggttttttggggcatgatactcgggtttgtgcagagtcgcccaagatgtttgatgatggtcttggaaactggaagccgagttatggtccatggttaaaggttgatgacaaacgtgatgccaagcttcagccgaatgctgctcttgattcctctgtaaagaaggccttttttgctggttctcttgttcaagatccccccctacctgcggtcttgcttcaaggtcaaggtctgggagcctcctcaattcactcttccacttcaaagaatatgttagggttcaattcgggattggcttgtactgatacagatcggacttctctgttcgagaaggatgtggaagggatgaaggcaaagatgcaatgtactagtgagactgtgaatgtcaatagtaagagaaggggcttttggcgtgaggacagttctactcatcaaagtgctacagcaatggacatggaggttggactgaattctcttatggggaaggaaagtacagagtcttctctgaataatcttaatttgatagatgttcctataacttatgaagataaattgggtaatgacactaaggtggaaggccctttaaaaagaaggaaggtgaccccaaaaagaatcaagaacaaaggaaaggagggaatgaccgagacaaagttaaaggagttggctaaaaaagttcggggtaattcatcaaggggaatttctagttttctagatttgaaccttgacacatggaagcggcgaacctagatgttctaggtcgccgagcgccatgattgccatgttttggaatgtccaaggccttgggaatccttggacattgaattccctgaagtcccacgtcaaagattatcatcccgggatgatttttctgtcggaaactcgtttgaatagttgcggtatggagttggttcgggtgcaattaggctttgctggatgttttacggtggatgcaaggggtaagtggaggtttagcgcttctttggtcggaagatttcaaagttgagatcaagtttatacgatctctcacattgatgcattggtggaaaatgacttggggttcgtgtggcgattcacgggtttctatggaagcccggatcccagaggaaggatggaatcttggaagttactgagtagactaaaaaatatgttcaccaatgcttggatttgtggcggcgattttaacgaagtcattagccagaaagaaaaaaagggtggaggtccaaagccggattatcttatgaaaaactttcgatctgccatttcggattgcaaacttaaggaaatttcttcgggtggaaactcttttacttggtgcaatggtcgtgcttctaatctaatctttgaaaagctggacagggtgtt

SEQ ID NO: 239110 - DNA, 2620 bp, Cannabis indica
ataaatagctaatgttagtaaaattataattttcttctagctttgtcagtataaactttgttagtgtcttaaacgagacatatgtacatcacatattttaaattattgggtctcaaggaaacatgtagtatcaattttcaaaaaaaaaaaaaataacaaattcaaaaactaagtgtagttagaaaatcggataaaaattacaattttgccaccaataagtacttatgttgctaaagcttacaaactcaaaactttgagtgttatccattaaaacagatgttatgtatggtcacaagttagttactagtttcttattttggaaagttagttgctcgaggtgacttggataacttgaaataggtgttagttaattcagttagtattgtcattagcctataaatacctaccacctattgcattctaatgtagcttgtcatatcactataatgtaaagattagctagagtgagacagaattagttctaaaccattgtgagaaaagtgattcttgtaactctcaattggcttgatcaaggactgtgtaaactcaaaaactttgatgatcgatgagacaatgatggttgttattccaactgagacgtagaacatgcacttagctcaaactttttaaattcctagtgttctctttttctgttttaattcattcaattattcttgtgattctcggattagtaagttcttgaaattatgtttgtttgtttatgtgaacttccatctagtgccttgattgattcacaaaaaattggtatcagagcttggttcttgaaatcatggcggctacaaggtatgatgttgaaaatttcactagtttgaatgattttaggctatgaacaatgaagatgaggccctgctggttcatcaaggctttatatgaggctttacttaaggaaaaggctcttcctgagataatgtctgaaaaagtcaagaaggagacacttgcaaaggcgcatagtgtaataatcttgaaccttagagataaggttatgatgaagatcaccaaataaaccattgcaactagggtttggttgaaacttgaaggattgtacatgacaaaatccttggtgagcatattgtacttgaagtagattttgtattcattcaagatgatggaagacaaaatttttggaaaacagattgatgatttaacaagttgatccttgatcttaaaaatattgagtttaccattgaagatgaagatcaagcattattattactgagttccttgccaaaatcatttggacatttcaaggatacaatgttttatgggggaggaatcaattacactcgatgatgttcaatcaaccttgaattcaaaagagttgaatcaaaggattgagttaaagaactctagtaatggtgatggattgtatacaagaggcagaaagtgagaagagagaaagcaacaaaagaacaaagagataatcaagatcgaaatcacaatatggtggtaggaagaacatcagagattatcattgtaagaaagaaggacatatcagaaggctttgtctagaaaggaagaaatcaagtgatgaaagatttgaaggagatgcaacagtaatgagttatggttatgactcagctaattctttccttgttacctctgagaatttagattcagagtgaatcttggattctgggtgttcatttcatgtgacaccaaataaattttggttcaaagaattcaaacttgaaagctatggaatagtgtatcttggagataacaaatattgtaagatggtgggaattggaacattgagaatgaggcttcatgatgtcatgaaaagaggactaaaagatgtgagattagtacctgatatcaaaagaaatttgatctttgtgtgaatgttagacgatcaaggttttcttgtaaaggttaagaatggtataaggaaggtttgtaggggttcaatgatagtgataggggtataaaatcaaaatgaatttatcctctagatagcatcactatgaaaaacacaaaggcatgttttaggcatggacatctaaaaagaaaagggaaaaaggatgttgtacttgaatcaaaagagttatatccaaaaggtactggacacctttaaaatgagtaactcaaaggcaattagcactccacttgcacaacacttcaaattgagtgtaactcagatgcttaaagatgatattgagagggcagagatgttaaagatcctatttgctagtgcagttggttcaattatgtatgtcatggtttgcactagacttgcatagcttatatatgcacttggtctttagattcatgggaaacttggaaaagaacactaggaggccctgaaatggatcttgaggtactttaagggaattgttgacaaagggttggttttggcatgaacaaacaaagtgaagacctaaatgtaatcaatggatatgtggactctgactatgcaatgtgtattgatactagcaagtctttaactggttatgtgtttaagatgtttggtacaacaatcagttggaaagcaaaccttcaaaatttaatggtcttgtccacaaatgaagctgagtatatggccttgacaaaagctatcaaggaggtactgtagttaactcgtttgatggaggaatcaaga

SEQ ID NO: 239111 - DNA, 2307 bp, Cannabis indica
gatgttaatgaaacatacttgttagtaaatctagatcctgctaaaatatatccaacacttttttcgtcatcaatggggcaccaaggctcaaggatttcctccgggaaagtggggaatgcaacggctgttctaggctggttgcgatgaagagtttgcatcatccatgcatctcgctccctttcgtagttccaatgagaatgcagccgctcacacatctgcgactgtcgccggaacatctattgttgtaaagcctcatgcttggccaagatcccttgaagtggaggctgaagcagtggatgcggtggtgcttttcggggcacgagtaggtctgaaactaaccactccctttcttggaaccgattcctcttcaaacaacatcggcacaccagcgcatcacacatctctagaatgaggcatgggaagatcaattttcctttgacctggtgtgcacattcaaagatctctttagctatcaccttgcctacattgatcttcttgcctttctcgatgcaatatcgcatccacatcctttcccgactcaccgtggagtcatgtgaagtaggcagcagagtggattgaacgaaattatatagacatttgatatcgtgcttcaaatcagtccgtttgaaacggaacacaccatgctcatctatatcccactctccttctagagttttcaattcaggcacaatcttgtgcatcagctcatcagtgagcttgccactatccttagagaactcacaagtcacatttttaagctggaagtaatggtttatgtctctgttggagaatttcactttgacctctcgcactgtaatctcagctgccaattcatgcgccagaaaatttgcatagaattcctttaccacttaacaaactgctgaggctggatcttcacacaattctaaccatttcctcttttttatgttctctattagccaatgctgctgaagttatcatctcatactatcattcctcgctcaatataaaattccaagtggcgcaccgagtcaagatatttttttagcagcttccgaaacaaattttttagcttcttgggcatctttctatggaggtttatgggcacagtgcttgatttttggcatttgtcttctgattcagtaaaattcagccacacaatttctttttcaacacagtcccaatccacactagtatactcacagatttgaaaaacaaatccaatactactccaccacaacaatttattcagatcacacaactaagattttgattacccaatattcacttcagcacaaccctttagacatttctcagaatccaaaaatttacctcaattttctgttgtgttgaaactaccctatgtgagtgcttcgggtctgataatgaggtcgtgtaaaatggaaacgtcgagctattgatggtggtcgattcttcgtgttggattggtagtggtgctcgacggtttcatgctgctggtggttcgtggtcagagttcggttagggatgaaatggaggttttgactggtggcgagggtgatggacggagattggctgtttgtgaaagtggagttgtttgcttctgctggtggctgatgttgcgaagcatggtggttgtaaagcttcgattggtgaatggtaatggtaagatgagtttaatggttatggagttcaagtggtgactcgtgcaatttgggcgaatcaagatggtgatttttgtggtggtggttggagcttgatggttgtgggatgagggacgactagcaatggtaatggtcagagattgtgacattggtgcttcgacggctgggtggttatggacgaaggttttggaggctgtgcttcatggagatgagaatggtgatgttagggttaagttattgaggggtaatggctgatttggggtcttctgatgaagaaaaatcaaaacaaaaaataaaaataaaaattagaaattagaataataaaatatgtgtttatttatactagtatatatcgatatatgttatatgtatatttttttatttgctaatttttttttctttctcttttatttttctgacccctaaatcaacagaaatgatgctgaactcccagtattttatgaacccagtactcccagtagttacagcatcactacaacaattcaattttttagccatccctgcttcaaaatgctgaagtgatgctgattcaatgctgtaacaactgggacttactgcttcaacatgcaactctgctcactccataatgcaacaacccattttcctgttattcaattctttgcacctgcaatccagatcaccaccccattgcaaattcattagt

SEQ ID NO: 239112 - DNA, 5731 bp, Cannabis indica
attgttaataaaaactctatcaagcttagagtaaattcttaccccctcctcatatttgttagtccaagtgtagtgagatcccgagcacctaaactcatcaatttggcctaaagcaagcaaatcttgagcatcttggatttttatcgccttgacttgtctgccaccaaatctatctttgtactcaaacatcgcattaaaatcaccaaggataatccaaggtttatgcaagtaaccaaaatcagcaagttttctccaaagctccttcctctaacttaaaggattgctaccataaacggctgttaagtagaactcaccctcaaacccgaccattttaattttacaatggacaaattgtctatctaccttaaccaacttgtctatccatatcaaaaagattttgtacgagatagtttgtctggaataaaaattccagtcaggtaaattattagacatcacattatgaacattctcatggataagttttgtttcaaataaagcaccaaaaccaattttattctccttgcaattttctaacaactcaagttgcttttatttttattcaaccctctaacatttcaaccaagaacattacaattatccatgaaaagaatgggaaccaccaaaggcagccatccccttgatattttccttcaaaacttcatatcgattgcttctcataggatttgcctgagggttcaatgagttttttgaacctcttttttgaggagtaatccaatcacctgctttaaattcatcaaccacatgcttgctattagtaatactagactcaataatagagtccccctattctggctttctactgttagcagccaaattagcattatttatctcagaatcaatattgttgggaaggcgctaacttctcgatagaatgaactaaatccactccagtgttttggagttgacgtgcatctgcaccagcagcaacaacttcatgtcggcttttgttcccatctttgatgtcaagctttacaccctgattgtttaatcttccacacaaccagtgtgcctttgttacaatttgccacagtgtgacctagaagagcataagcaacacacttagacaaaagccactcgtactcaacttgttgctccacaagttgttctctttcattggcatatgcaataattttcaaaggatcatctgaaaattcaacatccaccaacactcttgcaaacttgatcatggatctctcaagattaaccttgtccaccattattagcttgcctatagtactcaccaaagcactcaaattcttctttccccaatattggagacctaactcattcaacctaatccaaactagaatcgacttcaccatctgcgtagtatctatgtcctttgagcaaggtctaaggaccactgacttcttgttaaagtgtataaccccaatttcaaggataacatccctagtaacttcatctttgaagctaacaaaggtgaacccaaaattcattcttaattaccaccctttctactcccaggtttaatgaaaccttgaaacactttgaatggggggtttgcccctaaaactatgcatacaattgatgttctctaaaaggaagcctcggtttcaatttcttccaaatctaattttactacaaattgatctccaattttcacgagctcggtaaaattcaactggaaggaaggggtcctaacctggttcatgttgaacttactccatatatcagaagctaatgctcgaaatccatcttctccatctcattggcccaacttactggcttagagttcgatttctgagccggtaaaccatcatcaagttccttcaaatttgtttcaagttcctcgcataggtccaagaatacttatattggagtagtggcatcttcttggatcaaaggcagctcactctggactatctcaacaatgtcctccacaatcacaagcttcgattttgcaagcttcggtgtccccttcttcctttttaccatgggagcaaggagagagcatcaacaatcgagaaaaattattttaacaattgattggttggtaaaaaaattatatatttttaaacttatcttggccaccttgcacgcacaatagtgcctatagatttcatcgacttgccaagtgtttcatatacactattgagtaatctatgtgatgatatcgaggtaaaagtacttccatataactatatttttcttttaacataatggattgtttaaactttttttcattaagatgcattgtttgtaggagacatttaagttgatacaaattgtgatcacgcttttatttttgaatctgttggccataaatggagggattacaagtcagatttgacttcaaatattatatatgcttacttagaaaattcaaagtatgcaaaaaaaaaatcgattgcattgacagagccaccaaaaaataagaatatcacaacagccaaccaaatcactgaactcattagccctacaacaaccatttgaatattcagtcatccctaatggaaagacacccttcgcacctacctcctttgagtgaatgggagcagagacaaaaccccgaccgaagttctcactcaagccaacagccatggcacatccgcaattagaaattgcattctcagaactctcgaaagccaaatcgcaaatcgagatcgaaatagcatcagaaatcgcaacttttccagtaacgagcgatgatggacttggacgtgaagagagcacccttttactcaccgaaagcatattcgtcgcccaaagcccgcccaaagagtgctgatggtgtccttcgcctttcttggtctcccttgaccaaccatcatatttcgtacctcaatataataaattattaactaacatcctattaaattaattaattaattatttttaaataaatatttatattttttttatttattaaaatatttaattatgtaaaagtattattaaaattaggtaaatatttgtttttacattagactaaatttatggatatatattagaattaaatttaatatattttatgaaaacagatgacaaaattgaattagatttaatatctttttattatactattttttttaattacatgatcaactcaaccataacgttttaagaagaattaaacttacaaggcaatatacttatattagtacttaattaattaataatttcaagccttagcgaccagcttcaatactggtacttatgaaagggtcgccggagctaacagagggtgtggaatccggaatatgatatgtgggaacaggcatattcatcggaagattaggccacgtggcctcaaagttgagaacttgaatagcttgtctgatagatggtctcatgctccgatcagggtgagcgcaccataaaccaattatcatcaaacactccacttgtttttggttgaaatctttttccattttttcatccatagctgttataagctttcctttcccataaagattccaaacccattcaaccaaacttcccatttcatcatgatctttctccaaatgactcactgctttccttcccgtggcaatctccaatgccaccactccaaagctatacacatcagattctttgctagctctccctgtgcttatatattcgggtgccaagtaacccaatgttccaaccaaccctgttgtttggggaccaagctcatgatccattaaccgagctaacccgaaatcaccaagcttgacattgaagttggagtctaacataatattacttgatttgatatctcgatgaaccacacaacgctcccattcctcatgaagatagagaagagcagaagctaaaccaagagaaatcttgtaccttacagcccaagtaacaggtgttctcttgccaaagaggtgagaatcaaggctaccatttggcataaactcataaacaagaacaaactcatttctatcatgacaccatcccataagttgaaccaaattcctgtgtctcaattgactaatgatcttcacctctgtcaggtattctttttttccttgccttgaccctcttgaaattttctttactgcaacaaaggcatcgaagtctggtaaatagcctctgtaaacagcaccaaaccctccctcacctaattttctttcatctgagaagttattggttgccgaagcaagatctttgtatgaaaacctttttggccctgctcctctttcaaggtcatcattgtttattgaaagtaaatttccttccttttctttatctttctgtttctccttcttcttttgttttattctccaaaacaatagaagtgacaagatcaaagaaactattaaaacaccactggcaactgtcaatccaactattagtcttactctttttgcatctgattctttgacttctttgacatccaaacttgagctgaattcccatgaattaagaacagttctttccccatatattcctgtagcagcagagaaaccaaccattacccatgaaggcaaagcttgcttcaaatcgactatgtaagagagactagtgttctcttttggagatgaggtagcttggtaactccaactaacactcaaattcttggtagaagcgctataagaaatccaaacatcagcgttacgcccactatgcaaactagcattccaaggagttgaaacagcagagtgaatggaattgttgttgattccaacatgctcataaggaggatcccattcctcgttggaaaaagaatcgaactcaaccataactatttgattgagggaggaatcactagttgtggtattgaaaaggcccaaaaatccaccacttgaattgggcaccatttggaatccagcaggggcaaggaaaaagacaagcccatgaccatagtttgagccttctattatgattgagaaagagaagtgagtagtgaaatcagctaccttttcggggtcgttggagtcccacatcggcactttctcggcatatgtagcccaaccaactcggcatgcataattttttttattgattagctcaacagctcccactgtaggcaaggcatctccttgatataccatgtttgtatcagttacgtcaaagcgtgatttttggaagtggagtgaatcaataggaggaaagaagcataggaataagaaaaggaagaaggtgaccatggctggagagcaaatggaaaattaataagtgttaattaggtgctaactcatgatgttatgaaattatatatagagtaatacttatggtacttaataattagatgtagtttatgtggtgatcaagtttcaacgctctagtttgcttattattattattatttttattgttgttatttattcattataggcaggaaagtgctttgaaaataatgttataatgttatttttatttttattatttttgagagagaaaataatgttatttttattgggaatatcgattgaattagaagactttgattcttatacaccggcggagtaatagttctgagtcaacgatcatgtagatatataaaatatatattgaacttctctgatcattacaaggaagaagagtaatatatttaatatgttgttttcacaggaaagagttgaatagtttcatgacatgaattaatgttataatatgcttattagaaaaaaaaaattatgataattgttataaataatatatgaatgtcccaatcacaaatctcatactaattatcattattctttttattagcatccctaatatgtggctcacattttttttatatataaataaa

SEQ ID NO: 239113 - DNA, 3646 bp, Cannabis indica
aaataaaaaataaaataatatgtcatgtctattgtaaatgctgatgtcttatatcaaggctctgctatatatatatgtgtacgaatttggaattcagattggtaaatttacatgaaaagtttaaattatccacaagaccagaaggcatttgcctttaggcactagtgctaatagctagattgagaagaaaatgaaattggaataaattttaaaaaatcccaacaatagaaaaaaaaaaaaagaatataaaacaagagatcaatcataaagttgattaagaatattagtctatggggagcataactgacgaataaaggtgaatgttgacttgaggggaacatattgtggaaaatgaacaaaattgagagaagtggggaggaatctccatccaaacgactgaagtgtgtgttagagttcatgtttcttgttgtaaaaggcaaaaatgtgggtcctattttccttttccctgatcatgtgcctagtcaagtgggatgattagtgtaggactagactagactggtgttaaatgtaatgtaactcgtataattagactacactagtcaggatgactagtattggactagtgttaaatgtaatgtaactcgtataattagactaccattttttttatatatttacatagcaaatttccactaagttttgatgtgtggaaaatgtacattattttcccagctaaaacgtccaaaagtacagaaaagataaagcgatcatttcccttatcaaaaacaaaaagcgatggcacccctttggccccaggaaaaaaattaaggacaagacaacttcttaggtaaggcaataagggaagactttacagtgacatagtcaactggtgattaattaatgagtggcattgattaataaaaacaccatctcactctcgctactacttggctctcattgcttgttttcctcacacaaatttagtagctagaatagaaagttttccagaaatgagtagcaacccaccaatggtgcctgtgggatttacgttcagtccaacggaacagcaggtgatcaatcatttgaggctgaaaaatctcggaatggattcagaacttgatccttacattgctgaggttgacgatatattggagtttgacccttgcgaattagctggtataatgagtgtgtctgtctttttttggtttgagagagaatatacatatgtttatatataaattatatatacacatattaattaatttgttggtttttatttaatgacatttttcagctaaatcgaagttaaggtcgaataaagatgagtggtggttcttgtatcggttattttacaggagctcgagatcccaaagtaagaataggaagacaaaaacagggttctggaaggtaacaggaaggggaaagaaaattgaaggtagcgtaggagagaagtcatatcttaccttctataaaggtagtagtaattcttcccaaaagacagattataccatgcaagagttctatattcctccccatcatcaccttcatcaggtttaatcccttttttctttattaatttaatgctctcatattttatttatcttaataagtttcctttttttattgaattagttgagacccattaatgatttttgttgacttccactaatttgtaacttccaaaatcacaaatctgagctaattgatattttagtacatttagttcaatttgttaaactaaactgaaaaaacacatgaagagtgatctaagttaaatatcaatgtaaaaatactttcaactaatttaacattctaaatatgtctttagttttttgcacatcatgtaaattactcaacatcaaatctttaattacacgtaattacttaaacatcacatctttcaataataaaaaaatgactttttaagaaggaaaatatggttgtctaatagttctaatataatatgtttccagtggtgattttttttttcttactctttctagtaagaaggtacaaactttcttcttcgaacaagaaattaagttggcaggattcaattttggttctgaaacctaaatcacaataagttgtattacattttgtatgatcactaataattagctattatagaacttgtaagaatgagaatgcaatggtctaaaccttgaaaccaatacctttttatatttttcaaatatgcaggatgagtttatttgtcatttgctctttgaagtggaagttggtctctcgtaaaagaggcaggaagtctgataagcagaagccaactcctcttaattctggctcgaagaagaaaaggcagaaggcaaatgcaccacaccacgaggaaggtgagccaatatttggcaacaatattatcacttctgatattgtaaatccaataccatctgctgcaattccacatgtaagaataagaaaatttgccttttctacattctgtgatatcaagtgattcatatttgattaactgtagttcataattgtaggtacttggtcatggtgatgtgaattatcaaccggtctggccaatggtctatccaaatgccaacttcaattaccagacatcgagttttatgcttgacaaggacttccaagttccacctgtagcagatggtaaagtaagtgaaataaccacttttgatcttggagatccatcagcatctgttgatgttagttcattggtaagaaaaagaaatgctctttctacactctaaatcatgtgaggtgaaataaagcttaaacatctctttgttgtatttatgattgcaggtttataacgatgtgagtttacaactatactcaccagattccagccaacagacaatgagtgctgtgtttgggaatgcgatacaagctccatctggagtagaaggtaaactaagtgatctaatttctgattttgcacaagttctcggcaatgagatgcaagctccattaggatctgctgttataagtccaatggtaagaaaaagaatgctatttctattgttcgttactttaagtcatgacaatcgaagcttgagcttctgctttaataaattgcaggaatatagtcacaatgaagtgaatagtcagtttctctcaccattttccacctcgcccaacaatgaggtgcaaatttcatctggaacacatgttgaaccaagcgaaaggaccacatgtgatcttcaaaatccattagcatatggtgttattagttcaccagtaagaaaaagcaacacaactcttcctagtttctacaatattattattctattttgtataaagcatgggaagtgaagccaaacttatgcatctacttgttgtaattgttattgcagttacattgtgatgatgactatgctagttttcaaccggtctcacaaatatcctcatcatcatctgttgtaatcccggtggtaagaatttgcatttcctcttctctacatttgctaatatttaagtgttcccatcaatcataataagtgaatccaattgtttataattcaataaattgtaggatcattgttatgacaataattcgccaatatactcaccacattccaacttcatggagcagacgtggagttctccatttgataaggacatgcaaactccatctggagttgcagatgaattaaatgagtactatggtaaattgccatatttgagtgttggtcatcccccc

SEQ ID NO: 239114 - DNA, 4717 bp, Cannabis indica
gacacctatatatatatatatatatatatgttttgagataaacataaaaaacataaacaaaagttaagcaaaccctcccttctctttctttgctctttttatagacaaggaccaccaccaccactccaatttgccttgtttcctctctattcaataagttctacaaccctttgatagaacctagaagtgaagaaactagtggggaaagctatggtaaggagctagctttcttttgttttagaatatcataggtttgaaaataaattttggggtctgcagtagttaggggttcagaaagcttatggttttgttgcagggatattttgggattagttttgataccccctagaagctttcaatgttgtagagaggtaagagtcatgcttgagcttttaaagcttagagcttgagctctagcggaacttttcatttaagagcatagttttgaatttcgtcacatagggattgctgtatagattttattgtgaagtttagaatgatttgattaggttttggtggggttcgagatgtgtaaaactcaagttttgcgtttcttgtaggaactactctaccgtttgggaaaaaaggttaacaattttcgaaaaattcagttagctatttttggtatttttgggaggactgaaattcgtatttcgaccataacttttcaatcgggtgtctttttagatgttctatataccatttctaagcttacaaagagctctataatatggtatgtattttagagcaaaagtatatgttttattttagggtgtttataccgcgaggttcggtagacaaccttaggttgttttttgcaagtattaggtattattttggaatagacaattattagtttatcgttgttgtgacataaggccgagcttatcaagcattttctccactctggttggccaacatgcatgaatgttgatttcagttatgaaaagtatatctgtaccacatagcatgataaattatgattatcattattaggacccgattatgattgaggtaatagaatggtgattaccgttaaagtgaattaaagtcataattgtcttattagaaactggctgagatatatggatggcaattagggcattgacttgccgtattaggcaatgtgacatatggatgccaagttagcgcattgatttgccttattaggtaatgtgatacatggatgcaagttagggcatcaacttatcttattaagaaatgtaatagatggatcctaggttagggcattgacttgacttattaggtaatgtgatacatgatgcctggtaaaggcatcaacttgcattattaggtaatgtgatacatggatgcaaggttagggcatcaacttgcctcattaggcattgtgatatgtgaaggctagtttagggcatcaactttattaggcaatgagatatatggttgccgagttagaccatcgtacttgctttattaggtaatgaaagatatgaatagtggggaatgatttttgggttgtttaatttaacaacaatagtaagatttgaatatcagttttgagtatcagtgtgattttattaaaaaacggcaagaacattagtatgccaggtgaggtatacaaattatatcgatagtaaagttatgagaatggttactttatgaagtaacgactatagttattataattggactggtaattctatataacaatatattttattattgacatttttatgtttgaatatctgtattgaccaaaatttccatatatgagtaatgtatgattattttattctgatgatgtgagtttacttgttgatattgtgtggtaaattatattattggttttattacttttcttgctgagtctttgtgacttacatgtgctttgtggtgcaagtaaaagcatggattaactagggcagccatgagatgacagcctttggtaaatgtacatattaacttatctgacttgtgtggccgagttttcaggagttgttttgagttgtacctaatgtgtattttgacttacttttttatgtagcctttttgtaaaacttttgtaataggggatccctgaaacaaatttttagcgatgtcatcatgttcactgctatggtttttgtttggtgaagtttttactattatcaaagatttgatgaaatagttagtctactattagtaaattgcatttcaagagcacgcatgtggtgtccctagggtttagggagttacaactttttcttagagaagccatggttttaatggtcatgaagacttgtcggatatgtacatttactgcgaacacaagtcgacttataatatagtaagtgtgatgtatttacttgcctatttattacaaagcaaagtagaagagtaatatagtaataattgtgatgtgatgatttgtgtgggatatgcttattagcattgatatttggttaagttctaaatggttgggagatgtggactacaagtgtattaagttatgcagtcagggctatcgaacaaataacttattattatggggtagtgggtcatctaaaaagaagttggtcgtaattaaggaatactgaggtcacagatgaagagtctattggtcatgcccaagcattttttctaactgaagctgatacgggtgctagtccttcgaccgattcaaattatcttatagggtagacatattagagaaatgacaaaacagtaagatggttgttcataagttaaattattgatgttccccagtgggatgtagaacatgagtagctattagagacatccatctaattgattcagacaacataatcttcttgcctagaggttgtctagtgttagtagaagtttgaaaacttatgagtatagtctgaggtcttaggtgaattgaggacaatgattatgtgagttgatcttttcactaccaaggaaattgagatcgagggccttgattcaaaccttagtatttgaaatataattaggctagtagcgtataacatgatgtcaaagaaaatactggtgtccctaaggtagagaagattacctaaatttcccatggtaatacaaagatggtgggaaatacttttaaattttaccatattgtcaatttggtatacaaggtgaccatgaaatcttgagaaaggttgtcttattagacaatgatgtaaaggtatgctcacccagaatgcgaaagagtcataaattgagatgcaatgtaatgaacatgtattcaagtggttagggaatgtcagttatcttattagatagcagaggtgatggctttattaaaaaataaattgtataaccaattgtgatttgagattaagagtaatttgttaagtcaaaggtagtgttgactaggaaaaagtagaagtaacgtgggaaccatacaatgaaattctagttgtaattaagggaaagaaattcaagaatctcggattcttattggttagcactggtatcaggagactcattataagctaggatggtagcttataccaagtgatttttagtggaatatagagtgtagatgagatacattttcaattcggaaggttataaagatcactattaaaagacagaaatagacttgaagatcaaggaatgatcttcagttaattgttattagttgaggagtcgggaaatagatatttccaatttacctatgggtacttgctatgagtaatattgttcctattatattcttaatgttagataaactttatagtggttgttaagattgaatgattaagaaatgtcaaagttgtttgagatgaacaaggtttaagttcatatcaagatagcaactcctcatggataattaagcaatacagacaaagaattgtaaaaggtcaatgaaaggaatggttgaaaatggggatctaattgggacagagataaaattaggaaatataattaagagtgacaagggtacaccttctttctgataacccagtttggagttaagcgtacttaacttggagtaatcacaataagggaaatcttctaggaaatcatctcagaaatggtacgagtgaggacaaagtacgctggaaagattcatattggatgcatgaccacctacaattccaggatgtatcaagaggaaaatatattaaagagtaaagattaacaagacattgagatgagaatatatttgtaatgaccgttatttttagacatgggattagtgggacacttagcactaattaatatgactatgtgattatttatatgttttattctttatagaccctattttcatgaaaatatgtgttatgactattatttcacaattctggagattttattgaattatatgtgtgatatgcatgctatctgtgaatttttatatttttatttttaagcccgataacagtggcaatgggtcgaatggcaattttagtcacatggacacaaatttgtatcaagtattttatggggcaatattattgaatatcttaaaaatatcaaggtttagcgaaataacggaattggaccatattacccctagggctacgagataacttggcaaggaaataagggcattttagtcttttcacccttagagcttagtcactctttttggaagggatagggggctgtggatcatccttttgaggatgaccagcttcttaggaagtaaacaaaaatcaaaagcaaaattaaaaggaaccaaaaagaaaaagcaaagtcaaaagcaaaagaaaagtaaaaaaaaacaccaaatcaccttctcctt

SEQ ID NO: 239115 - DNA, 1386 bp, Cannabis indica
ctccaccagaactgactaatggcacgctcaatattattgcagattccaacagggataaggaaaacattcatggtgcattgttattgttagattagttatagtatatgaaaaacctatataacttcttgtattatcttgttctattaccgattttcaattagttcaatttgatttaaagctattagctgtaaagtgctgaaactaaattaaaaaaaaaaaaaacaaaaaaaaatcaatttagatgcttttcttgtactaaaaacacattttagtctagcagtgcttggatttctctaaccaaagtaacatgcactatatgatttgtaaatatacaaattccaattcttgtacaatgatcacaaattccctaataatgaaattatccaactactaaattcctttgtaagatcctcttgcttcttgttcgttaaaattcttgtaacaaatttttttctgattttatagaatacagtaaaaatataaaaaaataaaaataaaataaaatattaaaatataaactttttaccaaaaataactgtagttttacattaaaattctaataatgtataaaattaattacttgcgtataatagagtacaataattgtacattttgtgaaaatttaacattctcacttaaaattttcttgatatatgatactttactggatgaatattgtgaaaatccataactgaacagctccagcccttaatatataatatcgaaattaaaatgtaaaaagcacaataatcattaactccagaaaatattcccaaaaatatattattttgagtgaattattgataattatatgctaaatataaccgacgaatatatagaattgtataagtactacatatcaacctctaaactaaaataaaataattgttcaactattattcaaataaataaataaatgttcaaataagattaataaataataattaaaacatttctaacttaaaccatctccaagttttgagggacaactctgtgttgttgatcatcatcatcataatatttttgccagtaaggatgtttacgccacacgatagacatttcatcaataggaactcccttagtctccggaagcaacatgtagataaacacagtcatgatcaccacgaacaccgcaaagaaaataaacagaccaaacttaaggtgacaaagcatggctgtgaacacttgagcaatacacaaagtgaagatcatgttcaccgacacgttaacactctgagccgctgatcgaacctccaaagggaatatttcactaggaactaaccaccctaacggaccccacgaccaagcgaatcccgccacgtagacacagataaagaacaccaatccgtatgcataccagttgggaagaacgcccgggttgccgct

SEQ ID NO: 239116 - DNA, 2315 bp, Cannabis indica
gagatagatgacacagagtattgaacttcaaacctcataggcgtactgacttatccctcatgggatgcacataattatattctgacaaagctctatccactaaagtactctagtgatggattgaaaaagatgcaaatataccacagaaaattgaaattgaactgcactgaaaaggcactaagggaaacaaacagttgatgtaaaaagtagcataccggtcttagagttgaaggtgacagaatgtgtaatagtagagaaactgattcttctacgaaggatgtaggagataaatgccttgaaatatgcggtggaatcgtgtggaaccaagaacttaaagtatctcttttttcaatcaccattgttcggcatctaaattttcataaaagattcaaaagttagctaaaaaagcaaaactattccacattttacttctacaagggtcaatagatacctttgattagactttggccactcaatattggtttttgaatttgggctaccatacgatgtatggtaattgcaatagctggctggtaagctgcataaaagagaggataaaacaatttagcaaaaaataaaactgaaataattggatttgtgttgagtcaaatccaaagaaagagcggaagtaaattgtattaccataaagagacatttgttgagtgcgcataatatattggtgcatgtagtcagaaactccaagattatcaaagcatttgaccttcaaaaacaacatagtatgaagtcaaaattgtttttctatttttatattttaggctgtattcagtgagatcatatcaagaggcttacagttttttgcatcactggatcatgataatgcagctgcaaaatattttcatgtataccatccatgattaaatcatagtcaccactgcaaagtaattgacagttcagcttaatatgtgacttgagaaagagcaaacaacacttgcagtaattgcttcttaccggctagaaatgagagagtgcaaagagtcaaactcactggaattggtctgactactattattggatctcctttctcttttcggttttctcttttggaaaacctaaataaagtacatcatcaccacatgtaagcacgaaaaatgatgtcattaacaattaaaaaaacatggcaaaggaatttagttcggcacctcacctctttccagatatcaaagacactttttgacatatcttttcgtccaaccacttgagaaccaacctccagctgcaacccagaaaagcactttagtaaaataaaccagcaaactcaacagaaaaaggaaaaagaagtaagctagtatcagagatccacaaaaattaaatacaacggtctgttataaaagggtgagaataaagagaaaaatcaccacattgagggattccttctttttgtgtaggaactgaagagtattcaagcatgagcgtatgtcacattctgccacacatagaccaaattaaatagaggtcacagcaaaagtgacaaataaaactacagaagatttggcttatatgactggttttatccagttttgataggatgccatagtcaaggagttgtgtaatatacctgtataatcagcaagtgcagtgagtccaattgagctagttttcatcccctctttgttgcatatatatttgagcctgtgattaacccatataaaaatagcaaaatacaaattctaatataagaaacacaagaaaaggcaataaaaatataagcaatgtgaatgcgtagtaaaaactatcacctgctcactacacgactaactgttggttgaacaaacacatgaaccctgcagagaagcaaatacttagtgcggagtcaaaattaaaattcaaataagaaagaagcattgttataatattatgcttcaatgtgcacatttacaatttaacaataaagtcttgcttgtgcgtgatatattaactgacaagtgagagacttactttgccacctgacgcaatggtcttaaggcaggtgcatataggtcattgcaaatgcaaattacctacaaagttggccaatttattaactcctcgcaaaatgaatgttgattaagccacatataatcattgaaaactcacaggccttgacagaggttcacttttacggcccttcttcgaggatgttttatgtggattgtcttcattagctacattctccttccctccatcagacttcttatcagcagagacctagaacaaagaaaaaataataagcagagagagagagcaccaagttatacacatattctttgtttatttttctgtaggaaagacacaaaacacgattttacatcatcaca

SEQ ID NO: 239117 - DNA, 3036 bp, Cannabis indica
tgcactattttttcgttgaacaagttttgtcctactaaattttctaacaagattttagtgagacagttattatagacatccaatgagaattgttataaattattatttatatgaatgtccaaatcacccaaatcgtttctattaattaccattaattataattattgtttctctccttagtttcctaatcaatggctcacgtatttgtataaataggaatcactcctttataataaaatattgagaaattctaattcagtttcgctttctcttttcatcttattcttttttctttttatttattttatattatttataataattttataacaaataacactttccttttttatataaacaacacattattaatttagctacctgttggagacaatgctgagaagaaaaattatcaataaaaaagtaagagcaataattaaaactttcagaaaacgtactttattaggaaggtgtaatactggtttttgtttttataatattttacagaaatgtttgtacaaatttaagatcgcaaatttgcattaggatttaggagagtgtttgttgacataattttatttaattatggttatgttgtagataacacttaaaatcagaataaaatggctcactgagcacaagcttggttctgtccatgtaaatacggtaattagataccatcacaaaatcactatcaatgcaattgcagtgtgcattttgatgattcactttgatacaaagctttatatatgtataaatatatataaatataaagccaaaatcataagggggtgaaaaggctgaaagaaatgcagcaaagatagagccaaagtcgcagtatccttccccccaaaaaaacaccacctttttcttttggcaaaatcccaacaacgatttttccagtataatctatcatgattgaaccgttatttttctggttattctctctaatatcgatttctaaggtggccatagggacctctattccgatagacattttcgtattagcaggacagagcaacatggccggccgaggtggtgttacacatggcgcatgggaccattatgccccaccggaatgcagccccaatagccagatacttaggctaagcgctaaactaaaatgggagagtgcccacgagccactccacgcggacatcgactccggaaaggcttgtggggttggacccgggatggccttcgccaacgaggtggttagagccagagggccaagcgtcgtggtgggactggtcccttgtgctgttggtgggacacgaattaggcagtgggcccgaggaactccgctctactctaggctgcttagcagggccaaacaatcattgaagaaagggggaacgatacgcgccgttttatggtttcagggagagagcgacactgtgagaacaagtgatgctaaggcttatggtgggaacatggaaaaattcataatcgatatccgctctgatctaaatattccgaatcttctcattatacaggttccatctctacctttatttattcacaagtggttttcgattattttagtagatttacaatgagtatattttattcatcaaagatcataccaatcaataatagatataaggaataataaatcctttaagagtgactcgtgtaattatttctcaataaggcaaaggtaaaaatataattgttttgtatgaaaattatatatattgttctatttctggtacaggtggcaattgcatctggagagggacaatacatagaggaggttagaaaggctcagcttcaactcagcttaccaaatgttaagtgtgttgatgccaagggattgaaccttaaaccagataaactccaccttacaaccacttctgaggttcagcttggtgtcaagttagctaatgcctttcttgcttcataataatgctcatctcagaagggcctgaatttttcagtgaaagatgtattcccttattggcgttttaataaacatagcaaatagattatggaagccttaattgttccaaaatagtatttgtgttcatttcatttagaggaaaaatataaggtcaattcttcttaataaagttgcatttgatcgtaaaaatctctctaaactcctcattttaaattttggttcagagttagtttaagtttttaatatagtttgtttgtactggaatggattttgttttttttttttttaaactcttttgatttgacttctctaaactccaaaattattatattttttataaaagaaatctttaactaatactttttccttaaataataagtaataataataataatactttcttagtcaaatgataatgtttaggggatatatttataattacaaagttgttgatggtaaaatctcatcaacacgttagttggttggaaaatcaagaattatcaagtaaatggaagaaagatggaagaacttaaaactcgaaatacatatgagttgcatagagaaaatggagagtgtattactcttgcatagctcccatcacaaattttccaaccccttctcttatgaagggaaggagtatttattgaaggctattggcctatggtacaagtggtctcgatgttggtcttaatggtctatcaaagttagaaaagcaaaaacggattcacttaaaataatttaatccaatatgaactataagcctaaggatctcaacataatatatatagattaaatctagactgatgaactataagcctaaggatctcaacataatatcttgtagcatatcaggggattcttgttatctttttgtaatttatcgaacgtccaatctaagaacttactgaagagttcacaccacaatattcaaagccaatctcaacggttaaaaatacagtgggctattagattcgattggataagtataattttaaaatcacagcatattctcaatttatgagatattgtaaagagataggaacgaatacaaaactcacactacactgttgtgtgtggcatgtgagttgagcaaagagagagaagtgtgcgagtatgagagagagagagagaaa

SEQ ID NO: 239118 - DNA, 1484 bp, Cannabis indica
cagatggaatcggcaagtgaaacgtttttttttttttgagtttagagcgcgaaagcgaagcaaaaacaaacccccacgaacagggagaagcaaggacaaacgttcaaaagagaatacaaaccagtaggaaaactactaaaaaccgaaacaacaactaaaaaaaggaaggaactaaactaagttaacgagtggccatccgtatcccaaggatacagggaaccaccaaaattggccaaatcgaagttgccaaacaccctgtttcgatttgcccatcgggccgcttcatgggctacaccattacaattcctttggatccaattagcctcccacaggttaagtgaggctgctgcacaatgaaatctttcaagaaggctttgtatattgtgatgctgagtgcttgtagaggatcggttactctgaattgcatcaattgcgttctttgagtcactttggaatatgacattgctgtatcccagagaactcgctaattctgctcctttaactaaagcaaacatttcccctgcaagagagtccctgtagaagcattgaaatgtgtggattttaatcgtttggcctttgtcattcctaaagattgctgctcctaccgcatcattgtttcctagagaaatatctgtgttacacattagccaaccaggaggaggagggagccagcataactggctgttgcagaatccatcttgcacggcagttagctccataattcgacgatttatgtggctgatcgcgactggtatcgggtcttgaatatgatcatgcgtgaatttattcctaattctccaaatttctgcaaatatagcagcagcccctcccaggaaaaggtgaaaatgcattcggttgggacgattattttcatcagagaaccatgctagccaatcgtcccagctggaagtcgtgagagaatcagtccgtacttgccacaaacagccaaaccaaattgctctcgcgaaagcacagttccaaagtaaatgaatcgaattctcatcatccaaattacagagggggcataggattgagtccatgttaaataccatacttagtctggctctagtgagaagactattagatagaattttccaccagagcgtcttgagtcggttgtggatccgtgcaccccaaagagttctccatttggcataatcaggcctgcttatgttaatattcaaggatagtctataggctgacttaatagaaaaaattaccattcggttctaggtagccatagccatgaatctttggattggttgtttggaagcgatatgttgagtatccttttggagtcatcttcattaaaccactttctcactaaggcatgatcccattcattgttgtggataaagttactcaccaagctgataccacccgtggcatcaagtcgaggggccggttggagacatccccctggtacccatgggtcgaaccatatggaggtgtttctgccgtctccaattcttttacaaaggcct

SEQ ID NO: 239119 - DNA, 3176 bp, Cannabis indica
tgttattttcaaaaaaaaaaattaaaaaaactacaacaaaaactctaatctagcaagcaaaacaagaaaggaagcagcttgtacttttctcaatttcttcatcgaagtgtattttgagatattaacactttgaaacttggacagataccacttttagtacattttttttatttcagcataatttgctgctcgaattctttagtctttgtgtaccgtgtttgatatatatatattttatacataattggtggggcttggacctaccacttgtcatcttaaaatgacattttgaacttttgttaatgtattggacatgagatgagagatatgttttggtctgttggtggtttacgtgattctagggtgtctaagcatgtcaatgaaagtcatgaccagcttcagttattctttccatttcttgtatgtgagtatgcatattaggttacacacatttattaatttctacatcgcatcttgtgggtgtggccatgggctggtcatctacggaaaactttggctgccttgtgtttgtgattatgctgattagcttatgatattgtacgtacaggtcaaaggtgtagagcaagaatttgacgctgaagaagaggatgcagcagtgagtggtcagatggaataggtgaataaattactttatttgcaaacattttattacgtaactttaacccaagcgggattcgggatacactttcctgtacagaaaacaaatggttgtctgagtctgtagaataaattttgtgaactggttaccaaatagatgcgaaccagtaagaataagattaaggttttattgaaattgatttgctaacaggattactgcctaatgtgtcatttatatgtatatatcattacgtatgaatatataatatattgaatttgcttgtttaaagttttacatgattagagtgcatgctgcatttgtcataacagtaaactagtttttccatgtcaatttggttatttagttggatctatagataaacaaatgtaggacagagtatatgtgttcgtatatatttgccactacttttgaagcttaaacgtagaaatgtgagtgaagatgtttatttgtcggttaatgaatatgttggtagtgtctaagctgtaactgaaggaaatggttagattagaataccaaacatgtatatgatttgccaagttcttaaccagatcgaagctatttggacttcaagcaatagtttgtgtgctacaccgcagagtttttattttcctttctaatattatgtggcacttagaattctaaagggataagttgattgatttgatttttgaaaacatgctgaggttagagatgacttagaggtatcaaaaactaatgatggccgtccattgtggtggcttctactgttaaattcacataaagtaaaactgtcttggcttctgatgtaaaatttacgtctattttacctgatgggggtggtcaagataaatggttagtgaaagtcattatcaccacctgtctttttcattctttcatttgtgaaatggcaataatcatagactgtttctatctatagcccaattaaaactgaggtccttgtacgttttgccgacggccaatgtgagccactccttttcttattgcttggccttttctcttctttacgagagaaataaaggactcggctgttgtggtgccttagaagcaaacatatccatcattttacttattttatttttatttatattttctagaaaaggggtacaagtttggattcttggctctaattcgacataccacaattggacatgtgaccaaaaccccacattccactacacgcccaaggggttgccatgctaatgctaccccttaatgtttttttttttcactaaccaaaaaaccattgatttagtgcaactttgtctctaaggccaactgatctttctgggtttgttcatttaattgatattaatttttctcaaactgtcagttaataatattatattcatatttatatatacaaacacacattcatatataagtcaaacgaatagtacatgtccttagaatgcaattggttaatttggaaaggtagtggtcctcggttgtgttattaaaatcatcacttggattcttcattttcatcatggttgtttaattctttacttataatttcaaactgctgagctcagccaccctttttttccattggccctcctcactttccttacccattttatctaccaaatccaattggataatacatattcacttgtactttaccattttaatatttataacgctatgaacaatgccgttttcaaaacgttgagacaacttatttaaataaccaataactaatacttttaattttttaattaaactggcccatgttccacattaaaaatagctcatctcctcaaaaatttagcaaatgctattaattagaatgtttttcacatttcatgtggtctgatgactctgatctggtctccactaactagtactacaataaacaatcacgagagtcacagacatattttatggtgttatggaggcatgtgaaaaatctgtctaaataggttagaagggatgcattataacaaaaaagcaaaattttcagatcgtacacattactaaaattcctttagaacaggtataataattggttgaaaatccacccataatattttagtatacaacaaccactcagctgacacatcagaaaattatatatttttcctttttaaggataaatttgaacttttggtgagtcatcgcctacctttgacacgtcagttttttttcctccattcataaggaagttatagatgaattttgaaatcgaatgacatgtggctttggattattttactctgatttgccaattggattaaatgtaaatgtaaatgtatgtttaaggtttaacagaaaacagtgatagaaatcctaaaaataaaagtcataagagctaaaatcaaccataaaaacagattatgacagcatttaaaggcaattaaaaccaagttatggaaacgttgcaagtcaccattcacattaaaccttatgactttatcttttattgataccattaatggcttaccttccccattgtcaatgacttaataaatgtgctataaaatatctagcctcgtacctttatcactcacctatcacccgaatgattttaaagaca

SEQ ID NO: 239120 - DNA, 4611 bp, Cannabis indica
taataaatgtggatacaggcccggctttaagcataagcgagcttatggcccatctcgcttagaagtttcaaaaagattttccttttcaaatatacacatattttttttattgattttgaaattatataccacattttaccgtttttttcttatatttttaaggattaatgtttctttataaaataacattgtttttatattaccgtaacattatactatatatccataatgtgaaaacaatatataaacaatatctttttagaacaacctaaaaataatagtccgtaaaaagtaaaaaaaaaaaaaaactataatccataaaaacgttaactttttgttgttttcaaatattatgaaataatccatgtaaaatttcagagtgttcatcctttcttttattgcattaattaatttttgattactaacctttcattaccactatgtaacaaaaaaaaagtgtactttcacaaaattaaaccaagaaaatgtcaatatataacaagaactacccttattagaaccccctctcaccaaaaaataaaaaatgtaaaagttggctgcaaattaaagcaaacttttaacataatgtagagaaaagaaaagtagaatttattctccactacatacatttttctcattagctcaaataaaagtttgaaattcataacactaattaattagtgtgctagtacaacaaatagaagtcattgcatataaaattggtatatatatatatgtataaataaatgtatactagctattatataattaatggtaacatgttttgtttactaccatattagttacaatatcattatttggttcacgttgtatggtaaccaattacctgtgaatgtatagaataatattagtaatcagttacctatattggccataatatgcatatataattaactagttacccaaacattaaacccttatctcaagagtatctatttatgattttcttagttttagattatatatgaatgataatcggtacttatatatgcatatctatataaatataagtagcgagttacccttatgaaggtaataagttaccctaatatggtagcatgctatttaacaatatcataaacaaaaagaattagaattataatatataggtaatcaatgaaagaagtttacatatttgcttaacaattgacctaaattaatatgaacaaaacaagaaaaaattgatgagaaaaaaatatattttttcctccccatcatccttacaaataagtatttaaaaatagtagtaaaaaaaaacaatctcttcggaaaaaaatattttcaaaaaattgaatttgtttagtcgacagagaaatatatatttttttatccattaattaaaaatattcttatattatattttattaaaatatacatacttttataagtgagttgtcccatatacacttactctctacataagtctagcatataatttacattaattaacttaaaaaatctaatgagaacatcatagttagtatattttaaaaatataaaaataaagataaaaattaaaataaataagataaaataaatatttaatataatttcctccatataagtcatactactcaggcccgtcacaaactaattggggccttggtccgaaacatttatttaagcttttttgaatgaagaaatttatgttattttaacactatatttatatctttcattagaaataatactctaagaaacttccctttcttaataaaactgaacaaaatttcattgattatatatagaatgatcatgaaatacatattggttacacaatagtgtgaaatttcttccaatcaagaattaatcacaaattttttatctaattaaatcatacattgataataagattctaacctctaagaatatatgaaaattttgtttaattgttcatcctactaattcccatggtgtctatcaaaaggcttaagcaaaccataagtaacagccatagccaaccaccctccaaccacaactctaaccgccgaaaccttaggccgcgacgacccaccaaaccgagcaccgccccagccaaacatggccagggccaaagtagccacagccacaatcactacaacacttgtcacatgatcaccaatcaacgcagccggtatcaaaggaacaaccgagccactcaaaaacgccaaagccgaagccgcggccgccttgtgcggattcggcaacacaattgacacaccactttcttctccaccaccactcacaattaacttctcttcgatgtcccgttgcgtagaaacagaaacaaactcccctacggccatactacaagaccccgctaaagctccagcaaggccagctagagacatagaccaacggtcggtcttagctgcaccaacgccgagtaatagcgaggttgttgagagcaacccgtcattggctccgagcactgctgctcggagccactgagcgcgttctaccaccacctccacttcgtcattagtggaggtagcttgagtagatttgggatcattagttttgaggttgtttgggaccatgtttggttgctcacaacatatttgttgtaatgtctgagaagccatttggaagtgaaattaaggaaagttttttctcttgtttttgtcaaatatgtgcatattttattggaattggagtttatatatttatatatgtatttgtatataaaatttcaccaaagagattgtattattttatgttattatgatcctaaaaaatgactcatttatgtaagtaaaaacataatattagtacgtatagaccaaaataaaagtctaacgacttatctgcctaaaacgacaacgttcgtactgattctctctttgtctatatattatattatccccaactaaataatttttattattttttgaacaatattttatttgatgtgtgatattactagctagcttttaccaatatatatatttttatttttaattatgctcacatgtaatttttgaaaaatggcacctcgtggccccctatcttcatcattgcctttatacttattttacaattatatatagtaatgattctctgaactttagtgtgtactgaattgtatatttaaaattattaaattattaaaaatcctttcaaagtattaaagttatttgatttaaggattttggttcaattttattaacagtctccaaacataaatggaagttcgaaaggtgtaattcgatacatgttaaaattcacgagtcacaatttgatacatgttaatgtttagatgacacaatttaatacataaataattactacgttaagttaacctctgttagtaaaactaaacataattgtattaaaatccttgaatatctaaaagttttaatagttttaaatttttttagctgatgtttgaaaagtttagtaggctcgattacatcttaaggtttggatgaaataaatcctagctaattaattatatgaaaagttgactcaatattggaaatattagggaatttcataacttaattactttttatggatatcgttatctctcttattatcataaaggtacatggttattcttaactgattaattttttattcaattttttgataaaacaattgtgtcttgggcaaaactatgcacacctaaggtgacggggggtcttggatttcgatcaaccctcgctactaatcaagcgtttcttctgaaatgggcttggaaaattctgatagatgagaacagcctttgggggcaactaatgaaggacaaatacatacaaaaccaaagctttttggacttggaaatcaaaagcccggattcagtgatgtggaaggccattctcagggagcgatctttactcatgaaaggcctctgtaggaggataggagatggtagaagcacatccatctggttcgatccctgggtgcccggggggcgcctccaaccaattccccgaattgatgccataggcggaataagcatggtaagtaacttcatccgaaacaatggatgggatcataccttagttagacggtggtttaatgaagatgactccagaagaatccttaacatctcgcttccaaacaaccagtcgaaagattcctggctttggttgccagagtcgaatggtgatttctccataaagtcagcctacagactgtccttgaatattgatataaacaggcctgaatatgctaaatggagaactctttggggtgcaaggattcacaaccgccttaagatgatatggtggaaaatattgtctaacagtcttctcaccagagctagactgggtatggttctaaacatggacactgttctctgccctctctgcaacatggacgatgaacattcacttcacttgctctggagctgtgaattcgcgagagctttatggtttggctgtttgtggcaagtacgcactgatatcctcacggctacaagctgggacgattggttaatgtggttctctgatgaagacaaacgtcctaatcaaatgcatttacaccttttcttgggaggggctgctgcagtgtttgaagaaatatggagaactagaaataaggtaactcatgatcgtacgcaagactcgttgccagtctcgagcaaccgtatcaatcgtcgactac

SEQ ID NO: 239121 - DNA, 5003 bp, Cannabis indica
gcacaaaatcggctgcctatattaataatattatatcagttgtttattatttttttctattaagttttgagttgcatgaaataataaataataataaaaagaaaattagaaaaggttagaaaatagagaattgaaaaggaaatccatatatcatgccacattacttattttaacaacggaattatataaatatatagagagatataaatatagatcgattgcttattagaataatagaacaaaataattgattgggaatagtcccttgtgcaattaattgaagcataactagttaggattagttccttatgataattaaaagagcttaattgtggggcatggtcccttaaggaaattgtatgtattgtttgtatttattgcatgattattgttgagtgtggttccttaattagttggaagtatgcttgtgctcggttatgatcgtgtgaggtgagaatatgaagggaattctttgtctactactcaaggtgagacagataatcatcataatgcgagtgataactcagagataaagtaaagaaattacatagttagggcaataggttctactagtgaatgttgctcagaacattcctccagccggtacagaaggtccagggtcttggggtaactgaatcagttggagtagttgaacaaatggttctacaagtgatacattccagtttgtaagtatgacttggatttagtacaatatttaaatgttacattcgaaatggtctaacaataaatatctccatgtgcgatgtgggatttaccttagtgaaaaatcttgattagagagccttcatatgtgaatgcgctcctaaatgcttgagagcttactcaactggagattatgatttcaaaatgactaattttattttgactaattagaatttttgttctcgaattttaatatgtattaaattatgtattttttttaaaaaaaatttaacaagtaaagtctaacatggattaaaattcaggggacttggtacatgtcaaaatttgaggaacatgattttgtagatattaaagtttagggagcaaaatttaatatatagacaatcatagaattaataaaattgaatgaaactggacaaatatctttaaatccaacaacctcaatagttgaggagaatttttaacggctaaaaaagtttaaggaacatgatttgatacatgtcaaagtttagggacaaaaattctaattagtcttttatttttattattttgtaaaaatattttttgtaacttttctaatgttgttgaaagttgttattacaaaaatatgatcacaaacaatatacctatcatatgacatatataccgctcatgtgcctacaaaaatattggaactatttttataaagttgcttacattattattcgggtatgaaagtaacaacattcttcacgcttcaaaaacaatgctacacatagtataaactttccagcacaaagtatgaactttacataattaattaattagtatttactcaccaataaggctttccataatatgttcaaacttttgtttcacaattctatcaaaaactgtaccaaaatcccatttcagcaggctttggatttgggttacacaaaagcagtttagtgtaaagtagtcaacagaatccattccaggaaagacataatgccccttaatttccaagtgaatcaaggaataaatcaatgatagtaaaatgtgattcttatgaatccacttttatcatgtttccgatttccattgaaaaaaaataaataataacttgtagaacaatccagcaaaatggagggaatctaaagctgtctttcacaattgaaaagctaacaaatatagtcatagttttatagtgaaaagtggacacaacttgttttctgggctatgtgctgaaaagagaaaaaagaaatcctttgcttctatatgtaacagtgtccaaagcattttactttgcttctacctctgccctgttcacaatcccaaaccaatgataacaacatcaagtcatcaacagtccacacttctacttttcctcagaacctaacactattttctttcctctggagaaagagcaggaaagtcctagacaaaactcttcagcaaaggttatttttgtttttgggtaatggacaatttactacttaagcaaaagaggtacatttgaaccccaactcagacttatttagactcttagacggttagtagttttgtattaaacatttcttttttggtagttaaaagcaactggagaaagaaatgataaccattgcaaaccatttatgagggcagttttacaatttgtaatataagctttttattatcaatttttgattcaagtattttctgtcccagagtgaaaatttcaggtcctggaccagaaaagcaggaacagtctaagggtataaaaagagaacctccatcatttcaactatctaggtctcctaaagaaggtagttatatttaatatgaaacttgctttttgttcatgtatatatatatacatatcatcacaacttaaattatatttgaacaccatgttttatctagtatgaagatcaactaccatgtcaatatatgatcaatttacttttgcaagattttcatgtcatgatgaacatttttgtagataaagaattgccacgaaggccatcggagaggcagtacttttcgagcaagatgaaggataacagtgaaagagacatagattatgctactgcagttgcagctgctgcctttgctgttcactcaattgatcaagttgaatcccaacaccaaagaaggaagaaggaatctcttgatacctcaaggaccgggaaaaataacggcaggaatagtgagatcacagctgaaatgccaagttctagtaaagcaaccaagctattatcaaacaaggaagctaaaagtgctggtatttcctatgtttgcatagtattatctcaatgcttttgcagaggatataacattccttgttttttgtataggtgaagcttcaaggaaaaggtcagttagcctcgacaacaaggtgtctcagagggtttcaccgggcacaccatcaagccacacacagaaaggagtgtcactgggtatcaaaggcatggaaaggaagccagactcttgggagatagctcagatgagaagagttcaagaaaggtgaacaatgctacttttcttttcttgttgtaatcacttaagcaaataatatgtcaactttaagattgtgtttgtgatcatgtaactttcaggtatgagaagacaaaacatgccattctttcttgggaaaatgagagaaagatgcaagccaaggctaagatggaaaagagaaaggttctcttaaacactactagttgtatttattgattgagaatttttggtttccttttcaatggaatgacataaaaggcacttaacttgtggaaattgcagattttattggagcagaaaagagcacaaacgatacagcattaccagaacaagatagcaaggatagaaaagatagctggaggagcaagggcacaattggaagagaaaaggaaaaatgaagagctttcagtgaaagaaaaggaaaggaagataaaatcaggaggcaaagttcctgtgagatatttctgcttcacttgttgataatacaaaagatgaagtcgcaactaatttaactgtttcctaaccagaacatgtatatttatctatgctttaacttatgcttcatctttaacatgttaatatttactcaagatggaacacttgtatcaaataaacacatataaatacatacatataatacaataacaaaacatttgtgacaatatagattccaatataagttacatgaaattagagaagaaagagggaatacttatgaaaaattatagtaaatgaaccaaaaatataagattgtatagctaaatgtcattattttaaaatttgtagagaaatgactcatttatagtatttattatctaaattgtcttttgtcatataaaattttcatagttcttacatttttatgttcaattattttttctttttctttttccattattttataatttagaagcatatcacttatatatcatggtatatttatttaattttgttgaagctactattattttaagttatgtctttttttttaatttatatgagttattgtgggttgttagtatatatattttgattgtacaatatattttttttttgtactataatatattattattcttaaatgatattaactttttattttgttatgtattgttgacctcacaaagtgatcaaccgacagcgaggttgtatgttttgatgctcgccacatgtcaaataaacaaaaatgaaaacttaaagaaccgttggaaaaatctattgcaattaatcacaatattttccctctttgtatgtcaaaaatagaatacttatcaaacaccacaataaacaatcaaatatcaaccaaagcaccacaagcaatataaaatacacaaatcaataaaagtgagacaccaagacttttatgtagaaacccaatgcagggaaaaaactacgggaccatagtctgctcaaatcatccactatcaccaaagttcaataatgagatacaaagttcttctctagtaaaactagaggctcacaacaacatcaagattaaacaatcttggatcaccaatacaatcatcatcattatctcaaaagatggatacacaaaaagaaaaaagtttgggtcacaccaagtgggtattgtagaagagcaccttagagaggaaaattgccaaatcagaaccaaaagatttgaagagcaccttgcaaggatttgttggattttatgccctaaataaaaccgatttcaatataatcaaatttactaattaataaaagatccgaaatcgtcttatattgcatggttcacatgatttatttcatgattatacttaatgtataattctattaagtcaagaacatatatatttattcatgattatagtgtcgtgagcacagtggaatataatcatgat

SEQ ID NO: 239122 - DNA, 1831 bp, Cannabis indica
aaacgtaactactctctctctctctctctctctctctctctctctctctctctctcgaatattatgatcattacttaaactttattctaattttgataatattttgtaacatgaaatgggacaccttaagtccatcgacatttactagacagctgggttggaaattttagacaaccaatcagaaatttcaaacactttatcacaaaatgttattttaccaatgtataggtataccataagaaataaataaataataaaatataacaaaagaacaataaactgaaaaagagactattttaatctattaatgaaatgttatccccatatacatgtgaacataaaaaagtgaaaacgcattcataataacaaagtaatacaaaagaagatttttcttaagaacattttcttacttaaattaagggtaacattaattcaaaccaccaaaaagatcttcccggttcctcattcctcattaggattgtcctattctcatcttttcaattgtttattaattacatgtacatatataaacatatttgtactttgttttattgaagaaacatagtaaaagctcaccatttactataattaaattatagtgaagtttcttttaaggttagtgaccttttctcaaatgctaccaacattatataaataaatatatctatatatatatatatttcattgatagcgcttcatttgaaaggcattttatgttatgaataataaagaagaaatcaaagtattgatgatgatgataaagctcaaaagacaaaatattggtcgatacacacttgatgagactaattagagagagtactcctgtgttgtaaattatcattccacattccggggcctctctcttttgttcttttttttttcttccttgtgaacacagactagagtctcacaatatcacgttacactttttattaaaaacaaaacactttgttgtgaattaatttgattcacatattaaatacaactttatatatggatcatcaacaggcggatctaggaatgttgagggagggctaaagcctaccctaagatttgataatatattaatatacaatttttgttttcacatatacatagtattagaatttgtgtacctattctagtgtttgttagtatgtttgttagttgactgatattacagtttttactgctctttctttctttggttttatatcagttaagttagttaagttcttaactaactctgtactggtttttatcatagtcggttgtatggttgtatatatagtcatgttctgcctttgtgtaaattcaattcatccatttagatcaataaacactttctttttcttttcgtaacatggtatcagagcaggaaagatagtctttcctatccgatcctcttccccagctgaatcgtgttcttcctctccgattaagctgtgtatccttccgctgatctctctctctttctcttgcttaatctcaatcgtttcttcttcgattgattttctgcaatgtcttctgataatcgaacgattcaaggtactcaagatgagtccacgatccaaactgccattggagatgttcaaagtccttctctgcaaatttctgcttcaagaaatcctcttgaagatccagcaaacccctactatcttcaccatggagacaatccaggacacacattggtctcacaacctctcacgggacaggacaattatgtggcttggagcagggctatgcagctcgcaatttcagtcaagaacaagatcggcttcttggacggttcaatccctaaaccttcaccttctgatctaattctttacaatgcttggataagaaacaataa

SEQ ID NO: 239123 - DNA, 1857 bp, Cannabis indica
ctaagtgtaaaaggagaagagaagatatgataatcttttacttgtcatttatcttttctttttgaactttgaatttgcttgaatcctaattgcattaggagttgaagtgtcttttaaattttgaattcatattcctcttctaatgaggaattcaaaatttcaagtagaaaaggagaagagaaaagataattatcttttacttatttttgatcttttctttttaaattaaaaatttaaaagactccttattactttaggaataagggacttggaccaccataaataaagggagatcttcatttaattctccccacttcctttattgctccacacacatgtggcttcctgagagctttgagtgttttaacttcattagttctttgagtattcttgagatctttaggtaaaaaagttttttcaaaattttgttctctttttctcttgttgagtttggttacaggattctagaactaattggatatccttaaactccattgataagaccttcaaaaatcaaaagtataatttttatgtgagccgtttgagctgaaatctccttttcctacaagttgcagtcaccttgactttgtcttaacaaggttgaaaggaattgatctgagttgtgattcagttgttcttagttgaaataagttgaacttcaaagctgccatgccttgtatgaagagaactcgaagaatgcctaatgaatgtgacccacacgtggcttagttcattaaggctaagctgacaatgcccagtgccaaaaatttagacaaggcgcgtgatggaaaagtgatagcaaccaaactccttaaggctgccattgagagtgatgatctgggagatcgagctttcaagttaagacttctcgtctttagtactatctctgaacatcaaattgagttgatcaaaaatgactattttactcctcaaattgtcgttcaaaaacctcgaactggatgtcccaacagttcctagaatctgtgttgtagcgcttgtccctaccaaataaatccaaatagctaagagttttgtcaaccttcttcatcttctatcgtgtaagaaattagtttgtcctcactcctcacaagatcaactccctatatgatctgaagataagtcctattcgaaaagacagattttgtcacttccattagttcactctgtacattgagaatgtgaccaagagtaattgtggcctctaccatcaagaatacttttatacctcagttctcccttcaaggcacattccctttcagaaggatggccctttcaagagatatgttaattgacatgaagaggagagtaaatgcaatgtttactgacattaaagtagtagagaaagatgggaggactttgtttctttgtttaccactgacatccccataaagttggtttgttccaagcctccgcatggcattgcccaaagatgtttcactaatatctttgaggtaataatctataatgtcctcgcttcaagcctccattgggcccttacactcacggaatgatggctcttatacacgagtaagtcactttggctgcttcatggaatgacgactgaccctacaaaccaacacgagtgtttccagcgtgctttgtcctcactcgcttcctgggaaaacttcccaagaggtcacccatcttgaaattactccaagtcaagcacgcttaaccgtggagttctttcgtgatgggctaccgaaaaataagatgcaccttgttgatataggtagtaccaatcaatccatttaagccttcttcaactgtgtagtccaatacctacacagtctaagaatcatcacacttgaccttccctagacaattgcaacagtcagtagtcccgtgattcgtaag

SEQ ID NO: 239124 - DNA, 6129 bp, Cannabis indica
acgaaaaaccgtaaaaatataaaaaaataaaattcttcaaaggttttttttttttaaaaataattaggttaatataaaatttaaaaaataatttgatttgatttctttttctaaaaccccaaaacctccgccgttctaagccgctttcgccgttggccgtgtgattttcttcttcgaggatcagatttggggttggtctgcacttcacggcaagaaataggaggcctctttcccacgccattgttcttttcttcctgttctgaatctgagctcatttggtatttatttctgtttgccttttataaatgaataaataatgtgttttgattgaatttcaatatattatctcgagtttgattcgtacggattttcagcttcctcgttttttcttgtgatttccttattctcgggttcaacttcgagactgttcggaccctaaaacccctaccaaatacggtctttgtgataattttcaaggttaattttgttttgatccatttagtgagtgaggtggctctaattttccactaagttcagatgctgtgtttgatccctatgagcaagaacattaattattgagttctcttgtgtgtatttatgtatatatattttttatacataattattgagttattactggttcttttgattatataatatgttcttataaaagcatgaagatttacaaaatttttgtgcacatgaactgtgtgatgaaattccttaataagtatttgcttcaaactgtttgtgggttatatattgttattgttgtgtgtgtgttattgcttatattcataactttgctttcgatttaacaggtttcagattgcttcactacatggaatctctcatgggacttcattgaccgcagacaatggagttatcggaggagtggaagtccttgttcccaatctcagcagtgtttaagtctccactccttctttcaagcccttccattaaacccattttaggtcctcttgtctttaaccccatacccaatactatatcatccctttccttctcttcttctcttttgcctccttcccatccttttccccaactctcatttcctcaattccttctcacatcttcttttgactcctttctaccaccctctacttcttcctccattgtttcagtctttggcactaaccatcaccaaactaatgttacttctaatttcttaaacaatcgccttgagttacttcgttgcccaggtacaaacaacctcattatcttttttcctactggtgaaaactcagaccaaattggatttcttcttttgcaagtgaaagattcatgttctaatgttcgtgacaatggtgatgttttcatggctagttttaacttaaagcatcagattttgaggatctcagtaaaccctgtcttggattctggttctgagttttcaacttcgagagaaaattcgtttggcactattggatatttgtttgcttgtacattgtactctattcattggtatgttataaaagtcaaagaaattggttcagacactgaggttccaagtttaacttatgtgggttctaaggtctttaaaacttgctgcattgttcatgcatgttggagtccacatttaccggaagaaagcattattttgttagagaatggagcattattcttgtttgatatggaatctgccttgaaaacagatggtttgaatggtaattgcaaaggagtagattgaaagtttcctgggaagattcaagtcattttggagatcataagtggctgagttgcgagtttagctggcatccgagaatttttattgttgcacgttctgatgcagtctttatagttgatttttagatatgatcaatgcaatgtgaattgcttggcaaagattgagatgttgcatatgtacacatcaattggaaatgaacgatttcaagctgtgaaaaaggctggacctgacggtttccattttgctctagcttctgatagtttgttacttctctgtgatgtgcggaagccactaacaccagttttgcaatgggctcatggtgtttctaatccgcgccacattgatgtatttaggttgtctgatttaagatccaacttgcaggatgacatttacaagtgggcttctgactcaggtttctgtattatagtgggatcattttggaattgtgaatttaatctcttctgttatggaccttcatctcaagctttaaatggatcaacagttaatagagcaactaagtttgacaaatcttattatgcatggggatacccgtcgaatctcttgttgtcgggtcatgtgtgtccctgtggaagctgtcttgtgaaagaagagttcttaaaagatgatcttccagcatggattgactggcagcggaagaaagaagtaattttaggatttgggatcataaacaaagatttatcttccttggtttcgaaacctgatgaatttggtggttttatgctggtaaggcttttgtcttctggaaaacttgaattacaaagatactctgcctcatgggaatccataaaacttatagaagaaccccatgaaaagctgtctcagtttgaagattatttaatgttcccaccattcgatgaggaatacaaatttcaaaaaacttatcattaccttgatcttggctaccttaatagctatttgaatggtaatcttgatgaaatcatagtttcgaaaatgaagcttccattgacaggctcaggttcagttgtaaaagaatcttttagtctagagtttcatgaaatattatgtgaaaagttgaatttgtgtgggcttagtcgatcacggtcatctcctacagttactgttgttttcagagatatcaatttgccatcaagtattcatgaggttgctttgaggagattgtgggcagacttgcctgtggattttttacagatggcattttcaaactactctgaagtccttgaagtgcttgtggctcgtaaccgaatgtctttggaatttttggctgtaccagaccatcctcaactgcctcctttctttcttaggaacccttcgttgcggagcaataagtggtcacagaaagttaaacctcccgatctccttgtcggtccagtgcttcctcttcctattttacttgcccttcacgagtttcataatggttgtcaaagtacagaagagcaatctgctggtttcacagcagaagcagagctcagacgttgttgtgatgaggttaagcaagtagcacgcgaagtggctaattcagattctggttctgaactacacaaagatcatgtcatctcccttgatgatgatagagaagagaatgtctcacaaacagcaaaaccgttctttttacaccacccgagtgcatttcacaccggaacaatcagccatacagacgagcaatctgcttacaaggatgaggtatttggtaccttgatttccaaagtaagtgaagagcatgcttccgttgatactacggaaactatggggttagaatttttcgatagtgtttgcccaattaagctctcgtttgatgatacttttgctatgaattttgagatgaaggagttgaaggcatacaaattattgaagaaacaattctacaaaagtggcaaggtgattgtgatctatatggtcaatttgtgtccatgactaaacctgtaacttaatatattgtaacttttgttttagatttgagtttgattaattgacagtaactgtttgaaagttcaattgtatatgtatgtaatacttgacgaaatagatgaaacaaaggaatcaaactcatctaccaaaaaaaaaaaaaaggaatcaaactcaaaatgggtttgttgataaagcccttaaattttagaatgatttgcatttggaattgttgattgtgtttcttttctgttatgttgcatatcattttgctaatggcctaacaagaaaagaatgaaacaattatagaacttgatctcctaaaatgcccaccaacgttggcaggatcagggccggtcctaggcataagtaggctaggcttgtgcttagggcttacatttttcgggagctcaaaataaaaaatgagattacgggagctcaaaatacaaaatgagaggttttattagtcttttatttaagtgtattgtaaatagtaaataatcacatcttatatcttagttgattagtatgtatgatacattattaaatgtccttaggctcatatattcttagagttggtctttagtaggacacatttgttcgggtcttatcctatgagggctacttcaaacggtgcattcaaggagagggtcctcttgtactggacttctagcattcctcatgaagaagctgctaagacaaccacatgtgattgctgagattaacgtaagtttctcgttcttattcttgcttgaatgtaatgtaactgagtttatagttttgtcacgaacgattattgcctatgaaaactaggacagattttatggaagtaaattatgtggttcaaagtgagtttagcttgaattttatagtcattgacagcttacaaagaaactcaacgtatctagatttttgatcaagtctttcttaattttatatattagtgtcttcatgagtgcagtcctttcgataactgtcttccctgttttagcttgtattttggccgagttgaaacttttagccactgtaggattgttatgtcacctgcagcagtcaaatttagtctcttagggtatgtttggtacgtcgtgttgtattgtgttgtattttatcgtgttgaattatattgtattagtattattatataatattatgtttgatattgacttgtattaataactcgtgtaaaattacattatttttaccacaaatttgatctcaatcccgacctgggtctaatgcgcctttgatattttggttctccattttgagtaacaataatcctcctcttaactcccttgaaattagcacacacgatcatataaaatatgtgacaacatatatttaaattttagttcatgaatttttactggttttatgagttttggacttgtttttttacctcattatattatttacatacatagccataaaagagaacctgggtctttcttagtttagactttagagggtttcatttattaaaaagattcttacttttggacttttagatcagtagtgttgtgtttgaactaatcaatagaaattatagatgaaaatgacaagacaagtaaagttgccttacttagaattattggctgagctaatcatatatatattggcttagtaagttaacatgacgattcttaaattgacttttcaagcactaaggaacaatattatgatacaaacgaataattatttacatatatattaaataatatctttaaaatttataatcgtaataattaatacaatacaataaacctaccaaaccagcacttaatttcttaccgaatctgatctaataacacatagttgaataatcttagccatgttaagttcttatcttcataacataaccttttatttcctctttcagaaaagaacacaaatgagttaaaatccacaccagccgcccaacaaggaattatcttatagaattgttgttattatcttcttctgaacaatatttctatatgtcattagtcaagaattagctagaaaaggccaaaaaggaaatggaaaattgcagtgtcacaaaagaatacattggatggggatttgactagttttattaacgggtatttattggaccacatttaatatttttaagtctatccatattcgatatctaattatatattggatattagattttattatccgatcagattcaattaatttcagttaaccgattgattcaacatccattgaatgtatttcttgtatattttttttagattagtttagatttatccaatattttaaacctagtatctttagatcggattggatccatccaaggtatcagatctaatatttattggattgaattagatccatccaatctaataaaaaaaaaagtttaattttaattttcttatatccatatctttatgtattaaaagtgcatatctaacggcatttcttggtttatttaacaatttaatgatgttaataagtttgatctcccgttaacaaataaacccaataattaaacccaaaaattaaacaat

SEQ ID NO: 239125 - DNA, 1821 bp, Cannabis indica
gattattataaacaaatttcaatctcgacgggaggccaagggagcgacctcggccaagggagtggtcaacggagtgggaatgggtgagttcctacaaataggacacgtaggatgctgacgtagccaagggtcaacgcaggtcaaatgaaagagatgaccgcaatcgggcaacaaccggagcaaatcagagtcgttataatcggccaagcatatagagcaactagaatccgacgtagtagacgactggtgatgatttcgaccgttggatcccttaatcgtgtggaccttagtctgattgtacataaccttaggaaagctctccaaaacgcgtcgtctaacccttgctcgacctgatgattatgattgtgattatgatcttgatcaaagtcgtcgctactactatttgtgataaccacgagggctgcggtcctgtttggggacctggataagcgagtccttcgggtgcagaagtaggataacagggttacgattatgattacactcaaaactccaactgagactcctattccgtatctgaacccgcctagatttggcgaaacgtcgtcgtctgggctcaacgggttgttgttcatgatggggtaatcttctgctatatgtgttagctactactctttatttattttttatttttttttcttccgtttttttatatacttcttactatttttggggtttaaatgttatgaattgagagaagtgaggaaattaaagaggtaaatattttattacttattttaataatattaacaataacggtgtgatatataaaagagaaaatgtaaattaaaataattattttatattttgtgaaattgtccgtgtgtccctcgtcgtatataactagagttaattactaaataagttatgaatgactttttccgtactaatcataatttgaaaagtagtgaataattgttaacataatcataccattattgttataagtatttggctaatggcatttccttaacgtaatgtagctagctagccactagctactaattaactgctaaattgtaaattgaagatataataacttacctgtcaatgtcatctctaacgaaatggtgtatttttttaacaaacttgccttgtttggtttcttttatatttttatgcacccaacccaaggtcaactcaacatataaatagagtaataaaacccctatttattaataaataagttatagaaaaacgaaaaattctcaaatttatcatcaaaataataacttccataatacccgtcattgatttcactaatttcaaacgttttatatttattattatatggacacatgttatctttaagataaaaacaaaaagcatgaatcacattgcatgtaatgatattccttttccaagtttcatcttctatttcattttttcttttttctttttggtgttgaaatggcgttttagtattatttttttttaatatttattttcgactgaaattctgcttcactgtccttattatgtcagagttctatatagctagagaaagagataaaaccatgacaaattaaagtaaaatcatttctaatatttatgttttttgatttgcaattatatcactccgccaaaaaaaacaaataacttatatatcatcaatataaataaaaataatattgaaacgaatgcaatcaagtgcaatagacaaagttgttttagtaagtcagacattttttattattatgtaatacaatatcagaataataaacgttttgctatacggtggatgagttgtttgtgtatgtatttccgttttttcattttttccccctttaaatgtttttttta

SEQ ID NO: 239126 - DNA, 742 bp, Cannabis indica
acccaacacgacactgaccgagaaggagatgttactacttatttccccataatctttaaatgtaggtaatggtgagaaaaaattaaataaattaattgaatttaattgttcatataagagtctgtgataatttagagaagataaattagctataaaaaaaaggcgatatagagaaaaaaaaattgagtgttgtttttattattaaaaaaataaaatattattattgaattctaaaaaaattgttattgagatttgtttcatctatatacatatactaggtggatgtaatatgtcgaactacgtaaatgttagttttacttaaggtttggtttattagttttttttagatttgactaagtaaagtagtatgatcattttgaatgatttgttatataaaaataaattgtttgtcagtgtatttggttagtaaaatataattgtatccttaaatttatgatatgtacattgttattaataataaaaattatgttaatctcaatatttacctactcatattgcttttatctttgatgtgaaaaaataatttttgataagtacttataacaatataagattttaatatttattatttgtctctaaaaaaattcaaaggaacaatatatatattttgtacaatttaaaggaaacattatgtaccgaaaaataaggaaaaagtgtcatcttaaaatagaggagaaaaataatcaattaaagtattaatatagaataccctatgaaaaat

SEQ ID NO: 239127 - DNA, 2350 bp, Cannabis indica
gtgtagtggatttgtataatttttttatttgaactgtatatttatttatttggccagctaaaaatatttttataatattattattttttaattaatattaaaaaaaatctaaattaaaataaataaaataaaatgagtatacttcttattatttactcaaacttttcatcaattaataacgggtcgggtgataagagcacgtgcacccacggtgaaaatgggtgcggtggggacagaacaggcagagcgaagccgaacatttcgggtccggataacggaagtgccaacaaaatcggaaaagggcaaacgaaatttcaggacagcgaggaataaagagaaagagggaaagttccataccgcttagcttagaaatttcacgacagcttttggtctcttgctattgactccaatctccaattgtccaatactaaaaagaaaacattactctcacacactcacagtcacaggtcttgacgaagacactgccaaataatattatatatatttatatggtggaggacttaaggagaagaaaaaaggttgatatattaaagaagacaggctacggagctagctatgagtagcgagaaggttccttcatcggctatgacttctactacaccgcatgtggaatttgctaaaggcgtcaatggcctcgataagatcatcctacgcgagtctcgtggcagttccgccgaggtaaacttctaattatcctctttctcttcaagatctgactgctttgttccgttttttattgccatttcttagacggagtccgatcatgttttcgttgattgaggtttggaatcattcgggatcagatctggtcggtttcatcgctgacatttaatttaatttttgttttagtttgtctgtggatttctgtgattatttgaatgcctaccgtataatgataactttttttttattatttatttataaaaattgttgttatcacacttcaagcttgttcaatactgtctacgatttttgtatcaaagctgcgtatgtttatgattaaactaaaccgagctttgaattaaataaatttattggtttgaactttaaattttcttttactgtttgtttattttactcttaagattcgattgatcatgcattttgcaggtaattacagatctgttagactaatacttgtgattaatagccatgatttcaatgtgagatttgattgatactattattttcttttcctaaagggtgattcattgatgatcaacatttgaaaactttgcataatgttttgtagaatttaagttggcaattgaattgtatatggattctctagagctggttgattgtttgatttgatttaggaagtgtcttacgtatttccctcattgttttgtatgttgaagaacaatatttgagatcagggtataaatatttgacgggttatttagtcttgttagtcaaataacttaaatccctcaagaaaatgtttttattttataattattatgtacaagatttatgttgtcacgtgttaaactaaattgcacatatcatcggattattatttctagagtgctttggcattttgactaaaaaagtaaaaatttctgtttatgaaattagaattatttctgagaactggtataaaacttgagagaatgcacccttttcactatttgtattttgtaccatctcatgattctctctcttttcaacttctcattcatggtttctctcttcattatatctttttgagctctctaaattttttttatcattattattatcagaactctaggattttgctcgctactgaatattgattctctctttttattatctctcatcactttgttttttacatttagttcctatcatcacttttttttctacatttaatctctctcattactttatctcttttgattctaattagtcactcccttgttctcatttagtacattatctatatttcatacgaccttttccccttattgtcctgttttttttaatgtctccacactttctcagttgactttcacctttctcaatctctccgactctcttccaaatgtcttttttattattcaaatatattatttcaattagaatttcatctcataaaacatttgctgacgatttccccccctctctctctctctcagtttgaaaacaataagaacaatttttgttctcatatctgaaattaaagagaaaaacaaatggaaaaatatgctttaatattcactcattaggtacttcgcaccacttagaaattggaccacatgtagctaattatgtttttcaaatgttatggacaagttttcctttgctaattcaattgcacatattagttgggaaacttttctgt

SEQ ID NO: 239128 - DNA, 2361 bp, Cannabis indica
aaaaaaaaaaagaactacgtgtaaagaaagtattaaataccttgattatttcaatatttttcgttcttttcaatattcaatcaattttttccagtatctgttttctttatttgaaatctttacgaaattaattaaatcttgagacctggtgaagttggtgatcttaattcatataaattcatgtttattttgtagcgtttattggtaagttagtattttacacgtaacataattatatataattaagaaagaaataccaattttggaagtttactttcataatcgcaactcctattactcattaattaaaaaaaatcaatcacacatataccattactcttggactttactaatcaaatttaattagtctaattaattaattaattatcatatttcactttcaatatttgaatttacggtgaccaaattaaaagaaaagaaaagagaagagatcatgttgtggttttcctcttccaaccaatcatattctttcaacaaagttcaaagctttagtgattggaagagaatcttacgtatgcttattgtttgtaacaaatagaaatttggtgaggcaagctttgttttgtaggccacatgaaaggaattggttggaaattctatattgtgacatattcactctttctggtcaaatttttttaaatcaattcgctctttttggtcacatttttataatcaattaacttaatttcaaattcatttcacttaaatgatttattacttacttgataaacaatatatcttccagccttggcataaggacattacacgtaactgtatttctcagctgggtcttgtcttacttaattattactcgaattttatatcgtctgactcataagttctgattattttatgataaacaattatgtgtggatcatattgcttcttattatcatcttataacaataatattctttactatcaattcactaagaaaatttgcacaaaactcttagccaacattgctttggtgtggcacagtggcagcctgtgaggtgctccttaattgtgatagaaaagataagagtatctttaatattaccaaaaaaagatttgaggattaatcatgtatatagatggttttataggtcacttgtgtggtgctattaagttgtcataagaagttttgtttggattaatttcatcacacttgctgatttaaccaaaaataaataaatatataaatatataacaattaacaggccccttttaattgcctcataccaattatttaaaataaattttaacttttctaaaaatcattcaaaattatagtttaaaaaaggtatggtgcctgaaaacaataacattaaacataattttttaagatataggcattatttaaaatagtgtattttgtgacacttaaatttttgtataaatgtttacgaacaacattcattgctgtgttccatatttgttgtgatttacttgctattttatttatggtatgaggcctatagatgaaaatttaatctgtggggatgggtacccgcgggaacccgcccctaatcgagcgggattttcccgacttagcaggtaatgcggtggcagtgaggaatgattttaatacgaaaaacaagggagtatgagaataatactagtcaccccatattaaatctcagtatatatagtctttatttatagttttaaaggatatatataaggaattattacatagaaaatataaatggacactttatatataaaaataccttcataaggtaaagacaacatttatacattttatgtgattttaattaccaaaatactacttacactatcacttacacaatcagacgatggttgcagggtggttgctgcgtggttgcgcggtggttgcattagacgaaaatttcaattagacgatagttgcagggtgtggttactaggtggttggccgaatgttgcatcacatgaaggtttcaatcagacgaaagtttctgagtgattgttgggtacgtggttggccgaaggttgtatcagacgaagatttcaatcaaaagaaataacttttagcaaaatatttatgcaactgtaatgcaactgttgtgaaacattaaaatcagaacagtgtttccacgtacgtaactctatctacatgtctctatgattttatatgaagaaattcaccattagaaatttgaaaaacaacaaaaatacaccaggataaacattttactatagtatggatgtaatttgttttagatgttagactataatatagtgtatgtaatatagcatatacaaatgatatgaaatgcggaaaaataactataatcatatcaataatatatgcaatgaaaggatcaatatacctccagccattgatctttgagc

SEQ ID NO: 239129 - DNA, 3393 bp, Cannabis indica
atggttccggaagaaagacattgcggcgattgagtttctcctataaagaatttggtatgtttcacttcactattgtttcatgaagctataaatactgttgcagttttaggttttgtttggaacttgaattttatcaaagaaaattttatatttatataaaaagaagaataagatacaggaaaatgtatgaatatattacaaaaaaaaaaaaaaaatcatatttatatagaaaaatatgacactaaattgagttatcaatttttctgaaaaataaagagagaaaagtttgtctcaatcttaagtaaaccaaacaagagaacatttcttttttaatttacttttttttatctaacttctatattccaacaagaaagttaattcctctccaccagtggtaactggaaaagaaaacgaaaacatctagagtttggcctacattaatttctataaagtctccatttttattacaggcctagaggtgcatgaactgagattgcatatttgctcaaatacaatgtgctcccccatgaactctgcagttttttaaagaagaaatagtttcaattcagaccaactctgttcatgcctgctgctagatcaactaggtgaatgacagagtgctgaatttccttctcatctgttgtttatttgtgactttaaattgagtctgtcaatcctgaattcgaagtggtggaataggaggcagattgaattgaaggaattcaaaattttcttcttggtttcaaaaagcaaatgacaaggcagtttgcttgctgtgccgggaacataatctgtttggtgttgcatgaatttaacctattttgtttattatgtcctgattaccatgccaattgtatccaaatttttggtttgtaaaattatgaagatttgagatagccacctttggcattatttattctttgtgtttttttcttctttattttgggtgcagaaatgtatttattaactgtgtgtatacttcataattcatattgttaatacaggttataacactgagacagtatagagagttttgacaaattaaatggatgccacttaccagttaaatacaaacagtgaacataagtttaaacaattctatattaaattttggattccacacccaaatgttattattgttagtatattataaacaattaaattaaatttgaaaacatcaatagtcgaagaagttgattggatcttacaactcaattcacttatggacaatttacgatttacagtacaaacattgaaatgtttttttaacaacacatgatattatcaatattttgatagataaaaaatatttcaaatatttgttacaaaattgttatgaaatttaagtttattttatgaagagatttttatttattttaaatattatcaatatatattacaaaatgataataataattattttttatatcaaagagtagttgtattttctttgaggatgacaatagtcttggtttgggttggattgctcgggatcataatggtttattcattgatgccttggcggttaaaatttatggtcaacctgatccgtttatggctgaagctatgacattgaaagaggcgctcagttgggtgaaggggaggtgggtagagggggttgtgcctgctgctgctggtgtggttatggaggcggactcgttgatgctggtgcaagccgtgcaacaaaagaagcagttgctgtccccggcggtggggcttttaatcacggactgtgttgcttttatgcagtcctctcatttgtttcttattttaattaattttgttaaacggtgagaactagacggctaattttttagctggtttggaagctactttagtagctaatttgattcaataaaagttaattttctggttaaaagcaaaaaaaaagagcagctctattttaaatccaaagaacgaatttagttgtcaccttatcaaatatggggccatagggttacatttatcggtttgaaatcgaaaaacattgaacatggaagcttaaaacatgaaatcccaatcaacagactaacaaaataagacgcagcctaacaagaaatgggttgaatttcttccaattttcctcaaatatacctatcaccaaaaacaaaagagaaatactaccaactgcatcggtgccatttgtatggaactctcattttctggataaaaagggctttactgattccacaactacccttccatcgtaagacaatgacgcaaagatccaaggctcgcgacaactccaagcaaggccataaacactgtcttcataatcaatataagaatgtagtaatgggtttagatgatttgctctagttggtgaatcaactactctttcagatgtaaactcatcagcccaccacaaattgacagttgagtttgtaccagaactcagaataagcccttcgtactcaggattatacttgacagcccatgaccagtgtgtgtgcccagaaagctcctcaatgggagtctttggcttcctcagatcccacaagcacactccagattcgtcttctgctgtgacaagtatgtgctgcttcttgggattgtaatcaacattgcgtacacgagagcgctcaattgaatttgttttcttcattgttcgcaagtcccaaaactgaagtgaagattcactagtcgccgcaattgcattcacatcatgtggatcccatgctcctccagaaaagtggtacataccagctgattcttgtgatagtatctggatagcttttcttggcatattatctaagctccataaggaaagattttcctcatcaatacttatcagcttatcatgttttccagatggccaccaaagaatgcacttaatcttaccaacattttccccaattggggtaattttttccaactgaggggaattcagctcgccatacaactcgggtatctgccatattgcagcaccatacgattcgccagtaaagtagacagtggagaagattcgctgatcgaagggacaagaagcgagatcccagatctcgtttgggtgggaaaacaatccctcgcatactagttcagttcctcctgacgaaatccggatcaaatgtacctcattttcttctttcagagtgagagtgccggtgagaaaggtggtgtgatctgtatcagctttgacatcggatatgcaccttgcctgatatttcagaccatatccgatgcctgacgaacctccttgcattggttcccttttcacgatctctgggcctctgcggtattgtgtgtcgcccttacgattacaagagagagatctctttcacaatacgcgcgtttcaaaatgataataattaggttagtgaaatttttctccctaaactttgacatgtagtaaatcgtgttccttgaattttttttgtcgttaaaaattccctc

SEQ ID NO: 239130 - DNA, 4399 bp, Cannabis indica
aaagtccttaaatttaacaatctcaatagttcggtgggaatttttaacggccaaaaaagttcagggccacgatttgatacatgtcaaaattcagggaaaaaaaattactaattagcctaaaaaaagtcgcaaaaacagataatgaaaaggaattgtagaactaaatcaaaagaaaaaatgaatggtacaactaattttttttaaaaaaattataatcataatataattaaaataactaaaaaataataatgatatattattttttttatttatttatctaaataatagggacataatattaataagaatcattaaaaagaaagagcatacctaaatttttcttctggttccgtagcacttgcaagacttgagactattagtttgaaaattataagttaatattaggtataataaatttatactaaaaaaataatattttaataagattctagatttgaaaaaaaaaaaaactaaaaaagaaaccattattcagccataaacagccaaaaaaaaaaaaaagggaaacaatgaaaatttatagttaatgaaattgctctcttagttttagcgagtaaactttacaaaataaattaaatgatgtgtcatcattatattgattagacataatataagacaatatttgtacacaaattctattcaatattaatatcatgctacattacttaaaataaattaagcaataagcaacaattataaattacaagtattgtagagtttttaatttatttcttgacatgtacatgtgagatagatatgataataataacggatgacatacacggacaacaattttaaaaatagttgggatataatgataataacaaaaaaaaaaaatacttacttaaataataaaaatactctataatatgtctctatatcgttctatttatttacttttatattaataatttttagaatactaaatatacactagtcgtataaatttaaaataataaaaattttccaatcttcctaataataataatttattagcaagcagtgttgaagaaatttaattcttctcattttaggaatgttaagatgaactatgagttggccctggagttctacaactaggcacagagctctctcaaacatgaccctcactctcatactcttcaattggagctaaactaagctagagatagaagatgatgaaatgtagcaatctttatagcttttgtgagagatcacaatgactaagttttgtgggtactaacaacatgttcaacttttcatattctcttataggagaagctgcggcctacttgttagttctagaatcaactacccatttgaagcattcgtttgtgataatagagagtgatttaaagacagtgatcaacacactgaaagaaactacttctatttagagtattagtaactatgtgtttcaatataaaattctcttgaaccttttgactagttgtaaatttttgtttattttgaaattttataattttgcaattcataatgtggctaaatgagtttttaccgataatataactgtatggtcgattcttccaccataggaaatagcttattatgtaatgacgatgagatcgtatacttttagctttaatataattaggcatttggttaaaacaataaagttgggtttacaattacaactttacatattcatgaaaaaaaatatatatatttatgttcgtaactgtttaagtattggtatacagtaagatttgagctgtcaagactcaaaagagcaattcctatctctctctttctgttttttcagacgatacaaaaggaaaaaaactcaaaagagcaaaatttcatcacgtgtttcatgcatctaaagaaaacaaaacacagacctacctaccaaatatatcttaacatcaattcacaacaacaatagaaaacctctatataataaatcaatcacaaaccctagtcctaatatccatcccactaaccaaactaaagttatggagatgaaattatttaccacccttgtccttactcttctcttctccacaactctcctcgaccctgccctctcagagctatgtaaccaaaatgacaaaaaagcccttctccaaatcaagaaggctttcaataacccctatgttctcacctcatggcatgaagacaccgattgctgtgactggtactgcgtcaagtgtcaccctaaaacgcaccgtatcacctccttatttgtccctggtggtctctccggaactatcccacctcaaatcggagaccttccttacctagataacctcgaccttcacaaacagattaacctcacaggtcccattccaccttccattactaaactcagaaacctccagagcctcaggttagacgggaccagcatcagtggttcggttccaggtttcttgagtcagctcaccaacctcaactacctcgacctctctttcaacaaactaactggaccgatcccggcttcgctttccaagctaccaaaccttggccaccttaggctggaccggaacagactaactggacctatcccagattcgttcggagagttcaaagtgaagaggttttacttggagctgtctcataaccaactctccggtaaaatacctgccgcgttgggaagaaagaaggactttgctcatatagacttgtcttggaacaaactccaaggtgacgtgaactcgattttgggttcggataagatggttagccatgtagacctttcgaggaatttgctggagtttgacatgtctaaggttgtcgttcccaagagcttgacttggttggatcttaatcataataagataacggggagtcttcctttgggactggctgcaatgggtgatcttcagtatttgaatgtgagttataataggttgtgtgggaggattccagtgggtgggaagttgcagaagctcgaagccacgtcttatgtccataacctttgcttgtgtggtgctccgctacaacgttgcaaatagttccacatggacatttcttctttccaatgttgtttctcctctgttatgtcgttttatcgttgatgttgtatgagtaatgtttgtcgttttcttttcaattctctcgttttatttatgtattaattattggcatgctgaatactcagcgctggcctcttgtttttattttgtaaacggcaacatttgaaatgataaaactcagctggtttattattgttggcgtaatacttagttcagacttactagccagccacaaagactacacaaacctttattggttttgatttgaaaagcaacaattataggatatgccttgtctcatatgtatggcagtgcaattattatgtttgtttcaaatgttgatgaaagtcgctttgttgtgttgcatgcatattattatctgcgtaaactcagctttgcggctattattgatgcattgtatcttggtcatgaacaggcgggcctcaaaagaaaattggaaaaaaaaaatatacaattttagttagataaactgataatatttattagcaaaatattaattttggtttaatggctaagttattttgtaaactgcttaattttaatatgatagattagtaaatatttaggatttaattatgaattagattattaatcatgatttatgaatttatggagatttatttgaatttagtatgtgtactaaataaatttaactataaatattaattttaaaaatattaaaccattaaattttggtccaataacaaataataaaagagaaatttaaatttttatgcttaatttagttacttaattaaagataatattaaaaaatacctctttttatctatatcaaaaatatatttatatgaaaaatatttaagtcaaagtcaactttttttattactttttttatcgaaaaacttttaattattattattattttttttcagctgatgaaccaatttcagcccatataatgaaaaaatgagaaatttttctaattaaataaaaaaattaattataaaaacttaaattttttaatattacccattcatgagtaatacccattaagagcatatatatgaaatatcttatttttcatatttatgctcagtaacagtggaacacgatgttgggccgatagagtcacgttttcttatgatttagtattttactagcagctgggcaatctagatagaaattgaaaatgtcaagaataatcaagatttttagaaatgaccaaattaccccctaaaatggcatgtatgtctttggagtgtgcaaagtgaagtgatcttttaaccaatgaattcatttgtcttgtggatttattctaaattgtaatcttatttttttttatttagttttaataatagataaacttaggttgattatttggcaagatgaaaaaacttagaaaaacaacttctctctctctctct

SEQ ID NO: 239131 - DNA, 1455 bp, Cannabis indica
ttattataaaaatcaattcttttgtgtttaaacaacttaaaaatcaaaactttattataaaaatcaattctttttgggtttaaacattagaaaaatcaattttttattctgtttcgaatttaaaaatgggttttttattgttatattattataatacacgtaagacttggtctctgtttatcctaatacatccaatattaccctttattgtatattataaacctatatttcgattatttgattaattagtttttgttttaaaaaactttaggttgtttgaaagaatatctttgatttgaaattcaaaaaattgatatttaacagatttttagttatgagtttttttttttcgaaacacgatttatggttataactattaactacatatactatattttatctcataaaaaaactattatatgttttaaatatatttaatactttaaaaaatatttattatacttatttgtgtatatataaaaaataactatccctataaaatgaccattgctattaacgatatatttttttgaataatattaagtggcttgtgttctacattacttgaaaactaaatatattttaataatgtgttaaatttggagtatagcagaaattatgtctaatttgttgtagaatatagggtaatacaaaatttacatcataattatccttatacttatttttatgtcatttttcttattttataagtttatttaattataatattaaataatactaaaatttttatatttttaataaatattaaatgagcattaattattgctcaaaaaaaaatgagtattaattaaggattaaattttgggattatgagttaaagtactctgtacagagtattgttagtaggcatcaatggtatttagcagtagcagtacctaaggtgtcatattgttgtttcacataatttaatttagagtaatttatagcataaatacttaagtttaactttcgttataattaaatacttaagtttaattttttacggtaataataactaagttatatttttttaaaacttccgtagatacctggtcgtggtcgttaagtatcaagtcattatctatgtgttattttcttattagtatatttgaattaatttgcaaaacaaaaataaaatataaaaatttaatgacatggactaatcagagattgtcaatgtcacgtgaccattgacttgatacttaacgtctaggtacttacggaggtacttacggaagttccagaaatataatttaagtattattatcgtcaaaaactaaacataagtatttctttgcaatgagagttaaatttaagtattacaatgatgctatttttttttttttatattgggatagttataatctcaatttttaattggtagtgaaaattataataatttaagacattcaagatgatgaatatggtttaaataaggaattatttcagaaatac

SEQ ID NO: 239132 - DNA, 2488 bp, Cannabis indica
ctgttgttcagatggtttcattttttattgtattgagtagcttatttatcttaaaagctctttttctgatgcatcaggtggcacaatcatttgaatccggaaattagaaaagatgcatggacaatagctgaggaattatctctcatgcatgcccatcagatacatgggaacaagtgggctgaaatagctaaggttttacctggaaggtaattattgtttgatctaggtgtttcattaaggcaatatctcaattgtgagggctgaaatagctaaggtttcacctggaaggtaattattgtctgatctaggtgtttcattaaggcaaatatctcaattgtgaggactgaaatagctaaggtttcacctggaaggtaattattgtttgatctaggtgtttcattaaagtttcacctggaaggtaattgtgagaactaccaagtaaggtgttgtgattctcttgatcttgtataatccatcactcacaggatatcagatattaaaagccaatgacttttggtgattgttgctgtccgtataagtatccaaaatttcaccaggaaaatccgtttcttcacgttgtaacccttttggtgattgttgctgtcattttaagtatccaaaatttcacacgaggaaaatctgtttcttcatgttataactctttcaaatgaatgcattaatatgaattaattaggcttttttattaacataagttaaatctttatagtagaggtgcagtgaataatatgatgaaagggaaactaataatttctcatcccataatatactggttttgtcccaatcttaatatattgtgcgtgcaggaccgacaatgcgataaaaaatcactggaatagctccttgaagaaaaagttagatttctttatcaatactggcagccttccaccagtcagtaagagtaactaccagaatggtccaaaagatatgagataaatgtccttcaactaaaaaaacacctgtctgttcaaataaagaacttgattctactgctcatgtattgagtagtgcagcaatgtatgtgataaatgaagatgtcaataatcagttagactcttctggtgctctttgtagtatgcttggctcatcaagtgctcctccaaatgagtctgccgattctgaaggtacagaatcaaagccagtatcttcaaatatggatcctagctgcagcaattccgattcagtaatgaagtttgaaagtggtggaatcaacagggaggcaaatattgagaactgcttgataagcaaacagtctcaacattgtagcctcaacaatgagggaaagttcgacaattgtggattcgacgaggaagtgaaagaagacaaagttgttggaacgccttcgtcttctggaagtttgtttttggttcgttgtgttatgagccaccacaattagatgcttgtattccactggattcagatctttccagtattcactccttgcagaatgagttcaattctagtacgtattcatcacctggtagttgcttcactcctccttgtgtgaagggccagagtttcaatttgcagagtcccgaatcagtcttaaaaatggctgccttgacctttcccaatactccttccatcttacgaaagagaaagtataaagagcaaacccctttgcttccaaataagaataagaaagcagatcgagaatctaatggagacatgcttcttgatactcaggaacatgatgtaactaaaactaatttggaaatgcctggttctcgagatgggagttcatgcaagagttcaacttatcatggtattaattcagtctgcccaaatggtaaggcttttaatgcctctcctccgtaccgcttaagatccaaacgtactgctgtattgaagtctgtggaaaaacatcttgatttcacgtttgaaaaagaaggacacgaaggaaatgtcaagaccgtagaattctcagcgaaaacaaagatgggagtgacttagggattgaaatgtaagtgaattttcaaaccatctttttactttgattttgtttttcctgtccttttacgtgtgcaattactagtagttaaattatatggctcaaaaggaactagatagatgctcaaaaacaaatgaaattggagctgaatgtgactataaagaccagaaaatattgatggcttgaacactaatatcattgcttagaaaacagttacttagcatatatgttagtactctcttggtttgacaatgttgccatgttgctaatttcatttctgactccttttctgcttgtaaacttacagtgatttgaagagaccagaattctcttgaacccatccaacatattcgttctgaattggtatcttatgctccaattctggaaaaagagagctgataagatacatagcattattttgtatacttcaattccccaaatcaagcgtattgctgatatcgcctgttagttacacggggcctttttcttattcccttcataccaacatgacaaatttag

SEQ ID NO: 239133 - DNA, 2905 bp, Cannabis indica
gtttgttcttatcttatgcttggatttgaaattgttttgaagtctatattatttgatttgtatttccatggagactaagcttttgcttttccatgtactataactttgttaacaaattttagttaacaattgatttacattgataataaacatttttggtatttgattatgttgtttctaatataccactactctattaatttattagacacaatattatttcacatggaataaatataaaaaaatattgagttatctataagagatatgagttattattctatttatcactgttaagggtaccaattctgttatagaagttggttaattcggttagaatgttagttaggtagttaggtattagcttgtttgtttcactgtaactactttaactaacttcttcttctatctctctcttgatctgttatgagttgtttgctcatgtatataagctgttgttctctcttcaatagtaatgaattcagtctttcttcaattcatctttcttctctgtttctctctgtctttctctttctttctttctttctctcttttgttttcttcaatggctaagagattaacatggtattagagcgagactttccactattaatggctaacgtcgttaccgatcacgagaagggagtttttgcccgtgatagctcctgtcagaatcaattggattcctcacaccaaactcaaagtcttcagcgtgcaagaaggagagatactgataattcagcaccaatttacttcaaccatagcctctcgatcaaactaaatgaccataactttctactgtgaaagcaacaagttctagcagcaatccgtggcaatcgtctgcaacactacatccaggatcatgatcctccattgaagtacctcagtgaagaagatcgaaccagacgaatcctcaatcctgcttaccttaattaggaagctcaagatcatttgttggtttcgtggctcctgtcgtcaatgactccaagtctgctaactcaaatggttggatacaaatctgcaagtcagatttggtccactttggagaagtatttcaccttacaagtttcggccaagattctcgagtttcagacgaaattacagaatctcaagaaaggatccatgtcactaaatgataatctgctcaaagtcaaagaaacggttgatcttcttgcttcagttggagatgttctttctctaagatatcatgttcgagctatcttcaagggactcccgagtgaatatgacacatttgtcatatccacaaacacacgtcttatacaatacactgttgcagagattgaagctctcttcttggcctctaaatcacgcatagaaaagacagatcatgaagctgatctcagtgccaatgttgctaccatggatcttgatcaagcatgtgaagccaatcttgcaaaattcggtcgaggaggatacaaacaacagccttacaatcattttcccaagtactggcaatcaacaatttggcagaggtaacagctatggccatttccataataacaataccttgtcaaatctagtggtgtaatattggcggctaagaagttcacataatctgcaaaccaaggcactattgaatccaaaataaacaactactcatcagaaaagtcttcattaatctggaccactgttgtgttctggctcgcttcaaggtccagccttaacagatgatttgctaccgaattctttgtgtccttcttaacttttatttctaaatcagtttcttgtagaagaagaagaacccatcgaattaatctcggttttgcatcctttttagtcattaagtacttgatttctgaatggtcggtgtacactatcactttatttccaatcaagtatggctagaatttgtcacatgcgaacactatggccaacatctctttttttttatagtaccataattcagttgggcatcattcaagattctgcttgcatagtagatagtttgaaataccatgttaaccctttgtcccaatactgcaccaatagcataatcattggcatcacacatgagttcaaaaggtagctcccaatctggtgtagtgataatcggcgctgaaattaacttctccttgagagtttaaaaggtttcaaggcaatccttcccaaattcaaaaggcactccattagcaagaagattagataagggtttggcaatcttggaggagtctttgataaatgttctataaaactcggcatgcctcaagaagcttcaaactcccttaactgatactggagggggtaagttctcaattgttgataccttggctttgtccacctcaatacaattttttgaaattttgtgtctcaatactatcccctcttttaccatgaagtgaaatttttcccaatttagctccaaactggaattttcacatctcgtcagtaccaactccaagttgctttgatattgatcaaaagacgaaccgaataccgaaaagtcatacatgaacactttgatgcacttctcaattagatctaaaaatatcgccatcatacatctttagaatgttgccggagcattacacaacccaaatgacattcttataaaggcaaaagtacctaccatatggacatgtgaatgtcatcttctcttggtcttctggtgcaatgactatttgatgataacctgagtacccattaagaaaacaataatacacttggcctgccaacttgtcaagcatctggtcaatgaatgggagggaaaagtgaccttttctagttgttttgttgagttttcggtagtctatacaaactctccaccttgtgacaattctggtcggaattaactcattcttctcatttttcactatcgtcattccttttttctttggcaccacttagacaggactcgcccatcaactgtctgaaataggataagcca

SEQ ID NO: 239134 - DNA, 1783 bp, Cannabis indica
aatcatattgtttaaggattttgtccgtgttttgttcctgcctggtctttaatggattctagtagtatgggaactcttgatctatcaaagcaaggagttaatattgctttggaggatgtggaagaagatgttttagctttctcagagactatttaaccggcaccaactattgacgatcgctggtgtttgtggggggggggggttcttaacccaacgaagtaataattttgacgccatgcaacacctgatggctcgttgtggcagccaggccgcagactgtttatcaaagaactgggtgataattggtatatgttccaattttatcatgaagccgatatacgaagggtgattgaaaaaaatccttggacgtttaatggctctttactggtgttccagcgactacaacagggagatgatccgttggctgcctgtctatataatgtggatatttgagttcaattacatgacctccatccgggattcatgtctgaggcgatggtaaagaatatgggtaattacattggaaaatttgtgttgtccgatcccaagaatttcatgggaatgtagagatcttatatgcgtgtgagggtcacactctatgtcactaagcctttgaaaagaagaaggagagttaagaaggatgacacggaggagttctggtgcaacttcaaatatgaacatgtcccattgttttgcttcatatgtgggatattgggtcatgaggagggatattgtccttctttgttcactacgcctcctgcagaaatagtgaagccatatggatcgttcatgagagcacaaccacgtcagcgtaaccataggatcagagccaagtggctgcgcagctgctcgaaatttattgctgccagcgaggaattactgctaccaggggttgaggacaactcgggtaagaacacggcggggatcccaagggttgaggacgattgctaccaggggttgatgccgtcagccatggagacgaatggtgggggagacgatcgggtcgtggtggttggggcgagtaacgtgggagttgacccaattatttcggtcaataaatcccacaataatagggattctcacatgctgcctcatgtgggtattaataaatcccatattaatatgggttctcacatgccagctcacgtggacattaataaatcccataataatagggattctcacttgctagctgtcacaagcaatatgctggtggtaattgacacaaaatgtagaaggactcaattgggcttgtctgatgggtcggttagtatggaagaggaaatgaatgatggtataaataatataaataatgatattatttaggggacaaaaaatgattttcaagtgggctctggtttccaggcccaccaagaattatgagcctacttatttggaattgccatgggcttgggagcccgtggcctttacaattccttaaggatttagtaatccacaagtgacccaattttatatttttatgtgagactcttagtaaaagagattacatggagagagttcgtatttcgttgagctttgaagacttatttgtgattaatgtgcaaggtcatagtggtggtttggcttttctatggagatttggagatgaagctagtttaatgggattttcaaactcgcatattgatttgaaaatcactgtttctgatactccctcatggcagttgacggggatgtatggtgaacctaattgttaggttatatttagcctatgttttgggtctgtaaagttagcattttctcgtctattggtgtcttttggagc

SEQ ID NO: 239135 - DNA, 6597 bp, Cannabis indica
tttatatagctaaagttattttttttactattttttaacaaatagagggtacccaataagactattttagatattagaaggtatactaaaacttttattttaaataaaaataaaaggtaaccaaataaaatatattcccataatttgaagattgttttgaaattataattttacataaatttaagcaagggatccaataatggctacccaaaaaaaaatacatggtcatttagaacagtaactgatactttcacaacagaagatatattaataaacagatcaaaatttaccaatagattctggacatgagaaaactattaatgaacaaactccaatcacaatgatttgtattgctcaatcagatgagaagcatggagacgtgatgtaggggccacagtgcagcctaaactttgcagataagaaatctgataatcaacgcagtaaattattgttaaagagtttctttataattcattctgaaactaaatgacatgcataagcaatagaaaatattggttatgaggtacttgagtagcctagctacctgtttggctgttggagctgatgaacccattgagttctcaatctttaatttcaggaaatgctcctgcaagaagaaaaagtgcagtaattttagaagtaaattaaacaagcaaattcacatttgcacaagcattgatgcagcgaaatcgcttagaccaagatgtggaccatttatcctttcatacccttataattcaaacacgtaacttatgaatcttttacaccactaacttgttatgaagaataaaagtaaataagaattctcgccaaactaacaaaacaaaacaaacaatgttctaaactatgaggaatttgaactttgaaaagctaacccaatattaggtgaactcagacatattacttgaaactcaaaaagggatattgaactttgcattgggaacaaacaaagcagatcaatataattgcagatataagccaaaatatgacaaccaacctgtttttcccgcatcaaatgagcacgcctttcagcagggatttgttcccatcttaaaacctattgaaagaccaaagacccatcacatagagagggagagggcgagggagagggagattaaaacataaagttagcacacatcgaagttcattctaataatctttacttacaatttgacaaataattatttactagaacatcttaatgtcgaatcctaccaaatgtcaaaatcttgaaacagctaaataattacttacatactcagcaaattgaaatgcttcatcacatttcaagaatgactttagcaagcgcaagacgtcctgagcgatttaaaaagtcataaattaaaattaatcatagcagtatatgtacaagataacatatgaacttcagatcttattttcacatgtgtaccataaactgtttctctctttaataacacaattaatatagaaatttgggaccaaaatcccagtaaaaccaaataaaagtttatttcaaataaagcaaacaaccaaaagaagggaagatcattcagcatataacttcaacagatcacatatatcatgattattgattaatgcataatggcaatatatatataattatactatagtaattgctatgtaggtacccaagagggactcgaacctcagacctgtgggagcaaactacaccatttgagctacccctcttgggtatgaataatggcaatataagcaagcatccccaggcataatccatatggcaactcaaacacacttgaccctaggatttatatactaccttgtgcttgttgttctttactcgtaggcgctcatcgattacaaagccaacctgtaatttacaggaaaataaattatacatatgaaaagtggtcaagagaattaagcaccaaatatgcaagttggggttataaatggatttctgcatttcaagaagacccatcctgaataggagtttacataagtatgttaaaagcaaaatgatatttattcattttatacgagtttctccgagagcaagtgctaatgattcactgatactatattctatatccatataattgaaacttaaaacaccatccactaggcaaaaatgtcaccttatcaagcaacctcttaggatcttgaaatgctttcttcttagcccactgatgaaatacatgagatacaattgatctctcttccatatcaaatctgtgataaaacacgcaaagtcagctcaaaattaatttgcggaagaaaaaaaccaatataaatgcaacattcgtcattccatcacatttaagtggagaaccttttcaagaaaatatttccattgcctgcctccatggattctacaaactcaacttgatcatctttcactttgatttggaccaagtcatctggatttgtatctgtttcaattgattccaatttgctatgtggaccaaccatgacttggtcggtacttttcgagcagtcacggtgcttattttgtagttgtacacttagttcaccctatgaaaaccagtttaagcattttccgtataagaaaggaacctaaattatagcctatttttggcacttgcaatacaaggattaaaagaaacaataaaaaagcacacctggacctctcgaagatgttctggaatttcgttgagaaatcgcgaaggtcggagtatctaagagagacagctttaggtcagtcagaaaacagaaacatgtattaataatatgaaataaaattatataaagatacaaacctggaaactggaatccattgaaacatacagaacaaacaatttctttcgggcacgtgtcatcgcaacataaaacaaacgacgttcctcctattatatttgaacaaggaaatatattaagtacttgatttaataatacatacatgtagagaattgtacaagaaatctttaagaaaacgaacctcaactgaggtcccattttcctttgctgcaccattgaattcatggagtaatggaatctcagattcatttgcctgagccactgacaaagtataaataataggcatgaaaagtcaaatcaatgtctaaaatgttaaaggcgtaccttaactatgaaaacagtgtcccattccaaccctttcgactgtataaaggaaaaaatttagaagaaagctttagaaagggttcaactaatgaatagttatttattacactggattgctataaaattttaagaccctaaaattaatagacagtgtctaaagtaaaaaacaacctgatggatggtagttaaggtgacagaatttttgttatcctctctacgagaacgaaaattttctgtctccctctcggttataagatctacaaaagccttaagtgcactatgacagcctttctcttctgctagatccttctccctttctggtggtacacatctagtagataagaattcagatacatcatccaagaggaactgaagaacctgtactgaaaagaaatctcattacaacagtatataaacacagaactaagtatttcaatggaatcaattgacatggtaattggcacaaaaatgtaaatttatgaaattccacacttacagatctgatatcattatcttcattgagatattttcctgcatctacatcaacaactgcccgctgctcaagaaggtatttctgagaaaaagaaaattgtcagtaggaaaaaagaaggaaaaagtaataggccatcagtcagtattaaaacaatacaatactcataccaaacatcttcgttcttataaatgtctaactttggaagaaagacaaacctgaggtaccatgtttgccactgaggtaatgacagctgaaattgattgttcctgtaaacattgacagataagattgccatatatggtacagaatcatgcatacattaggaagcacttgactcaaaaagtttaccctgttaactagctttgaaatcatctccagcgttatcaacaccttccgcccttgtgtgagctgacttctataatcaattacaaggatcacttatcaatgcacaactgaacattcattgaaatatttttaaccattgatattcaaagggaaaaagaatgaaataacaacttatgccaataataataaccattacgacatgttaaattctgcatagtaaatgatgaaactgaggcatctatctaccaacttatgccaatattttattctactaaaccttttaaaggttccggaaacttttgcactaaagatatcacaagcggctgaaataaagctgcattttctaacagttgagattttgtcaatatgttcaattacctgaaagacagattcaaagataagagaatgtaatgtccatgtaacctcaaaaactataacaagaattaaaataaccagagctgaacaagtaccctctttttttcctctttttcagaaggaagtaaggccttgaagactcgacgatacgatccgtcgtcacaacctggcaatgtagttctaagcatagcaataattgcccggactacctatcagaagagaagaaatacatcagaaataagtatcttagttctgcaaaaagaacaaaaaattaacatttctgcaagctggagaatatataagaaaaaaggaactgacaattaaaagtttactagaacctttttcctataaaaggccacaccatgaacgttaaatggtatttttcgttctcgaaaggctgtttggaagactttccccgaaacctatcatcataaacagagtatgaaattcaaagtacatatcttacaattcatgtatccaagaaaaacacccagtgatgtcctgtaaattaagcagtaagcaagatcaacctgcctccggtaaagaattgcaatatttccataggagcacttagcagttgaatcaatagttgcagattcaaaaatcttgtcaatgatgaaagagcattgtgcatcctcactgtgacattctttgatgattacctatgtttagtaagaaaaacttgggcattaattactagcaccaatgtacagaaaatcacgtcgaattgtactctggttattggtgagaaaaagaagacaagcaagaaacctttgatccacatgaattgtcggtgtcaacattctttaatcggcatcgcttaatattattttgtataacagaggatgcggcctcaacaatataacgagtagacctatagttcttattcagtctgacctgtatcataaaggcatatcaaaatttaatccatagagaataatactaaatcacttgtgaatggtatacattctgaaattcatcgttccattaaatttgtgatttaggaaactttgagtaagcataagcacatgtgacaataagaagctaagagtaggcaaacctctttgtaatttggaaaatctttacgaaatgaatcaaatccagaattatcagccccattgaaactgaaaatagactgcagaaacacaaatacagtttaataaaaaaaacagaaagcaaacttaagatacaataacgatgactataacacaaaaaggtaaaggtaattcactgagaagctattgatgtgaaggtttaacatacctggtcgtcatcaccaacaatagttaggtgattgtgagacgaaagcattttaagaagactgtattgcatagcacttgtatcttgaaactcatcaattactatggctttccaagactcctgacactccctgaatacttattaatgaaagagcagcacaaccatcaaaacataactaagacacggccagttaaatgatactcaaatgatacaaaccttcaggataatcagtaagtagcttcacagaacagctaattaagtcgtggtagtctaaagcattacaagaccttaatatatcattgtagttcccaagaattgtggcctgttatcacaagcatcatcaacaacaatcctaagaatcaaagtggaagttccagaataaaatacatctgaaacatgtagatatcaactaacccccatttcatcacccattttgaagcactctgcagtagtctttccagaagctttagcctgaaatattaaaaatttatatgaagtttcacaaataagccaaaagacttttctagggactaggggtgctctttttgatgtgggtccaataactaatattgtgcatgctatacctgagtcacaaacttctgccatctctttgacatatctttaaaatactgtggagaggttataccattagcctcttcacctaatatccgagagtcaatctttttgttactctttccattttcgaatatccgcacagcctcaataacggctcttctttgttgtgcatgcccatatattaagaaatctgatgtgcgctcaatcctagaatataaaatctacttagtcagcatacttcaaggttccaatataaatattttgacaaagacaagaaaagaaaaaactaaagtaatatacactaaatggaagatgttaggaatgtttcatattacaattagcttagcagttgataagtaacaacatacccgttagaaaggggtcataaatgtttataaatttccagtagtattgaaaaacagaaaattaaatgcaaaaaaaggtcagatgttctatatgattggtaaaaactaattagtact

SEQ ID NO: 239136 - DNA, 2821 bp, Cannabis indica
gcatcattccaatgcctgattttgcttcacctgtatatactgatccaaaaattgggagtgggagaaccgattgttattgtgaagatgagggttctctcagctgtgctagaaaacacattacagaagctagaggagaacttgtaagatctcttgggctggaggtattttcggagctaggttttcatgacatgggagaacaagtagctcaaacttggagtgaagaggatgaacatgcattccatcaagttgtcttctccaacccagcttctttgggcaaaaatttctgggacaggctgtcttttgtctttccctcccggactaagaaggagattgtcagttactatttcaatgtctttatgcttcgtaagagagctgagcagaatagatatgatccaaaaaatgttgacagtgataatgacgagtggcaggggagtgatgattttggtgacaatgaaattgatatgtctgaggacgatgatgactcggttgttgagtctccagtatatggacatggcacttggagtcaagaagataacttgcagtgcagtgagcatatagctgaagacacttctgatgataatattaattctgattctaataatgggggtgttgatcaaagttcagaaatatgccctgagaagctggacaattttaatcagcatcagaataaaattgctttagatgagaaacaaaatagagaagttcaagacgattcgtgtacaacctctgatacaggagtcacatcactaaggaaccacatgtctgaaaatggcaatcggtgcttgaagagctttagtagcaatggatatgttttggagccttgtgattctggagattgggaattgggatacatgacaagctctagaaataaggttgacttcttgccaacctgcaatatgattgaagaggtttttggagaagagaccttgaatcacaaggttagagatggaaaaacctttactttctgagatcagcattcaggcttttcaagtcctctcaccagaaagctctcagaaaaaatctgagatatagctttcattttgtacattacacacatagaaacaaagagggggatgggaagtcctgccattaatgtaagatagtgtactatatagcgatttgtttagttctcatttatatttctttaagcttattcttgaattagaaaattccattcacaccttaaagaagatcataaaagagggttttctttacaagggttccccttgttgggagtgaggatggctgataaaagaagatatactgattgtatgagatggagctctgccgtgtaatttttcatatatattttttagcaattaaaaaatataaagaatcacctctcaagattttttattttttttttaattttttttcttacttctggaagattatgatgctttggacagtcatgactcatattgcattgcatgggagtggtccatgtattgatgtacacatatacttgaagcaagggatatattttttgtgcctgtatcagtcggaaaaggaggtttattcttcattttcatgagctttttcattttgtgtctaatgtgattgaattttcaactttttgtatacgtattattactatggtttggtggagcaactttagaaccttttacaagcaaacttgtctagaaaattatataaaccagttaaagtggataatctggttttcttaattcaaagttaaaacagcctaatttgacaaatgatttcaagttcagtgcatttcccctttatatttgaagaattagaataagctgttttcagaaccaaccaaaattaaacaagcaatcacactgtttaattttctgatgttatccttgttgactatgaaaagcaccatcttagaaagggcaaagtatctgtgaatgtaatcttgtatgcaaaaacagtgctgcactatggaaaatattttctttggagagcatgcatttttctgctgtcttattaatcatcttttgaaacatacctttttaaagaccaaatactttgtatgtattcattcatgctcactcatggtcatggatgacctgatcataaataagatttgctttatattgacattggtggaatgactgtagtgcattcatagtataattttccccaataagaggaaaaggatcaaaataaaaaagtcaatagttctgttcagcatttccattttaataattaatcatgtttaggatttgagagggagtagtagtatactgcactattgcttaatgggctagaatatttagtttgggaaatttacatatttagcaataattgacaaagaaaatttactctttacagtaacaagttatttgcaaaagtacaatatctcaaatttcatcatctttaaatttgaaattgtgttgattaaacttataactatctgtattaaaatatatatgtatatttcaactttcatttaattttattgtgaatagtactaatgatgctttttagttttagctaaattgctgttgtgctggctcatcccatatttattcgtgctttttaaaaaatgggtcgtatcgtgcgtgccacagaaaaatatgggccgtgttgtgctaacatttttaaagggtaagccaggcacggctcataggcccggtattttcatgtcgtgctttgctcgtgtcggtccgtatttattaaacaagccaacctattttcatattcgagcttaaattcgtactttacttttttttttttttatatattttttacaattacaaaattatatgtgtatttgaaagctttagttatatttatataacttttaaacaatattttacaaatattcatgtaaaaaattattaat

SEQ ID NO: 239137 - DNA, 3997 bp, Cannabis indica
atttagattagaatgtgtatgatatattgttttatagatcattacttatggagaatgaagaggaaaatgtggatgctgaagtgcagaagtggattgagtttatagagaatgaagaaaaaaaaagaaggaaaacgcaacagtgatttgaattttctttcttttgcttaaaaaataaaaagctgagagtttttaaaagaagtaaaacgaaataaacaaattaataaataaataaaactaaattgagaatagaagtgcgagtactaccgtgtggggtactctttcttttccttctctttttcctgccgccgtgcttgccttcttcgacttcgaggctttgcaactgaattttctgaggattttctcaaataacttccctcagctcaggtattttgatctttttgagttcaattattacactccttttcctagtgtcatgttttctaaggaatatattgtgctcttgtttatttatttatttttggtttaacttattttgtacctttaacttttgccattctgttacctagggtttttgtccccaatttcttcttccctttgttaatatttgtttgagaaataatttgcagtgatatatcattctattgatttgtttgttaaactgtttagtgtttagtttttatcatatgtaaattcactcttgtaaagttgtgacctttaggagtagggtttttgaagcttattgtcaactctattttgaataccccacttctcacaattgtatttattcttttatttttttcagctgatatataattatatatttatatatagctcccctgtctctgccttaaaagtaaaaatgggttctgaagcatgcgagaatctaatcgagaatattgtagatctatcaacaagttcttttgggaaaatgaatgaggttagtgttgtggaatctcaaaaggatgttgagcctccagcattgccggccgtttcagaggatacaaggtctttagggtctattacttctgattccgatagagagaatgtggattcccctattgcctgcagctctcctccctccactaaaaataaaattactactcgtccttgcttcgacttggacaccgaccaaaattgggaaagcagtgttattgatggttatgacgaccctgtcacaccaaaatcacatctttttaatgcctttcgtccttgtccagaagatttagtattggcgccccggtgtagaaaattcgtgaatagatcggagaacctttgtgtgaggaagctgagttttgactcttccaatgatgtctcagaggagaaatgtgaggaggctaatgcattttttatttctgatgaagagatcatcaatgttgtgtatgaaaatctcttggaaactattgtttcaatgcaagtagaggatgttcttgctaggagctcgagttttgaatgggattctaatgactgcaaaacacccccttcgacactacgtgtaaatgaaattgctgatacttgtcctaaggctcctatgaggccccctgcaaactcgaggaaaatcggtttagcattgcgcaggaggcttcagttctcgccttgatggtttgtgtcggttatttacaaagagaaatggatagaaaccggtatctatttcagtagatattaatcttgaaactaacatttgaactgatggaaagtgaatctgtggttctggaaagttatgtctatggaaacaactttctgggtaatcttttgtatagtttgacttgtttttatatgttagttgaattttggaattggactagagtaaatatctagctgactcagtgggcattttattcttctaagaatttactcattattgttattatatatactagattgattttaccctttttattctaggttaatgtagagtgataagtgaagaaaattaaactgtaataccataactgttaactgatgtgggattagcataaaattgtaaaattgatgaatgataaatgcaagatttacgaaattgaatattttttcttttgacaacaaagaatttggatatgaaacaaacacaaggagaatggtagaaatgctaagacattaattagtccacaacttcgaacctcacattttcaaggaaacatcaccattaacttggggcacactaaaaatttgattgaattgttaaaaggtgatgtaaatttggtacataataaatgttatattaaatttgtaacaatatttcttataatgtaaaatttgtaaatgtacaattttattataaatttttatactacttttattattttatttatatatttaactattatattattgatgaactatttttttttttattattttatataataaaattataataatattgatgataaagttattatatttttttatactttaaacaaaaatattaaattatgcatcaagtttgataatcgtgcattgaaacacaatgctaaaaatttaaagtgtttaatgtcaacattttcacttagtatctttcactatctttgttgggatgatgcctctagtgcactcaccttaatttagtagaataaaaaactattgttagcttgatcaattgagaatttttcaattgcaaatgtcaattaaaatttaaagacgataaataacatatttagagctcatttagtacatcgtgatgtattgtattgtatagtatttgtgttagattgaattttattgtattagtattatttaatacaatactatatttggtattaacttatactaataggttatgtaaaattataaattctttacaataaactcgacctcagttttgactcagaccgaaccccagacccgaaccctagacccgaaacatgcgctagactcggacttgaaccccggacccagacttggaccccaaacccaaactcggaccccagacctagaccacagacccggacccaaccctggtctaggtctgattttaagtatggttttgggctcgtgatttgggtcttggtccgggttcaggtctggggtcaaggacccagtttgggttcgggtccgggtctgggttcaagtttgagttcggattcgggttcggggtccagggtctaggtatggggtccggtcttggtccagattcggggtcggggtcgggtttggattcgggtcctgggtccaggttcaaggtttgggtttaggttcaagtctgaagtccgagtccaaggctaggattgaggttgaccctagaccctttttaaatattataatacaagctaaatatgttatttgttatgtattaaataatacgacacattgtattataatttatgatcataataattaatacaatacaatgttttatcaaaacataatgttatttgttatgtaatacaatacgacccttatacggcctaccaaataagtccttaaacatttatctccacatattcatagcatggtttctcatgatattgagacaacaaaaaaaaaagggtatgttccaagagatcactaaccaagttccttaaggtgaaaaattaccttatatattaaggcctgccttaaagtatttggtaagtccccttctgctatgagataatattcaaaaataagaggacatataaccgatgaaactctatgaactgagaggaaaatatatattatagtaacaagtgattgaagaaatcaagagtggccacaatgacatagaatattcttaatataagtacttgatatatagccaccgtagcatcatgtactatgacacaaaaattgtacacagattgtctagctcctcattatgataaaagctccaagtgtgttcaaattccaactaaccttcataactctatgtcaaagttaacaaccctttacaaagactatcattaatttttaaactctcttcttttggtatgttcaaaaaaaaaaaaaaactctcttcttttggtacacgaaatttataagggtttcttttacttagttttttttttcttacttttttatttgttgtgttgtcactttcctatagtatattgaaggtacg

SEQ ID NO: 239138 - DNA, 1335 bp, Cannabis indica
gtggatctccttacattcagtctttttaggccgagacaagggttgtagatccttttgagatttagcctttgcgatgaagatttgattgtattatttattgaatattttgacatcccttcatcctctttctcgcctctgtcgttctttttggtctcctgccctctttgttagattaggggtgtgttagagtggcctttcaagacttcttcgagtaccctttgcatgttttcaatgattttttccaaccagaggtttctcatcctcaactcgttcatctcctcatcatgaactcaagcttgggagcttgaactcactgagtgaggccgtttctctttcccaggtcaatggtgaaaggttttgagatctttcggtgtcgacaggggaggttatcttataggggactgaactctttgcctttgcgatccatttttcaccattatgtgtgatgaaagcaatcaccccatctcactgcatgtctgtcaagacctcttcatgatggtcgccttcttttcttgcttgaggccttcaaccatttgcactttcttcctaagtgaggggtgctggtgtgtctcgccttcgagctaccagttgagtgttgtccaggtgaacctccacaccttagagacgataggagcatctagacattttgcaatgatcatatgtatggaaacaacatagcttgagctagtcattcccacggcggcaccaaactattgatggtgaaaattcgtcaaccaaactatagctgaaaaatcaaaacatagatgcaagacctaagactaagatgaatatatggaaatatgaaaacttaaataaaagttccaataatctatggagaaagatatagaagtttatatttttctaggtcaagtgttacaatgatttcccaaccccctctcacatctgagaatggggtatctataagatcaaattgcctgagatacacttgtcctcaagggacaagttggttgtatgtggctacaagttgtaggtgctagaggtggaggtggccttgcgccttgtaccattgtcagatgttaggtggtcctgagttgtaggaatggtggatgtagagtacctattgttagggcatcaaaggctgtagacgaagtgcctccactacttgtaccctttccccactaggtcacattgaaggcgtgatcgtactctatttcgtacccttctgcatgcatgccttgtcctttgattcttctcccaatgaccttctctccaacacttaagaaaatattgcctttatttctcttccgcatcttctccttctcacatttctctttctcacccactcactcacttgcacacacacacacacacaca

SEQ ID NO: 239139 - DNA, 2247 bp, Cannabis indica
agtcctattatttgttttattatatttgtagtttcttcttaatttttttgttttttttttttttatgaattgatgaggagaccaaagatatttcttgaacctgatatcaaggtaataatgtgacactgttagacattattgataaagttattaattacatgaaattttaggtttgggagttaattttggtttgtcttagaatgaattttattattctatatatacattctctcgttcccaccatcttttgtcttcatctctatatggttcaaaacaatgttaattgttttatagacaataatctaggaagaggttttgctgagtggaatttagcagatcattgaaaactggatttcttttatttctattaatttttttatttttttaaaaaaataatacactttgcaagaatatttaggcaaacgtcatttgtttgtatggaaaatattaaccagtagtcataagatctagtcatctttcagtcttgtggtggaccaaccatagaaagacatatatagacattgcaacttattggacccaactgatacatataaatcatcactctctctcttctctctctttctctctcttttcttctctctccccacctatttttcaccctcttcaataatagtactacctgaaaaagaaaattaattttcctaaaaaattaaatctcaaaataataattttcttcagtattattcatgacagtgataattcattggatctgatcaagatattttggagacctgcgtgcctctttgatcaccatatattcaagccttgatttgcctactatggccatccccatttgtggtatatattctcttcttctaatataggcagagtctctctctcatacattaattttggtatatattcatttagtaaaagaagactttgagcctaggtgcattttttcattattaattatcattgtacatttaatagaaagagatatcgatgtatatatcgtatatgtcttttaaaatataaataaacaagacacaaatttaatacgtattgcatggttacatctaagtatgtatcatccttcatgtaagtataaaatgtaataattatgtatttatatacattgaaaaataaataattatttgttcggtcccttatagtgaaaataataataataataataataataataataataataataataataataataataattgccttgcctgttgttatatgtattaataatagggttgaaactagttgaaagagagaagtcacacccatgatgttgaactccgtacgttgtacagagtatttatgtaaacctcgaagttagcataaatgttcctgctggcccgtacgtaaaacggtaaatctttccggggtatttacagctatatttattagcagtaaactaacttgaatttctactaattatggtatcgatgttaaaagatatatataaccttttagttttactatgtgtgctgcaggacctactccttaatttttgttcggctacatttgatcctacgtacatttataactctccctatgtatattgcccattgcccaatatatatcatatatgtgtccaggttcggccgctttacacttcattactacatttgcttaaattttattttataaataattgtaacaaaaaatataaaatctaattttaacatcttaattgttgtacaaattacaaattaaaatagatatattaatattatacaagagtaagaacaaattttaaagtgagtattttagttgtatacaagtatagtcatatataagatggtcattattttgatatattttacctattatttatataatttgtacataatttttatattcgcttatataaaaaagaaaaaaaaaagcaaaaaaacataaaattgttacataagtattagacttatttatttttatatagttattagaaaaaataagaaagttaaattaatataatttttcattaaaagggatttaattaaatttatgagctgagtagtaataataataaaacaaaataagagaaagttttttattattattattatgattaagtgctctaaaaggtaaatgagatagaaaagacaaaatattaaactttgcttctctactatcatattcatattaccaatatcaattatgtacaatgtaagggttagaattatctattatctagtttgtaggatctcttttggtggatgtctcaaatcaattgagatatttacttaatgtttatgtatttga

SEQ ID NO: 239140 - DNA, 3768 bp, Cannabis indica
aaaaaaaaagtaaaattaaaataaataataatttataaggtcatatattaaatttatagagtatttatcattagagtacttagtacaaataacattatcaaaaatgatatgcaagagagatagaatataattttatatgtttaaataatgtgaaattattccaacttggcacaattataggcattaagctcctttacataaggagtaagctatttatagaaataaaatataagttagagagtgaagatttgtgtattgctgtaaattttcaatgacaaatatagaaattatttccactatattttctttgttattttgaagaagtttaagctagcgacacaaaaattgaatgtcaagaacgtaaaggtaggatggataattggttagatctaaattaatcatacatagacagtagttggatcgggaacaacaataattcttacttaaaatgaaattttgagattttgagaagagttgtcctttcgagagcacaatataatgaaagtatttatttctcactgtcaatccgatgacaaatttttggccttcttaccaaaattcctgaagaaatatccaaatgcaattttaattcaagatttaattcaagggtctcaactgaacaatactatatactcatatgtgttacaatctcaactaataaaaaaagtcagaagatcatacttacattagcaaattcatctcaactgaactctgaccaatagttttgttaatggtgttttgctgcatcaactctcttgccatattcacttcttgccatttaccagccttggcatatatatttgaaagaagcacataaaccccactactaacttgagcttgaggttccaactttgttatctgatttcttactttatcagctaaatcaacattttcatatatctcacaaccattcaaaatagcaccccaaatgttaatgtttggttgtagtggcatttcctcaactagactcattgcctctttcaaacgcccagctctgctcaaaagatcaaccaagcaaccgtagtgctcgagagttggaacaataccatgaacactcctcatttcgttgaaatgtctctggccttcgtcggctagacctacatggctgcaagcaaacaaaacaccgatataagttatctcgtcgggaactacattattaccatcttcttgcatagtttcgaaagttttaagagcttcaatgccctttccatgaatggcaaagcctaagatcatactagtccatgccttcacatccttcttttgcaaattgtcgaaaatcttccaagcactgttgggatctccaactttcgcatacatgtctacaaaagcagtcccaacagcgaggtcattgatccatttggtttttgatatgtaagcatgaagactttgtcccaaaatcaaaccccccaaatgagcacatgcactaaggacacccagaaaggtagcttggtcaggaagaacaagctcagcaatttgcatactcaagaaaagatcaaggctatccttagcttggccgtactgattatatgcagcaatcatggaattccaagcaaccgagttcttttgaggcatattattgaacaagtcctttgctgttttcaagtttccacattttgcatacatatctactatggcagttgctagaatcacattgaaattttgattagacatgaaaggatcatatcccagatggtgaatgcgattgtgaacccatttaccattctctagatccttacttcgagcacaagcaaccaaaacattcaccaatgtaatctcattaggctttacatctctatcttccatatctttaaaagcctttatagcctcaccaaatcgattgttgttcactaacccggaaatcaaactggtccaggccaccacattccacttaggcaccatatcaaaggctttcaaaccagcttccatgtcagaacaacaagcatacatatggagtaaagcagtagaagcataaacatctaactcaaacccggttttcacaatgcgattgtgaacagaacttccataacaatgatgtccaattactgagcaaactttcaacacaaatgggaatgtaaaattgtctggcgaaatgcccatttgcagcatatctttgtacatgatcaaaccctcaattggagtgtcactaaaagaataacctctaatcattgagttacaaatgtagttattaggcttagcaatttgattaaacactgaccttgcatagtaaacatctccagttttgggagaaacacaaaagtccataatcctactcaatggaatgatgtttttgataactgatgtagttatcatcaccccatgtagctgtttcaactcagccatggttttgcatttttccaagagaaagagaattgtgtcataggattttttcataattctcttttggagcaaaactcaaggatccaaatttggactgaaacagaagtgtggcacttagccatgcctgcaataaaaaagaacataacttataatagattagataccaatgataaaacagaacaataagtaatatcaagtttaggacagtttagttgaactacattaaaggttgaacctttaacttggtttgttcccatacagtagccctcttaagcactctcttaaaacactagaggttgatcaaatcagattagtcctatgaagtatgagccacatcatttccttctacaattattatttgcatggtgtttcataattctcagtgtactttaacctacattctacttcaggcaataaaaatagggagatcatctaagacattataactataaggtaattttataatacactagggatgtttcggtagagttttttagtctaatatttttcatgacataattatttaggaccacttgtagatttacaagtacaatatcaaaaataagatttgaatattttgtggcacgtacgactgtttactcttatacatttgataagcaattgtttgaattttattttcgatactgtaactatttagaattttctgacaacttacatatgctcctaaataattataacataacattcgcaattaaaaaaaaaagaactaagaagttaccataatacccgtaaaggtgtactacagaaatttccttaactataatatagttctatattagtgtatattaccttagttatatgatttaatttcagagggggagaaaaaagtagctaaagttgcttgaattaattttctactagtaatattttcaaacaccttgagtgcattaatatttgaaatgaaaaactaagcaaaatatgaatttaaatgaatcttctttctcacaattgacaattgtaaacaaacactttaattaatcaatctctgctacattatatatataaatatatatatatatatataaacacaattacaggggagatgatgaagatagatacctcctaaatctcaagagatggagaaacaaaaaaatttagatgatctgacggctcaggtttctcagcttgaaagagagaatcaccagatcatgacgcgtgtcaaaacactacctggctcaacgttttgagttgagccatcccaaatgtgtgaactcattcgttggatgagattattaacttccaaacgctaataatgctgtcgttttaggtgggaaatggatgtgggatccaacggtggagattattccatggctagtgggagttagttcagtacggttgagcctatgaaaagatttccatgggtgagaactttagaaaagaaaaaaaaaatatttttttttttattttaac

SEQ ID NO: 239141 - DNA, 4853 bp, Cannabis indica
ctctctctctctctctctctctctctctctctctctctctctctctctctctctctctctcttctaaaaccgaagcctatagtgaaagagtgagtgcccacacacatcaagtggtactcaatcatagtgtgtaaggctgtgaagaatccagtttcaagagaaagagattcggactcagatcttggtgatactctgcttcagaatggatacaagggttagagatctgtagtaaatctaagatcctagtaaaaatattttccaacagagtagtgtgttttgcttgtagacggagtagcactcaaaatctcttaggtaagcaaggagcctcgtggttcttcctgttcttcgaggattattgctagtgtttcagtagcagtttctagtgtgttggaaatctcagcagactcattcattgagtctggtgcatctgaattattttcctgcaagggatcattgtgactaggaacaacaatgttattaggagggtagtcattatgagtgttagtaacatcagtagaaggcaaaacaatagtagtaaatggatcaacgttaccagcatcctcattcaattttaagaatgggaaaatgtgttcatgaaagatcacatttgttgacaaaaatatttgtttagtattgatatcgtacaacttgtatcccttcactccttggggatagcctagaaaaacacaagcttttgctctaggagcaaacttagttttgttagcagtgagagtagaggcaacggcgaggcatccaaaagtttttaggtgagcataatcaggtggtttttgaaacaataattcaaagggagttttattatctaagttaggagaaggatgtgattaataagataagcagatgtcattatacattcagaccaaaatttaagtggtgtgtgtgcttgaaaacaaagagcacgcgcaacattcaataaatgttggtgtttcatttcggcaatagcattttgttaaggcatttcaacacatgtaaaagcatgcatgattccatattttgaaaatagatctttaaatacaagctcaggagaattatcatatcaaaatttctttattttacaactgaattgagtttcaacataagcaaaaaattgaggaatgatagcataaacatcgaatttgtgtttcaaaagatatatccaagtaaatctagatcgatcatcaacaatggtaagaaagaatctaaaacccgagtgggatataacatggtaaggaccccttatatcataatgaatcaaatcaaaattgttatcagcaaaagtaatgttatttttaaagggaagtttcctttgtttttccataggacaaatgtaacaaggagcatctttatgtagattagaagtattacaatttattttgctatctaagagtcttaggcatttatttgagggatgtccaagtcttgagtgccagacatcagctttgatagcaagaataggagatgcaagaggcttagaatccaaaatgtacagcccattcttggattcacctcttccaatcttcttcctgctggcatggtcctatatgacaaagtgattagaaaagaattgaacacaaaaattgttgtcatcagcaagacatctaacagaaatgatattgtatctaaagtttggaacataaagaacattacttaggattaaatcattagggagaactatggtgccactctgattgacaataagactttcattgttaggtaaaataatctagtggaattaacataacatatgcattgaaatagatttttgtcataacatatgtgttgggtagcctcagaatcgagtatccaagaatctttcaaatgtatattgaacatactcgaaagaacaatacctaggttacctgtgttgttgtcagtgtctgtattggtcatgttcgattgttggacagccaggaggttcagtaattgttgatattgtgctgctgtcagttgtggtaatattgcttgtccttcatttccagtatttgtgtcaccattcgtttgtatttgatttgcagaggcttcttttcccttgtcatttttgtgaaatccaggaggataaccatgaatcttgtaacatttactcgatggtgtgtccaagtatgtttcaatgagtgcaaaaagctcgatttcttctaggagagtgagacttgttgccttgaggattcggcttgttattactcctatctccttggaaggcaaaagccatgttcaaattaggatcagtagcaggattgatgttgcctttctggttttcttcctaggtcaacaaatgaaacaccttgtcgacttctggcaggggatccataataaggattttacttctgacctgagaaaaggaatctgaaagcccccatcaaaaaggacattatgtactccatgtagtgatgttcttggagcctcttaacaccaccacatgtacatccattgcagacacaattgggtctgtaattcgacagttgctcccaaactgttttgagtcttgtaaagtacatgctgacagtttggttttcttgcttcaggttcttcaattttttccttaaattgtatatgtgagttccattcttttgatggaatctaactttaagatcagcccaaatagtagttgcagattcatcatataaaagactagaggaaatttctttaaaaactaaattcaagatccaggaaattgttgtttttatagcaagcattgtacataacagaattagaagaatgaagtttagtgatactaccatccaagaatctaattttatttttaacagatatagctaattgcatagctctactccaggacatataattgtcttgcccagttagaggttacgatacaagaatgttacctaggttatctttgtggtgtaaatagtaaggattcgagggatcctcaaggggattcctttgctgcacatgattattctgcacatttggtcctattccttcttcaacagtagcagaaacaccatcattggcagtcccttgagtttcagtttgattatcagtttccatggtggaaacagagccagatcagattaggaaaagaaaacactaatcgagaaaaaaaaagaaaacaagaagaggaagttcaggacagaacttcagaagaacaaaagaagcttcgctggagaagaagacacagcgaaggagaagacaagaacaagatcaagatcaaggggaagctcctcttcctcgctctgataccataacacgaaaagacattatgacagaaaagaaagtcttgagtttattgattgatgaaatgatacaagaaacaaacgtatatatacagagctcaacagagcaaataacggaaataacgaaccaacctaaggataaaaatacccctaatgaacaactgaatacacctgacataataactaaaataatggtcacgactgaccattactaacagaggtaaacagcaaaaggggcttgaagaggattcgtgttagatatttaatataaattattcaatgataaatattaataatttaacattgaagcatatatcaagatattcaactctttattaataattaaaaatatctttataagcttttcaggcataaatctcaacacataattcaccttcgaagatagatgagcccacattttttgagagtgttcttgtaactttattctagatcccttgtctcaacccgctctatagagagtagacgatctccaaatcatgtcttggttcaaatactcttgcacttcctaaattgaaggaagttccccatcaaaccgatatgtgaattctgtttatgcatcctcctaattcttctcttcttgagccatagcctcaatagttgattgcaaatcatttttttgtggagtggatagaggcttttgatgaagcttttttcatcttcgccattggaaaagagaaagctcatctcacgtctttttaagtgtgctaacttaactaattttaatatgatatttttttttttcttaacattaatctctagacaacaaaaatcattttcaatttaaaaattatataacctactattcttagggtgacttagttttaacttacgaaatgttttaagaaataatttaaaatttattcaataaataatatataaatattttcattataaaaaattatttgaaaatttatattataaagatataaaattgaattcaggaaataattgaaataatatcatttttcaaactaaccttaatttaatctatataattttataaaaggaaagtaaaaaaaattgattagaaaaactaatatgtatagcttgtaattttgtttttataatataattattattatttattaagtattttagtaatagattattttatagtttcaaattgaaatataatttgttttatctaatgattctctttttcttgttaaataaaaaacaaagttggattaaaaaaaataaaataaaaaaatctgaattaacttgaaattgtattcattatcactttcttctcttaaatgatttttttttatcgtttattctgttttagttgcatatttagaaatataaggatatgattttgtcccgttattgtacttttacagattgtaatccgtgatgtacgacagctgttagatgagagagttatttgatctgacggctgagattgatctagaggtaattagggttaaaaagtagaaacctaccctaacactcatttaatgtaccctgagacccatttaatgtaccacggaatacattccgtgaaagtacatcacgggacaaaatcatatccctaaaaatatatacatataaatatatatattcatgcatatgtacgtgctaaaatactaattttttttttaaaaaaaaaagaaattattacatagaaaatataagttgata

SEQ ID NO: 239142 - DNA, 5035 bp, Cannabis indica
agcatcatggatggatacataatgcataccgtgagtgtgaaacttgttccttttcattgaaatggactggcgtttagagtattgtatggggctcaagtggggtggtggggcggggcggggtggttttggtgtttgcaatagcatttaatcctttagaatgattgacgaagattttttatgcagttaaatcacgtcttcaaaactagagatattgtgacaaagaatgattctaaagcggccaagcaccaagagaaatccaaggataatttacttaatgatgatagtttccttgatcagggatttactcgtcccaaggtagtatttattgtattattgcatttgcttgttagactatggattgggtgggaacaacacaacatgacaatgacacaatttattgcaatttttggcattcaaaacagcccaaaaaatacatctaccaaaattatggtgattttgtaatgctctttaagctcagtgactaaacatttttttatcatgatttctaggttctgattctgttgccgctggcaagcattgcgcttcgagttgttaagaggcttatccaactgaccccttcatctcacagggtaattggctttcattgaattgtgaagaaatgaatgtacttatgatttgatctttaataatttaatatgtagtctggtgtttcagcttgctatcttttttgcttgatagaagaatagctgtgatttttaatctattttatttctcaattttatgagaaaactttattttgtatttagaatagatgttcgcagtggcttgctatagtagtagactaagtctgaatacaagtgttaaacctcaaaacctgaatatttatagttttctttgagcttctacattatgattttttcagaaccatagttatttgtcactaatgattttaggttgctatttggtctttcacattaaatgttctagatttttgctttcagattggtgtacagagttgttatttctaagataatttcttgctgttaaaaagtgtaccaaaagaaaaagcatcaaatgttatgtgtctgttttgtcaggctactgtggagcacatggaccgattctataaggagtttgataatgaagatgtggaagacagtgaggatgaaaacaaagaatctggaagtggccaggattttggaaatttaaattctcaaaagtcttcaaaaccttccgactttgaatcactgtttggtgggattaacaatgatcattttgtatttggtataaagttcactaggtaatctcttttacatttagtgagctcgaatagcttctaggtggttgtctcattttccactagtaaaaaggaaatgcatcctaagagggatagcttaaatggtcaggcatgtttaatctcacaaggtccggagttcgagtctctcttgggtgcctatatagcaattgctatagttttctagctcccaaatattgaagggttagtggggatcttagctttaagaaactagtaaaaaggagctatatagttgttattatgatgatcatgtgagcaagtggagaggcctagtgtttttttttttgaacaaattaccaatcaagttttagttgtggcaagtagcttcacatccttgaaatcatggagttgggtatgaaatatgaacaaaagtttaactatatgaactttatgttttctggcatctgcatggtgctttggatttctctcttttctctctgcttgtgttctgtgtgaaatttctgttgatatggtggcaatgcagagtaaaatgagtgtatagataggttttctaactcatttcgtgctgtattttttcgttcttgtttgtcaggcggagcataaaactgtacagtgatttttattcctcggatattatagttgcttctgctcttggtttgcttacagtaagtgattttactttttctgttgtttaaagtttttttaagcttcttactatcaatcatttgaaccatataatgtatggggacatgcacacactctagctataaaaatgaaggcatgtaagccacaaaagttgaaaaacaggggaaaagaagaagcaaaagctaatacatattttataagcaaaacatatccctacattataattttataagcaaaaccatgagacttaaataccccaggggaagttgcattataaataagtttgttatgaatacagctgttttatatttcttctacatcttttaatttgatagtaaaagatagatttgtcattgcgcttggtcttggtaaacaaacttgttgaaatgagttaatgtacgaaagctatccatagatcataatgagctctggcatctgagagacattaattttagacttattttaatccactgtaaccaatatggaagtattaatgaacactgttcttgccagaaaatggggcaggcagaaaaagacaaggacaaagatgttgactatctttcttctatagaggtattttgttaatcatgttgattttactgtgttttcttggtttgtctgttcttgttttatgcttttgtagtttcctttctttaatgatagggtgtttttctgatgagcaggttctcattattgattatgcggaggtcatcactatgcaggtaaatgaacagttaatttagtttccataattatatgtaataacattgatcatttgctatacctctaacttttcttctctattaacaaattcagaactggtcttatttgtcatctgttgttaaacaattgaaccttattccatcaaagcagcatggaactgatgttatgcgcataaggcagtggtatgttctaattaatcttttgctagtgatattaagttattatctgtatgtttgtgttatggttgagttacctttattggtttatataccatagtattttacgttttttcttgttttaatgtagagcaatgctagtacactcttaattggtacacaaattatgcacactacgatctgtcattaatatcaaccaaaatttaaaatgcgaggttttatgtataatttgggagtgtccctagcattacatggtagatattaatgatacattgtagtgtgcatgttttatgtataacttgggagtgtccctagcattaccctttatttattaaccaatactgcatcacttttatatcgtttgctactttttattgttgaactaaaaccaatgggattctctattgctaaagagatataattcccttcaacccataccacacaaatatagccatatagtactatagtagtgtcgaaaaatatgatagattggctcttcactggttcagtaattctgcaccacatgagtttgggaagcatcatttgaaatcggtttgtgtttcaaaaaatttgcattattttagatgaaatagtttgtatattggtttggacttcaattataagtttataaaatcctctacctttgttttttgttataatgtgtaggtacttggatgggtatgcaagattttacaggcaaacaataatgttgtcatcatatttaaacccaggtgccactcatgcccgccctttaaatattatttagaaagatttgcagagacttatcttttgtgcctgcataatatgtatattttgtatttgaattgtgtatttttaatttaaaaggtttcatatttttgaaccatctaatgaatccagtactctgcaatatcaattttactctttgttttatacacactttatggttaagaagcatgtcaagtcaaagacatagttaatttgtttcttctaaaccatttattaccttctgtttgtaaaaagtcaaaatgtacttagaaattaaacaaaggggtgatatgaattttttttcttaaaaaagaaaaatatgattttaatttttgtatataattatacaatattgacttgaaccttggaccagttagaaatatattgacccactcaacctctttgacattcttaagacaaatagcaacccaaaacatgagcctttcccaaatttactccaacttgttttgcgtatcttgaaagttcttgtcattcctcttttgccaaatgttgtacaaactattgggtcatcatctgatagctgttccttggaacaatgcacgatatctaaattaagctagaaaccttatcctatcaaagttcccgcgaaggcacgatgcaagaaaatgttatttgtacagtaaatcacttcttacatagaacacggtgatgggaaagtcagttagtaaggaagacataatgagttggataggaattcaaaaataaaaaacatccaggactgacatttttcttacttatatttgatttatttaaaatgataatttgatttagaatgttcaaagcttatttgttaaattattcttttgaaaaaaatcctatagaactcttgatcatcgacaacaattttattcttaattgttgctgatataaatgcaatgtgctcttaatcagcattaacatttttaatcttaactttgcagatataaatgcaatgttcaatcaccagtgtgttaattaccaagggaaggtgtgttacttcacttcttttggttgctgtcaaattagagatcacgaaacagaaataagaacacctatttttgtttgtttcataaggttgctttggatattcaggaatatttattaggccatgccaaaccagttacaacataatgcctttatttttcaatgaatagctgtaaatctctagccccccccacccccacccctaaaaacctgcttgttcatattgagagtaaattccaccaatattatggatccaactatgtaatctaaccagtgtgataggtgacttgtcaacattacattggtgattgttataaaatctctttgggctggtttagttcaccaaatgtaatatgacaaactcacatgccacatctttgatgatcagtagtttgcaatgtatttgatgcttttttttttttatatttaaaggtgaagttggagtgtgaatataaaggtgtccttcccaaggtgctgctacaggtgcaacaggtaatcatttgttactatcttgcattaatat

SEQ ID NO: 239143 - DNA, 2309 bp, Cannabis indica
ttaaaaaaaataaatttataaaatattgattaataattttttttctcatcaaagaaaaaatttggaacttcaacaataaaaagaacaaaaacagctactaccacttctagactttatcactaccaaccattcaagaggacaaatacttgtatagaataatgtatatacataaatatacaatttttttcaacttaccaccctatattacaaggcaaatatatatgtgtcacttacttctttatttaattctttccattaatttattttttaaaagtaaaataaataaaggtcacttttttagttttgaataaaaataaaagtcacttttataagtacaactttttttgaaaataattttggaaaaaaagaaagaaaaataacaacctaatatatagtgtagtggtacaaatatctttgttagcatcttttcttgttttggtggaagattcaaatttctttttggtaagagattagagtattttcaactatgttctcaaaacatattaaaattattaaatactaattaaagaaatataattagaacaagaataataaaaataattttttttattttaaatttttaataattttaactaaaattaagctaaaaagtaaaaagtaaccttagaaatgcttttatacttaactttgtgcattataaatattcctataaagagaagaagaggtatacttttaataggatatgatcatttttattattattaaaagagagaaagaaagaaagaaagaaagatgcttaaaaagtgataattttttttggttacaattctagatagccaaccaagttagtcaagttttgacactaacaaacgtgattagttcttggaaatgaaatagcataaataagacctctttagtcaatttttcattatgttccaataaatatcttttacattgttttgtactatataacctatgaaacttacaaacacacaatttttattattacaaatgaagtgtatattatttaataattcttaaattttattaattctcaatattataagacataataatgcacacttgaagaaagcctcaaacttcttgagaatgagagaaacaatagctaactattactggtggactgagaatttcattcaaataagccagaattgtaatatatatatttatttaggaggggtgtacacctattttattctacataattaattttaatgttaattttttttttttgtatacattaagaaaagaaaaaaaaaatgagcataaacaagagtttggctttatcaacataaggggactaaacaacatcacctcataatacaaatataaatcatatacaaatgtgcatgcttaattttaggtcatgagatgataatttttcttgagagatctcactccgaacaagtaagtaattatatggttgacaaatataggctattgtggatttgtgtaattgtaatcataataacaatatcattataattaaaaactttaaccacctttatttttaaaacaaaattaaaaattattatacacagtacatcccactaaacagcaaactcacgatttgaatctttggtctctctgtttttgagagttttgtcttgtctctctctttgagtgtatgcagtgtcatcttttgttgactgctttttgttcttttgtgtacgtattctgttttttgtgcggtttgtgtctttgttttatatggcttctagcagccttaatatggatgacattgatgaacgttggaaaaatgtccaacttgaggaagaagatgcagagcaggttttttatgaagaagccgaagaggaagacgatcttgctattgacaccagatggtgtctcgttgggcgactgctaataggaaaggtttcagactttcgaatctttcagaatctgatggctgatttatggagacctggtaagggtatgtatgctaaacaattagaccaaaacaggttcttgtttcagttttaccacgagttagacataaagcgtgttattgagggtagcccttggacttatgatcgcaaaccgttggtcttaatccgtctcaaaaatggtgataacccccgcactctgagccttaattctcttgatttgtggctacaaatccacgatttgcagactggctttatgaacatgaaggtggctatggatgctgggaactatgtaggtaatttcattgaatcagatccgaataacttcactggggtatggagggaataccttcgggttagggtgactctttctcttgatctcccacttaaacgacgtatgaagtttcgtaagaaggatggtaatttctttcatgctacttt

SEQ ID NO: 239144 - DNA, 1914 bp, Cannabis indica
aaaaaaaaaaaaacaaacaaattgtagatatcatggttgcttaatgaaactatattacagtaataaataactttgctaaatttcatcatcatacattatgtggcagaatgctttggaaccgcatatgagcaagaacacctttgatttccactgggggaagcaccatagggcttatgtggataacctgaataagcaaattgtaggaacagaactagaaggaatgtctttagaagatgttatagtcactacctacaacaaggggaatattcttcctcctttcaacaatgcagcgcaggtaagaggttttgagttgatagctagtgttttgattggattaggaaaatgtattcaaacaagagtattatatggttgtgaacttgtatttagcattggaagaatctgttttgttaaactcctattttattaattttacttggttctttaaaatatgatttcagttacttttctcattaggcatatagtctgtattctcttggtagttgatagaaggtgctatgaatgccataagagctttgattatagtaaccttaacacattgacttactttcacatcgtttctcttgctctcatttacagaaagacaaacatgcacaataagtaatttatatattttcagtagcctttgttgaagtttccagttgcttatatgctgcagatttggaaccatgatttcttttgggaatccatgaaaccaggtgggggaggaaagccatccggggagcttctagagctaatcgaaagagattttggttcattcgataagtttgttggagaattcaagacagctgcagctacacaatttggatctgggtgggcttggcttgcatgtgagtgttatattaagctttgctatcatatcagcagttcgttcaatataaaagttctgtttttgtattaactttcatggttttccttgcattttgatatagacaaaacaaatacacttgatgtcggaaatgcagaaaaccctaagccaacagagcaagataagaagcttgtgattgtgaagagccctaatgctgtaaacccacttgtttgggattactatgtgagttttattatcgacaaaaccatttcatgattcaatttattaacagatatgcatcataaatttgatattcccagttacttttctgtgtattgatattttatttatttatttcatgcagccccttcttaccattgacgtttgggaggtattcaatattttttttgtcttcatttttaattgaatcaaaaaacgttaagttactgattactgacctctggttttgtttttttttcttcctcaacagcatgcttactaccttgattttcaggtgagaattcttattgacttatcgtgaattgtaacgaaaaacagtctgccctttcttttcattgtaaaatctttggaaagtgtctaatgctgcaaaatctgacaaaattttcttttattattcatgtagaaccgacgaccagattacatatcactcttcatggagaaacttgtgtcatgggattcagtcagttctagacttgaagcagcaaaggctgaagccgctgaaagagagttagagaaagagaggaagaggaaggaggagaacaatccatcagacagtgaagatgacgaattattagtagacagtattagtgatgactcagaagctgaatgatttctttctattttgccgtgacgtgagaatattaatcttagaaattcctggtaaaaaaaaatattatatgtgaaggtgatatagaggtcagtgtgtgtcactactcaggactcatgagatactcataccaagattttgttatttctattgtattgtgaatgtctatgcttgagtatgtagttctctgttgtcatttgaaataaatttgagaacacgtcatgtacaaaatattaatctt

SEQ ID NO: 239145 - DNA, 1933 bp, Cannabis indica
cccagcgtggctacaagcagaagaatggccataaagttatttcattaggcttaactagagcactttccatttgagaaaacatttcaattgcttctcttccaagaccatgaagagctagcccagacatcattgttgtccaagttacgacacttctctgtttcatacttcgaaaaacatctagtgcctttcttatgttgcctgactttgcatacatgtcaataagtgcattattaagatgaagctttccagaaaatccacgcttctgcatatagttatggatcctctcccccaacactactgaacccaaatgagcacaggcagaaattacagccaagattgtaacttcatcaggctccatattctcaagctgcattcgtctaaacaccatgacagcctcttttggcctcttcatcttagcaaacccggcaatcaccgaagtccacgaaatcaaatctctctcaggcattcgtttgaagaccttccatgcattatcaacatcagccaccttaacataacctgtgaccatggcattccagagcgccacatctctcatgctcattccatcaaacactttccgggcatccaaaatacattcacaaaaagaatacatccgaacgagtgaagtacccacacaaacatccgagtccaacccagttcctataacttgacaatgaatctgacgaccgacgtcaactgcagagagccgaatcacagccttcaaaacgcagggaacagaataagtgtctggtcgcaaaccggtggcaaaaatgttgttgtagagggatatggcgagtgaaggagagagaacgttgatcatggtgttgtaaagataaatgttgggcttcggtttcttgtgattgaaaaccatgtaggcgtaggtggaatggccgagagaagagcaagcttggatgaagtgggcaaagattacattgtcgttctgaagagcagtgagaaccataaaggcgtgagcttgacgaatgtgcttcagggaagagcagtggctgagaaaggagaccaagtgaaggttcatttggcggttgagacagttggggcgatcaggttctttggccttgctcgcattgagttggctttattacgaccttagctttagctatgcatggtcctctacgagggcgcacactcatcagttaatatttagtgggatgtttcgggttgtggtggtgcgcatttttaaccaatttttattgaatcacaccacatatacctcaaaattgcacaaactacaggtgttcatctacactggacaaattgccacactacatcataccctacaaaactttaacagtgtgtttggtagaatgtgatttcggctatgtttggcacgaagaaagtagagaaagaataatggtgaatttatagaagatgaagaggatagttacccttccttatgtcgtttggtatttggagtaaggaggatggagataaattatttgttaaaattgctataatatccttattagtataaacatttgtaatttttttgaaggataattttagtatttggtgtgtatattttatcttttgctctaatctttctaataattggaggattgaatttttaaaatttagagagagaaagtctctctccacctgtcctctcccttccttcctttcttcctcttaccaaataaggaattctttctctcctaacaactctctccctccacccatttgccttcctaccaaacatagtgttaagaaagaatggagctttatgcagggagagcacaatctcacttgtttggtaacaaactgaagggaaaagagaaacaatttggaaggaagagaaatcatccctgggccaccatttctaatcagttcgccttcagcaatggagagatcagtagtgatcctcgcctaaagggcagtaagctgggtactatcatccaaatttctaactcttgtagcagcc

SEQ ID NO: 239146 - DNA, 1632 bp, Cannabis indica
aaaaaattgtatatgaaataattttttttttttgtgtatataatatgttaatttaatcataaatattcaaattttctccattaataagtacagctaactttcaaaaacacttttattttcctatactttttcggtaatatttttgaattcaatcaaatcctatttaaatgtgaaaactttacccttttgaatcctcaaattttctataaaagttttaaaatcaagttgaattgttagaaagaaagcactgtcacatagtaactcagtgacacacattcacgtggcacgtgtttttagcgcgtgatgaaattactttcttaggtctctaatttaaaattaattaacaaaaaataaacataacaataaaccttactataaacaaaaattaaataaaaaataaataactataagagaaaatcaataatatgtaatatgtatgtgagtgtgtactactcacgttgggttgtagctataatactctctctctccattatagtctatctgtctgcttctctgtcaatctgtctttctctctcttctcccatttttatttatttattttaattattccaccggaactcttcctctatacattaattccttccctctgattcgttcccaagtcccaatcccagctctcatctctctaaacacaccttgtgtttttcaagaatatataatattaataatccaatccatcatgactctaagcaacaatactaacgttaatggtaatggtaatggtaacaatcacattgggcagttcggagatacgacattgactaaagtgttcgtgggaggccttgcatgggaaactccgaaagaagccatgagagaccatttccataagtatggtgagatcttggaagccgtcatcatctccgataaactcaccggtcgttctaagggctacggattcgtaagtttattatcatccattttaataatcaattgcaactctcattaatcagatcatcagatattattgtccttttatatatataggtgacttttaaggaacctgaagccgccaagaaagcgtgcgaggaagccacgccgatcattaatggtcgccgagccaactgcaatctggcttctctaggcgcccgccgaccaaggtccgcctctaatgcaaacactcctccaaatcctcctcctacacctcaacaaggtatacatatatacatacatatatatatatatgatatatgttcactagaaaaattgggttatatataatctttatgtatgaaatattaataggatctaacgttggaccgaggtcaatgtcgcctgcacctgcgaatcacgtgcagtggtattatccagctgcatcaccccctgcgacgccgtttcatcggcaacaacatcctcatcagcacgccgccgttcctgtctacgggtatgtacttttttgtcattttatttgtgtgggttattattttaattaggctaattaagatttttattttggaaatttaatatgtaacaaatatgtcttgaatttgtaatgtcgttaaagatactatatgaattattgagattttttggatttaagaatttttttgtctaattttagtagaaaaagtctaatatgaataaaaatttaagagatataatttagtatatgta

SEQ ID NO: 239147 - DNA, 2733 bp, Cannabis indica
attaaaaaaatttattagcaaaagaacttcttatttttaacaaattgaaaattattaaaaaatattattagtgtttaacatttttttaaaatatcatactatttttatgaatgtaattaagtatcaaatctcgtatgattttaaaaaataaattttaaataatattgctaactaattataaaacgacacctataaaaaatattgtatctaataataatactctaacaaattttattaacaaattaaccgagcgataaaaaattacactaggtaaataattacaaataatcatttgctccataaatttacaatgttcaaatcttatagcaacacattataaatttaattcaatatgatttaagactaattaggatatttatctgcttgaacttttacatgtactaaataatactcctgaacatttttccttaaactattgaaattattagattatagacttttgtctaattttattcaattttactaattcggcaattctccatgtactaaattgtacttcccaaactttgaatttaacaaattatattctttaaattttgacatataacaaattatgtccctgtaattttaatttataatttcaataattaagaaagaattttttaaccactttaaaagtttagaaatataatttattatatattaaaattcaacggataaaaatctaaattaaccatttactaatttaatattttgatgatagtttaggaaaatttccatgtggaccataccatagatcctaataataatttataacaatattttcattatcttatacaatcagatttgataaagtttgaatctttggtttatcaaaactgaactgagcaacatttgaaagtcaatttcctccattaccaggtacaaatttcttctcaattcaccattattacacaaaattgttaaaattaagaaaaaccctttattagatctattcatgttttttcattttgtgttcaaatctgattggtgggttttgtttattcactcaaaaagtttcaaacttttgacttttctcactctcaaaaagaaaaaaacagtctttttaacattacaaatctttcccaaatttttcaactttacaggtcttattttcagagcttgaagaagcaaaaaaaaaaatggagggatctcatgatcatccgtacatacccagagatttgaaaatcgaaggttatgttccattggttcttcctatgtccaccattgttggaatctatgctgcagcttcaattattgttgtttccatagtttggatcttctctggtaaataaccccttttctattttattcccaattctcaatttttattcccaaatctgaaatgattgtataaatatccctatgtatgaacaggtaaagcaaaaaagatcacaactttagaaagatggttaatgtgttggtgggcattcactggacttacccacatgatacttgagggctattttgtcttttcaccagaattttacaaggataagactgcttgttacttagctgaagtttgtaagtgttgttgtttttctgatattaaccaaatttttttgaaggtgataatataaaggtcatttttttatttgtagggaaagagtatagtaaaggggattcaagatatgtagctagagcttctgatatagttgctgttgaaggactaactgcagtgcttgaaggtccagcttgtcttctagctatgtaagattcttagctttgttttatgtttttcatattgtatagttttgatttgaaattagccaagaagagtagtttaagtgattaggcatgtgaattgctttttactatgtgtgtttgctcttacaaagtctcaagtttgagtccccacttgaatatctgcatagtgtagaaatcctatttcgagtaatgaaacaaatccaaatataacttattttcattaaagagtttttatgtgtttttacaccccttcaagaccacaaatatgaacaaatcctacctgcataacataaaaatcttatttcgactaatgaaacaaattcaaatttaacttgtttcactcccgtgaaagagttcttatgtgtttatacgcccttctagaccccgaaaaatgaacaaatcccacttgaatacctgcatagcataaaaatcctatttgactaatgaaacaaatccgaatataactcattttacttttattgaagagttcttatgtgtttctactccctttcatgaccccaaaaaatgaacaaatcccacttggatagcgtaataatcttattttgagtgatgaaacaaatccaaatatagctcatttcacttctactaaagaattcttatgtgtttttacgtcccttaaagaccccgaaaaagaacaaatcctacctgcaaaacctaaaagtcacattccaaataatgaaacaatttcaaatataactcatttcttatgtgcttctaaagaccccagaaaatgaacaaatccctcttttattcttaagaacacatcactacaaaagggtaatagtaacaacaccattaatctgattcattagccatgtaagttgctctcaaattagttttctatgaaagaaatactcaaactcaaaacagtatatgtgtacattttcatatggttttgggtgattttgcattgtgcagatatgcaatagctacaagaaagtcatatagttacattcttcaatttgccatatcattgggtcaactctatggaacatttgtatactt

SEQ ID NO: 239148 - DNA, 2173 bp, Cannabis indica
catcttagtcacatatctctctaacaaacagaaattatcaaatccaattcagaaattatggctttgcactccggtataggtttttccaagatcatcatagccgaaacaggtattattaattttgaagcaaagtgggttcgatcaagggatctacaatatcggacggtgcccagccaagttctatgcggtcacgtaaatcccagagaccggtctggctctgttccggggattcaattaattcgctgatccttttctacagttcatcgggaaaagccttcacctctttctcttttctacagttccgattcactttcaccacgagttaagagttaatacatgacaaatgtgcaaatggcaaccatgagcgatccagtggcaatgttttttatgaaagtcgtcacctgtgttttcatgcctacctcctctacgaatgactgataagttttcttcatttttatattatttaagttttcttcatttttatattattgttgttgttttattgctgtttcttgttattgtttaactctaccacatagtagcacatacgttacataaggatagtttattgtcgaaaactctcgctctcggtcccgtctcttgcctccgatgactggtggtagcgtccataagtgatggaaggttcacactctgatcagtgatacccgaggttattacgggatggtctttaattgcatcttaaatgtttagaaatttttgagattgccaagtgagcgggcggtgtctccgtttcgttatggcatttgcgttagatacgtttttgtaagtttattggaataattgtattagttttatatttaatttaatttattaatatttattacttttcttatttatttcaaaacttaatttatttaattagtatttattatcgtattttgaaagattgttttatgattatataaggaaaaaataattaatttgtatattatttttctttctttttgaaaaaactctactctctaattaattttaatttattacagtttcacatagtcaaatgttacttttaaatccattcttgttttattactgggtatattaaatttgtttatattcatatttttggtatgttatgtaattttattctcttattattttggtggttttattattttctttctcaattccttttgtaggttataattttttactaatttatttgtatttaatttgatttaacctgtggtttttttagtttgtttagttttctttttttagtttttaagagtgttaattggaatattttcttatataattttggttagtttgtgccatttgttggttgttagttagtgctattttatttttggctattttgttccatattatttggatatgttgcagtatgttgtagtttcttttgggcatggatacaacctcaaagagtgttattgaagattttcacagataaattttaaatcttacttttcaaatattttttaataattttgaaggaattttctttctattttaatagttttcttataattttttgttaactaattggttgttgtcattttttttataaaaaaaaaaaactaggtaatttcaattagaatttgatttattgagtttgattaatctttcatatgtatggtgcaggttatattggttattatatttctgctttggaagacttagctctaataattggacataccaaattagttttaatacaatagtgacataccgagtgaaaaaagaattgtaagataagtttgtgttaaaataataattgtgttttaggccttggtttaaaatttacaatattatcattgtatagtgtgctaatccacttttatatctatttgttttataggtagtttttggtcctattggttgcttacatcggatgactcttaaaggtgatctcaagttgttttgtctaaatttccgagataacttggtcttatataagtcactttgtttatatagtgactcatattctgactttgtatatctttggctagataattagcttgttgattgaaagttttccagcacgattgtcatagtgtgatcctgatcactctctcaaaaaaaaaaatcctatctttcgatcttgataatttcttctctctagggtacactgccactgttttgctcaataacctataaattatcggactttctcggagagcttcaggta

SEQ ID NO: 239149 - DNA, 4014 bp, Cannabis indica
ggtcagtcatcaatccaggaagcagccagagtggcgtacgtcctgtataagagccattagtccgtgggtgtaagggcccaatggaggcttgaagcggggacgttacagtctcccatgctgtttgactggaaatggaatagtactcatctagaatcatgtagaagattggcactaaaattttcaattctataaaaggtgtggtaagattaaacttaatcatttaagtttagcaaaggagaatttaaaagtgttttctatatgctgcaaggtttgaaattattttcttttacatctagattgcattccaatcctccaaaatctactatatactgtagtggcatgcatgatagtgagatccaaaaatcattggatatgtctggtttctgtaagcagaatttaccttttagatatttgggagtgtccatatgtccccaaaggattttgggtaaggaatgtaaagaattagctgcgaaaataacttcccgaataaagacttagagtaccaggaatctctcttttacaggaagggcagttcttgtgaactcagttttaatgactataaattcatattggagccagattatggttctgcctaagaagactattaatgaaaatgaggcaatttccagagcatacttatggaaaagggcagcatactctcaatgggactggtttagtagcttgggagtatgtttgccaaacaaaatcaggaggtgatcttggcttgaggagaataacataatggaataaagtagctatgttgaagtacgcatgggagattgctaataaagaagaaaacttacggatcaaatggatacacaatgtatatgtcataaatgaagactggtggggctacaatgcccctatccaagaaagctggtactggaagcaggtggtagcagttaaagatcaaatgtctctgttagatgttcaacaattcactaagaccatgtatcaaatttcttttggatacaagttacttgttccttctcagcaaaacgttcaatggagccaagatatttggggattttaacatacccaaacataattttactatgtggctggcaattcaaagtaggctgagaacaagagataggttgtttaagtttgggatcattaatgatccgggcttcttattatgcaatgtacaggaagaatctagtgagcatctattttttacatgttcattctcatctcaatgcttataggaagtaaaagtttggctttaatggaaggcttgtactgctaacattaccagacttacaagatggattggcagagctaagaccagtaagttcaaaagcaggtttcgtctgctgcattggttggtttagtttatcagagttggaagactagaaatgaaaagctttggaattcaaaagctgaagatgtaaatagagtaacttgtatagttaaagaattggtgaaatagagaattaacagtgtctggccaaaaaaagttagcttgaaggacatggaatggttctttgtaaaggaagaatattgtatagaatacttgagatcgtcaactgaagatgctcatagtttgtaaaatagttttttaagagtaatgaaacactaggtgattcatcaaaaaaatatataattagggtcctaaatagtggttgtagaagctcaactaagaaagaacaagagagagaaagaaagggttagagagagaagtgttttgtagaaaagcttaacaaaaatggttatgatagttaggcttgctattgatgctgagaaatagccaatacgtaccaattcgttagactagcaagatgaataaagaatgtaagtaaataatttagagagatacacaaaatttatagtaattcattcctcatgtcacaatggtaatggagctcgtctactacgagttttcattttttacgagaatttacagataaagactaagtgcttaagctctggtttctagagagagaaactagagagagattctcttaccttgtgagtagttttttgaatgtgaaaaatgagctaagagagctttccttttatagttgaagaagacccacaaaattgggaaaaaaaatacaaattggatgtttctgatcatagatgatgatctaacggtaaaaattagcttctttaagtgatagtcatttttcaaagcccgacgggacccgctgcgggtaactcggagcttatttttgtaactcccttaggagtgaaatatgagatcaatagtttcagaattgcgattgaagtgagagacatgacttgatagagcattaaattagctttgagatgcaagttcaatcgcgtcaatgagatcaacattaagtgagttatgactattttactaaaggtagttcatgacccagtgcccaagtttacatatgatgtcaacctggacgttgggtaagtgaaaaaatatccaaggaatgtactttaagatgcctaagtgatattttggctcacttagtctatttctgtattttggcaaagcttgtcaccagttctcaaagatgttgatgttctgcaaaaatgagagacttaaaactcttcatttccaagtgagtttcacatggtggaaatggaaaatgcaaagttatgaatttaacttttttgacttaatggatcatagttattgtgaaaaattagatgaacggtcaaaacaaaatcagaattggataagcttaattcagcgcactaggccatttgccaacctaagcgttgggtactctgttttcgagctcccaaattgtcgttttgatatttctaagattcttaaacttgaggacgaggctttctacctcgttttgaccatttcagattcaatggttgaattagatttggcatttgaatgattgagaccagcgcataggttgattgtcaacctaggcgctcaactctacttccaaggcctcaggtttgtggttttctgcacaagccaaataagctcaagttgtctgcaagttgtgtggaggaccttatactactgacacatgctcaatagatgtcgacagttggccaatggaacaagttaacgccattggaaactaccaaaataattatggtcgtcagcaaaacttttaaaaacaattttatcctcagcaaaatcaacctcaacaaagccaacagtatcaacaacaacaacaacaacaagaccctaatggacggtctaatcctcaattagacacgtacacttgcgtgttgaaattaccccaacattattacgcggctccatttctttagatatatcattgcaaatggcaaagtccaattacttaaagttcccacatcagatgatgttcacaaaagctctacttactaccaagtacaaaaactgtttgaacctataacttctatatcaaaaaataactagtctgaatatacattagcaatataaagatggagaaattattaaatctaagtgcttgcactactacaaaaagcagtttttgcgtcagtcaatacgacagtcaacggccgtgaccgacgcaaaaaacaaagggggaattttggcgtcggttactaactgtcgcaaacaaataacaattagcgtcaattgttaattcgacgttaattgaaaaccgacgagataatttatattttttataaaaatatatttacttatgcgtgggttactaacggacgctatatacaagttaagtgtctaattcaaactgacgctaaatactttaaatataacaaaacctaaaatttacaatcatatctctttatccccattcgaaattttacagccaaaaacctaatagaacatctctctcttcgatttttacagccccaaatctaaaagtctccattaacgttgacaggccaccccgagccgccctttagcaatctctctttctcttcccttatccgtcggaaatctctctctgtcaattaattttttgattttgattttgcttttagtttttatggtttgttgattaattgatttttaattaagtttatttgatattgtatagcttgactcgtcaattgctctaccccgttggcttgaagttcttctctgtgaaa

SEQ ID NO: 239150 - DNA, 2215 bp, Cannabis indica
gatgatatcatctgtggcatttgcattccctcattggtcaagttttcattcccatgctttgtgttttttggtatttttggtagaaactggttattgaggattattttattctgtacatgatttcattgctgaaggtgatattattccataatgttctttttctacttaagaggctgttgagcataggaatattatatttattaaggccttgaaaaaaaaaaaatatcaaagaaatataagcgttttactatttaataaatttccattgcttgtagctgtttcaaagaagacatgatacagttttacttattttttaaagcttaagtacacgtacatataaacaatatttgatcttaaaaaaacaaaggattcaccaataatccatgcaggaacaggacccatgagtaaaatgatggaacctagcacgatctctcatgatgatgtccacattaaaggcactggaaatcaatttaaatacattgtggcaatcgttgcatactctaaggttcttaaatatgcgtataggaatgcctggtttcgagtttagaagcccgaaagcaagggcaattctttcgctatgcaagtctagagagtgctctttcgtatcgccctcttcattaaccaaaggcgcctgtgaataatctggtgaatatcccattaactggagtcgctctttaataacatccagaaacttatatatttccttacattcaggatgagatgaatccccagcaaaaaattcatgagtgattccatcaacctcaattatactacagcccggctctttcgatataccttcttttgtcatcaatttccttaacaatccaacatcatcccaacggctagcagatgcatagacacttgacataaggacgtaaaccccacttgaagcagcatcctcagactctaggatttgtctggctacttcttcactaagctcaacacttgccctttgcttgccacaagcattgagtagactcctccagattacagcatctggtttcattggcatatttctgaccaaattcagagcttcatcaatgaaaccagcacgagcaaaaagatcaactaggcaaccgtaatgctctagttggggttgaatcttgtactctttcaccatcagttcgaaatacttacgcccctcactaactatgcctgtgtgattacatgcactcaaaacaccaacaaaggtgattgaatcgggcttaaaaacctctgtttcgatcaaacgagcaaaacattccaaagctgccttagcctgcccatgcatagcaaatcctaaaatcattgaattccatgaagttatatcacggttgggcattctatcaaagacttgctgagcaatttctaaggatccacatttgcaatacatatttatcaactcagaggcaaccaacacatcactagctatagctggattaggcatccttaataaataagaatgaatccacattcctaaagacaaggcaccaattccagcacaagcatttataatgctttgcattgtatacccatcaggctcaaacatgttctgcatctccctaaataatttcaacgcattttcaaactcacctgattgaacaaatgcatcaatcattgcgttccacgataccaaacttctaacgtgcattttctcaaacactttgtgagctaattctaaatgtccgcaagaggcatagaagtgaatcaaactgttgcttatataaacgtccgaacctaacccaaatttcacaacatgggcatgtaattgttccccttgggaaagggcaaacaagtaagcacaagctttaagaacaaagggataagtatatttatcagggttaacaactcctccttctaacatattacaatatagttgtatggcatgatgtttgtgattatcgctacgggcacatcccctaatgagagtgttccacataaatgaatttgggttctcaatctgaccgaagacccgaaaggcataggcagtgtcagccatggacgagaaatggaggattcgactatatatgaaaagtgtatgggaattattagcggtggaagtggtacgcaaagtgtgagcgtgtatttgttttaactgagacatatctgtacagtcttgtaagagtcgcagaatacgggtttggtgggagcatgaaggccctccaatgttgtcaatgggcattgtacaagtttgtgtgattgccagagccatattgccgtgtttgaattgggaaaa

SEQ ID NO: 239151 - DNA, 1479 bp, Cannabis indica
tatatatatataaatacatattattaagacgtacgtttacatcaatttgacttgtttatataataagttaatttggtgtactagtgttggggttaattgtgcattattttttttattgaaaataacatcattgataatcactattggccaagcaattaaaagtagtggccaccaaagattagtctatatactgaatattattatacatagcaattgaaaacaacttaattatcatctatatttataaataatattcttttcccattgcatcgatccaaacacaccataacaaaatatattcgtacaacttaattaataattttgaatatgatatggatcatgattattataattgtcacttttgctagcttagcttactattctttgagagaaatgatataatataaatgcttgatgtactaataaaaaaaagtgaaattttactaatatatttttaaaaataaagtagagataagttattggagtgaaatttttgtattttttgtatactttatattggattgtacatataaaaatataggtgttagagaatattatatatatatatatatattgtcatgtctaatccaagattagtttattttggagctatcactaaccaaatacttgcaatgcacgttttgccattgcatttatgctcttattagtctcttctaagttggctctaagtccattctttcaaaaatcaacaaaacatataaaatacctaaatgcatccaaaatcacccaatgtttatatttgcatataccctaaaaaattggtgtattggtacgggggattcccgattcgcactattgttattactgtaaaaaaattctaaatatgattcaaataaatcttatttttgtttataaaataaaattacacatgttgatcaaaggaatgtttggtgtagattcagtgttcctaaacacagattcatactttggcaagcattgaattcttatttgttgacgatggacaagttgatcaaactttgtatccctgtggagacgttgaattgaccagtctgtgatttagaggaagaaacacatgctcaccttttctttgattgtgttttatctactcgtgtgattcagagattggctagttggtttggagctgttacttggcctcaggaatttgcaaactggaaaatatggatctgcaacgataggaaacatctgccagtagctgtcactaactgtatgttggctgcaactgtgtatgagatttgaaaaaatagaaacatgtgtgtttttgaagggtgctcgaggtcagtcaattctattgttgctgaggtaaaaaaggtgttgtcttatagattcgctaatgctgttaagggaaagaggaacactaatgatcataactatttacttaaaatgtttaacttattaaaaaaatgattgcaggagcagtttgttgctcggctgcagctgattttgctgctgtatttgttggttgtgattaatgaaaat

SEQ ID NO: 239152 - DNA, 3662 bp, Cannabis indica
atatttaagtttaactaactacactatcctttaaaaaaaagtgacccaataatttttcataaatcaagaattgtgttatatagacacattttatatagaatagatatattaagtaaaaaaaaatgttcaagttgttggttaatacaattaactaatttccagttgctatatatacacatattatattcatttaaccaattgtgtcattccttcaaaaaaaaaaaaccaattgcgtcatattgttctcaagtccaacttggggtgctgtcacagggcatattctattttttttaatatgtctcgtgaggtttcgatagtctcttctattgtttgtatatgttgaagatgaagacgggtgtggagaagaaaatcaggtcgggaaagcttaaggatcacatgggcaggaacggttatctaagtgaagaaatttaaaaacaagaaaacagagaagaagatgaaggagatggttaagtgtaatggaggttaggaagagaaaaacaaataaaaagatgactgatacagacacaaaacaagggcactaattgaaattgaaaaaatttgtcttatcaattaattttgagatattctaaattgaattaagagtatatggtcaaaagaatagtattggcgccatattgctcacgatgttgcgtattatccctgcctgttcagtcaaagtaccgttctctttagggcatcttcaatgcaattgctattgtagatgcctgtcagttagtgggatccttccacacaaaaatattgacttttcaactaaaaaaaatactagagtccctcctcaacagctatgtctcttatattcttatttttttttttttatgtttgattttggtcaatactttatcgtacgttaaattataaaaacagaaaatgggccatatcaaggctgcctagtcgttgcctgtagatgaccttatatacatctaagtagtctgtattatcactccatccattggctcattccctgtccctcaatcattcctaactctctattctcactatatctcaatctgatttttttctattatttgtgatttgagttataataatgggcggcggaggcggtggccctctattattgtggcttctagttctcttcttactttcacattgttcagtgtacaaggctttagtaacagtatccaataacttattgagagaaggcttctctctctccgttgaaaaaccttccgatgttctgacctcatccacaggagtattctccgccgggttttttgaagtgggtcacaatgcatattgctttgccatatggtttactgaggctgacccatcccggaaaaacaacctgacgctgatttggatggccaatcgtgatcatccagtaaacggaaggcgctcaaagctgtccttgctaaaatccggtaaccttgtactgatagacgccgctcaatcaaccgtttggtccagcgatactgcttccaactcagaatcccagttacaactcttggactccgggaaccttgtcctaatctctcagaataatcatgatattttgtggcagagctttgctgccccaacggacactcttgttcctggacaaacactctcaagaaacgcaaagctagtgtcgtctagaagccagtctaattattcctctggattttatatactattttatgacaacgacaacgttcttcgccttctctatgatggtcacgagatttcgagcatttactggccagacccttggcttttgccagctttcgctggaaggtcaattttcaacgacagcagaacagcagtgcttgattcttcagggaatttcagctcctccgatagttttatgatcatggcttcggattatggtgttaatctactccagagaatgctaaaggttgaagctgacggtaatcttagattatacagtagaaaagtactaccatggaagcaaagtagtacgtggattgttacgtgggaagctgttttacaaccttgcaagattcatggcatttgtgggattaatagtctctgtacttacgtgcctgagtatggtaggaaatgttcttgccttcctggctttaagttgatcaaccatgctgattggactcacgggtgtgaggcaaattttgaactcccttgctccattagtaatgctaatcaatctggttttcttcacctaccaagggttgagttctacggctatgattaccacgtctataacgactacaccttggagcgctgcaaaacaacgtgcttggaattgtgtgactcatgcgttggatttcactacaaatatgacaatgttgggggtcgttatacctgttacgtcaaatatcaactccgaaatggataccggacccctggttttgatggagacatatatttgaaactacccaaatcagtcctcacttctcttcacccggctccaaataacgtggccagtaataatttgaattgcttcctttcaggaaatttgactcaacatctggacagaagatatgttaaaaaacaagttagtggtgtagttgagttcgtgctctggtttgcctgtggagtaggaggagttgaaatcatagtcatcttaattgtttggttatttgtcattggaacaaatgaaaattcaagcctggataacattcaggctggttatcttcttgctgcaactggattcaaaaaattcagttacttagagttaaaaaaggcaacaaatggtttcaatctagagattggtagaggtgcgggaggaatagtgtacaaggccatcttgtccgataatcgtgttgctgctgtcaagaaactcacggataccaaccaaggagaagtcgaattttacgcagaggtaagcaccataggaacactaaaccacatgaacttgatagaaatgtggggatattgcgccgagggaaagcataggcttcttgtgtatgagtacatggaacatgggtctttagctaaaaacttggcttcgaatgctttggattggaaaatgaggtgtgatattgccataggaactgccagaggccttgcatatttgcacgaagaatgtttggagtgggttttacattgcgatgtaaagcctcataacatacttttgggctctagttatgagccaaaagtggctgattttggcctgtcaaagctacttaaccgaaatgagcatggcgggaactcaagcttctctaggattagaggaactagaggctatatggctcctgaatgggtttataatcttccgatcacatccaaagtggatgtttatagctatggaattgttttgcttgaaatggtgatggcaatggcccaacaagaggttctgatggagaagatgttggtgaggctagacccaaaatgcttgttacgtgggtaagagagaagatttatgcaagtggtcagctaagtaaagagtgtattgatgaaattgtagaccccatgatggaaggcaattataacttaagagaagtggaaattttgatcgaagtggctcttagatgtgtcgaggaagacaaagatgtgagacccactatgagccaagttgttgagatgcttctaagcaatgaaaagcataagtgattatatatgtatttatattaattaacatcattaaataagtaagcattaggttcacaagtctggatttttcttgctttgtattatcctctcatatgtttggatttgtgattcat

SEQ ID NO: 239153 - DNA, 2380 bp, Cannabis indica
tcatagtctaaattataattatttttttaataggaataagcaaattatattattaaatatccttatcaattacatcatgcaaactcaaagcaataggaatagaatgagatgctctaaccaaataataagcaacttaattaataaatcgtttaacaaaacataaaataacattaagtaaaacagacaataactcccaacaatcaaaaacacaaaactcaaaagcaaaagtcatacgcatcgagctaggaatagattgaattgtgtaaccaagctatttgtttcaacaaccacattaaccatgttgttttctttcaaccaacttaaaacttctttcacaccaatagcttctgcaagcatcgagctaaccgagccgaattttttaccaagcttagccaccacaagtcagcattcatcgtttttggcaactcaactaaacccaaaattgttttcattctcaaacacagcagcatcaacattaatcttaaatatcattcctacatcaagtgtaatccattgctcactctcatcgattaattgtaaagaaaccaacgaggtgacaaaagtctgatattaagcacaactccattgattaagctaacgctgccacatactaaacaaactagttcttgttttgccaaagcttttcacttttaatagtccaaatggtcaaacacaacatggcagccaatttaaattcctcctcatgccactgtacatcataagtgacaaactagcaaccaaaagaagtagcaaaagccgctgaaaaagaaaaaccaacaagtttccaacgcgagtaatcaaaaggacaactcaccaagcaatgtgaaatggtttcagcatcttgattacaccttggacaagaagatggcacgtccacgtgcctaatacctagctgaatatgcgtagcatgacaattagaaatggctcacatcgtgtttgtaatctttggcagaattttcacattccacaattttgccaaaatccagaattatcatcccttaacaaaccctcctacatttcttgaattagtctataagcactcttaatcaagtaaataccagagaactcagccgaccaacactatctgtcttaagaagccaaagggaagagaggaacactgagaattaaagaggcctcatgcgggttaaaaatatctttcacaacatccacatcccacttatacgaatcttcaaccagcaaacaatccacagtcttccctactaaaaatgggcgataagaggtagcaaaaggattaccaacgtcagataaccaaggatcattgagaatactaatgctcacccctgaaccaactgtcaaacaactaccttttctaattaaagtttgagcttcatgtatgttacgccagataaaacttgaattaatacccaaatctgcacctaataaagaaccagatgaatagtacttgttgaaaacaccctccgactaaagaattagaatacagttgcaaacgacgatcttttttaaaatatgtaaaataataataataaaaagatatgttttttaaatatttgcagatacttttgaagaaataataagatatatttttaaaaaatatatttaaattttaatgtttaaataaaataaatagtcacatttatataaagagagatatattttttttttttatcttttaattttaaatttatgatttgagttgtaacttaatccaagtttctgaactaataaatagataacttttaatatttatgacttatgaatcaaacttataaaagatcgttttggtacaatttttatttgtttcagaaactttttttgttcaattttttttcataattataattatttaagaccaaattaaaaattaaataatttgcgtgaaagaaataatcctgcatttaaatattttcagcattataaattagtccaatttaaaataaaaagaaattttaatacaagatgaaaaaaatatattatttttctattaatttttgtatgcattcaaaattttattaattttattttatattcttatttctattctcatttccatttttaggcatgtttgacttaacttctataagctttttatttagcatttagaattaaaaagaagtccttctaaaagtgtgtttgttaatttaaatattcttttgaaagaagctaggatttgtaacttctttcaagaacatttttgacaagctatttttaaaattaaaataattacataattcctaatttactcacaatttttattaaatgatatccaaacacttggaaaaataatttttacattaaaaaaaaaaaacgaatcttcatataatagttatccaaaccgtaaaataagtaaaaatctatacttatgttatacttctagctataagcaaaagtaaacagagtc

SEQ ID NO: 239154 - DNA, 2293 bp, Cannabis indica
gagggtcagatgcattagccatgcgcgttgtctttttagtgcgagccatcatcctatggctgggtgaaagattcgagcgagaatgtctttcactggaagaaggtgggctagaacagagacgaggatggtcctcgtgcaagagttgaagcaagtcctggtcgattcgatgttcgctctcccaaaactaacctgggttcatctacaaaagagaacacacaagatgagtgtttggtcagaatatcgaacattaaaacaagcaaatatgctgaccaggagtacttaacaaattaaaaaataagtatgttcagcgaaaagtcaaaactcagaaagtttgaaactttctcaagttagggcaaaaaatttcatgaagcttagaataagcatgatgaaagacaagtattatgtagttgagaaagcaaacattatagactatgaaatcgcatgaacccatgacaaaggaaaatcgcagagtttctaaacttagggtttcctacatgtcccactaataatggtgggcactgtagactacggtatatatttttttaataattaaataatatattttaatatttattaatataatttattagatttgataaatatttattattaaaatattcttattatatgaataaaataatataatgaaaaagattatattttttagtgttgtggttgtaattaaaaaactagtgttgaaataataactttttagtgtagatttaacactaaatatgagttttaccattggtggtggcctaaaaagctgtttttataacagttaaatataaataaaatattaagtttttttttcggggaattaatatgttaaagttatgtagcaaggaaattgattgtaaagagtgtagagttcattttctctttttggtaccattgatgtcttgttctattcaaaaactgcaaagaggaaacacaaccataaatatttatggaatccattttgtttctcaaatcaataaagaaaattaagccaacaaataatgtttgaagaaaagaactacaagttagccctccttttttttttttagagaaagggagcccgctagagagaaagaaaatcaacaagattgtaggggtcatcgcctatccaaattgcaacttcatctaaccctgaagcccaatgacccagcttatctacaaaagtattggcattgcggttgacgtgagatatccgagcatcagggaagtgagacaaagcttccttgatttaactgatgagatctccaaacaccgatatgtcttctttttgatggttcagcgcgtcagtaatagtcttgcagtccgtttctatctcctgaaccaaaaaatgctcgtcaatgcactagcgcaaagctgtgagaagagattttgcttcaagagtggcaacagatccccctctggtgtaaggaagagcgagggctgctactactagaccttcactgtttctgataacactcccgaaaccagcctttcctttctctttggagaatgctgcatccacgttaagtttgacagatccgaggtcaggaggagaccaaattggcggggctgtgggttgtctaggacgagctagaggagcagaagccactagagacgtcttgtaatcgaccaagaaactttttgcaaaattaataattgcatgggcctgatcgtgaggttgtcctttgagtgctttgttcctgttaaaccagataaaccaagtggtgcagaggaaaaattctacgtcttctttggttagagaagagtaaatcatatgagctacatcatgaaacataatctcagaagagcaagaaaaaatataaggataaaatagcatacctttccagactcttcgaatgctcttacagtagaacaatgcgtgagacacagattcttccatgtttccacaacggtgacagcaaggggatgggataattttcctaaaggctaggtttttggcagtggggagggttgagttagtggcacgaaaagcaaaatgcttcaccttggcggggatttggagatgccacagattttcccaccaaggtgaaggggaggaagaagaagggatatcagaaggtgtgagagaagagaaactgaggtgataacctgatcggaccgagtaaacacctgatttggaaggctcccaaatcagttaatctctagaaggggtaaggggaaggggaatggaaaggatgtcctcaaccacatggatcggataatgtatatgcagcttagctttgtcccaagtcatggtaggggtgataaacgaagcaaccttatcagggatgggaggaagaagaagggatatcag

SEQ ID NO: 239155 - DNA, 4324 bp, Cannabis indica
agtcttaccctataaatatatattatctttccattcactaactaaaatttatctacacattttctacatgattttatcatttataaatggaattatttttgttggattttaaactaatactatatcaatgtttgtgtattatttcagtaatatttaacataaataataataataataataaaaaaaaatctttccttaaatttttgtttcttcatttttgttttgacccattcttgcataaataattttattaaaaattcttaaaatctaattaattgtattaatatgttattatatataaaagtattttagtatttcctttcaaaagaaaatagtaatgaaaaaatcattttctattttatgctttaaaatcaaactataaaaaggataacaaaaacattggaataaaaatttttgtttgggctaatttgtagtaaatatttaccccatctgaaatagtcttctaacttgggtgtactcttcgagaatttggaggtttgtgtatttacgtgcagttttttcttttttcttttttcttttttcatgatgaaagaaaattcaactaataaaagtcagttttggttggatgaggactgagagaaggatgatcatcgttctcaatttagtctcatatttcaacatcactctcttatatatttttgctctatgcttaactaacaattaacatacgtgttcccttggattatgagaataaattaagaaaagatgaccaaatatatctctctaaaaataaatgtgttttcttttctgcaaaaattaaaaaaaaaaaaagaaaaatatataagaatagatgttgcttataaacattttttttttaaaaaaaaaatttaaatattggtattgagccatgtcgcaacttttgtataacacttttttgcttcttgaattttttgtcgtttaatctattattattttctcatttgcaactttaaaaattagaaaaagaaatgtttgaaaagaatttagaaagcaaacaaaaattggtgattacatggcatgttttctttaaaaatatttaattgcaatgactatttgttaatttattatctgtcctgtttcaaaaaaaaatctattatccatgaaaaaaaaaaatagttaatctattatcatttaccaaaacaaaagaaatacttcatctgttacctattattaaagcaacactttacatgtttgataagttatttgtaagggtgttcaacaaaatttacaaatcgtcccatttaaataaattgtctaaatcaaatcgaataaattaataaaaaaatacaacccgaaataatacaatgaaaatccaaaccacccaataaatatattaggtggttcacaaattattctaaactgtcaaattaacccgaataaactaaattaaattgatttataactttcacatgaaaccaagagtaactggttaaattattttgttttttgtgccaactaaatagtcaaaagaaagaatttggaaaatatagttgtctcttggacaaaacaatagcttttgtttcacgtccaaaaaaaaaaaaaaatttaaaaagcttttgtttgagagacttttcagatgttctccctgttaaacatgtgttggaatcgattacttaactgtctgttagttaagtttctgttattgttcatctactttgtactaaactacttagtataaataaaggctgggctactcatgttgagtaatgctcttcattcattttctccctgagatttttttcttttggcttctgcctctggtttctggcttctgcctttctctttcaaagattcttaccttttacatggtatcatcgtcttcttgacttacgtgcatggagtcttcctcctccgatcctcaaactacgcttcctcatgctcctggcctcaatcatcatccttggaatcctttctccaactcactttcatcttctcttactttgaagctcgatcgcaacaactacttgtcttggaaatcccaagtcgttcccactgtaattggccatgatcttgaccaattcttgttctccgttgttactcctcctatgaatctggtgactggtgcggtcaatcctgagtatgttcaatggaaaaagaaggatcaacttctcttgtcttggttgcgatcgtcaatgtcggaatcgattcttgctgctgtcgctactctgacttcgtcttactctgtttggcatgccctggaacagaggttttccagtcaaaccaaggcacgtctccttcagctcaaaggccagttctcgcgtcttcaaaaggctagtctctcaatatctgattatgttgacaaagctcagatgattgctgatgccctgtccattgctggttctcctatatcaaatcaagatttggtattacaactcctcaatggtctgggtcctgaatttgaccctgtggtctctggcatcacctctcgcagtgatgttctttcttttgaagaggttcaggcgcttcttctctcccatgaaacaagactcgagcatcacaactcggttgctgatcattctcttcatcttcaagctaatcttgcttttcaacaagcaaggcatgggaacaatcgttcttttggacgaggcaatgcacctgacaccaatcgcaatcgttcttatggccgtggatctggaaatcgactattatgtcaagtctgccttcgcacaggacatactgctgcagtttgtcactaccgtttcgacaaaaactgggttacccccaaatacggtaactttactccccaagctcacttatctgaaattgacatttcctatgatccacaggctttccttactacaatgatccctgaaatgggtgacgatgaatcttggtatgtggacacgggtgccacaaatcatgtggccaatgacactactcatcttgacattgctgagccatacaaaggtgctgaaaccatggctgtgggaaatggtaagcaactggttatttccaacattggtcagtctactctcccctctctagttaactctcaatctttacatctaaaatctatccttcatgtcccttctatgaaaaagaacctcattagtgtttcttaactaacaactgaaaatgatgtgtttcttgagtttcataaatcctgttgttttgtcaaggacaaactcacggggacagtgctgcttaaagggaaagctaaaggcggcttgtacaagcttggtgataaatcaaactcctcaattcagtgtcatcttactacttctcccaagaactcgtcagttgattgtaattgttcttgtacatgtcatttgaataaatctgtaacttcttgtaccactcaagaaatgaataaagatgacaatagttttcctttgtctcctttgtctcatcaagtttttaatactattaaatctaatgacataaacacatggcactgcaagctgggtcacccagcaaacactacattagccaaactcttgcctcatcttccacatactggttccctgaaacacttgcaattttgtaaagcctgtcatctaggcaagagtcacaagctgcccttccctaattccaacagtagagtctctcaacccttggctctcattcatacagacctctggggtccatcccacattacctctaaagagggattcaaatactatgtacactttctcgacgattatagtcgatattgttggatgtatcctctcactgtaaagagtcaagcctttgaggtctttatcaagtttaaaagcttagttgagaaaaaatttaacttacctattaagagtgtccaagctgactgggggggtgagtataggacttttgctaggttcttatctgaccaaggcatacactttcagcacccatgtcctcgaacaagtcagcaaaatggcagggccgaacgaaaacatagacacattacagagacgggtttcacattgttggctcaagctggtcttggaatggagtattggtggcaagctatggcttcggctgtgttcaccatcaatagacttcccactttggttctcaataatctcagcccatatgagtgtttgtttcacaaaaaaccagatctgaatatcttgaagccatttggatgcagctgttttccccatcttcgagcttacaattcacacaaaatggaaccacggtctgaacaatgcctgttcctggggtactcctcacaacacaaaggctacatatgtgaacatcccaatggccgagtgttcatttcaagacatgttgtctttaatgaaatggattttcctggtcatcaactcccagctgcaacacctcaggtacacacctcagccccatatcctatgtctatttttaacactggccactctcctacatc

SEQ ID NO: 239156 - DNA, 2744 bp, Cannabis indica
acaaaaatgattaattgttacaattttgtatggcaaagatgccaacaccatgtaaatatttttttcttggggactgaatgaaaatgttctctgagaatgatacaaatatgaattactactaaactttttcttcaatgaattgttttatttatgatttaatctggaatccttgtctcttttatacatactaagctaataaccattttctgaccccatgatgttttgagatgatgattagtctgcaaaatctagaatccttgtccttaatatttctgttctgaaaaattgtcagaccaaacagatcaaaggtttcttatttaccaaatttggtgtgaatcattttcttggagaatgaaactgtacaaattcattactgtgaaccaaacttattgtaacattaacttatataaatataatataaatttcttgcaagctcatttccaaaccatgtctcattagtctattagataagactaagagtttagcttaaagtgtcaatccatgatcaactaccattgtctttgtccaaattttctatggaaaggtaacaagtatttgatccgagcaaggttcttgtatggaaacagatgacaaaagccaaatcccaaaatttgatttggacattaaatttggaaatcatacattttcctcttacagatcacatatcagccttagaactaactaaaggcctataaatcatgatcatcctaccccatgctcgctatgtgtcgatccctatatcaactactgattagtacacgtccaaagaaaaagtaagaggcatctatcaaaatcagtttcttgattttgacagcagttattgatatcagttataaatttatattcacaagaaatgctaaaagtgatgtttgttttagttaattcttcttgaatataggctagtgaactttgaagttggcaaagagtgacactgattagaaaatgatatagcagccaaaaaaaatggaattcaactgaaaagtgaacaagttttaataaatgagtcatttctatttactagttttgaagaaaaatgtaagagtatgtaatctacaaaattgttttctatgaatctagctatgtcagtactataaattacatcatcagttgaactgagatgtgatatcattaaagatttcttcactgcaaggaattgtgagtccgcccattggatgctcatatccgaattcttcttcagccatacttagcaagtcttgaaacgaaggctcatttagatacgaaagaggcactacatgacgcttcttctgatcttctccaacatagactgcaaagtagccttttgaaatggttgaagacttcaaagttgcttctttgatgcctgaaagtgatcttcgaagagccttcttaccctgaacaaagccagtcaatccgaatgccatgttgatcttcctttgtgtgtttttctctttagaagaagtattactattagagttcacaaaaatattttgtagtagagagaatatgaggacttgatgattgagttgtgtggctaagcacttttatatagatgaatggagttttggaatgcatacatatctaaggcttctaaaataagtggttcttaagacatttgataaggtttgacaaatttgcaagagacataagcatttgaagttcacatggcattgtcttccaagtcatatattagagaacaaacaacattatagcccacttgtgctataagatttgcaacaatgaaattgtgacatgatgaagtaactcatcttgatcaatgatcatccttgtttttcctctatttgagtaattatggataagtggaaaggcaataccatgtgattgttcaaggactatgcttcttactagaccccactaacaacttagctctagttttcaatattcatttaaattcaagaaaatttatgtataccaaatcatatcctgccaaggacattgattttagaggaacataattaggttccttggcattttctcttagatctcttctttccatttcaaaagaaaaaattcatacacacacacattgatcaatcttatttctcatttgaatgtcaaattatgagtagacaaattgaatgacaaaacaaaaatgttatgcatttcttttccttgaatggaccatttgattgaagtcatttatgtcatttttccattttcttattctgtcataagatcagcagctcaacatttcatataaagaacttgatgtccaattcttgtttagtgtagacaagtagtgtagcctattcgaatgtttatcgtctttgaagtagcttcttcaacattagaatgtgacctcaaataccatgttggcctttctttttgagttttcattttagagcacagatgattttgttaataatgagtgtggttacttgatgattgagttttgtggtaatgtgcatgtatatatagatgaatgattctctcgcatacttaggcaattgggttggtttggtatttgcagagaaacataagcaattgaagtttgaaacttcacatggctttgtcttgtgactgtgacatatgtatagacatcaccaggtgagcaacctacaagggtaccccacttgatactaaacttatgcagcaaaagagaaaccattttcgaacatatttgatcacatgacctaatggatccttcaactaacaagttttcttttctcatgtgactttcaaataattaggaaagacacaaccatgtgatttcccaaagattaagtcactcactagaccccatctca

SEQ ID NO: 239157 - DNA, 2018 bp, Cannabis indica
gaatgtaatttttgattttggactaaacatatcctttattttagactttagacaattaactatcctgcagacaataaaaaaaaaaaaaaaacaaaaataaaaaaaagaagatacttatatggaataaacacaagaacacattttaaagacatcttatattttgtacacatattgttatattttttgacaagtcaacaagagcccccccatttttttttttacttaagacgtccctgaaaatagaatgttaattacaatgaaaagatgttaagtctattattgggcatgcgccttatggctatagtataatagtaatttgatacagatatttctgtttattaattgtgacaattatgaatatttgatttaatctatatatacataccaataccatcttatccatgatacatcgtagtctcttcacatatatataaatataatggaaatatatatggaagggtggggtaggttagtgtagggtccacgttaaggtgcagtagtgtgtgatcacagaggtgtgaaagtggaacggggaacatacaggaatcaaagaaagcgctcccgtttgttgcaacaagagagaaagaaagagatataatcacagagagaaaaaagaaaaaaaaaaaaaaaaaaaaaggaaaaagggtttcatggaaaataaatgtgtgtgtcatattcattacaaattttttgggggggttggctttctgactacactctgagccacccacacccaaagctcaaaacaacccctgtttcgctctataaagaaaaacatttttatgcaaaccgacaacaacagtcaattaaacccaactcaactagacagagatagatagtgagagtgaaagaaacagaatatttttttctatatatatttaaagaaaaaataagggagaaagaagcaataacccacgcacatacacacacacacaaaataaagaaatagttatagagagtggtcatcgtaattcgtaaaagaaatgggtatagtaattatgagggtgctgtctccttcgttccatctgtttgtggaaatgccagcgagacctttctcttactccgttcgtcccgcacgtatcaacctcttgcatgtaaaaaataagagaaataaaataagggtaagagagccttaggattcactgactcttctgctgtatagttttctgaaatccatgcattaatatcaattggtgaaaatttattaaaagaaaatattaaaatgtgttttgattgaagggaaaatgacgaataatgacgtggttgatagatgggttgggaggatacaaagtcccacagcaaagcttttttggccgtagaaaacttgtttagtttactgttgtttttgctgacgtgtgaggcttcacccctctcctttggttatggggtccacttccacctcagaaattccagttgcccaatcatattgccagaaatgccaccaagacccacccacctcccacaaccaagtactattacttcactattgtgtatgtgtgtccttattatgcaagtaaatgttgaattcgtatatgcacgtgtgaccaaaatcacttattactactacccctccaacactatacactactcccagttgtagtagcttaaaatgccatcttggtcagaccaacactgacctgaaactttgcaaaagtggaacacccgaagccatacttggtggccttaatttgatcatttcactaaaaatgggttttataacaaaaaaaaatatataatgaaatggtgtttaggactccattaaaaaaaaaacaccaaaatgctcctttcttacacgctttagaaaaagaccggaattggggtaccccaaaccagaaactcaagggttatcattgtcttcttactgtcctgttgcagtaaagaaaatggtacttgatctatgatgacaaaaccatttctcaagtacttttccttattatttcacgtatagtaccttaatgttagcaaagtgaaaacgtgtttaacatctcatcgtcctcttctaaactgatcagataaaa

SEQ ID NO: 239158 - DNA, 6450 bp, Cannabis indica
agagtgccattgctcaagaactcatacaccaacaaatgattcttcccatcatcacaatatccaagtaggcgaacgagattcttgtgatgtgtttggccaatggatttcaattcagccttgaattctctttcgccatctttaagaaccgaacacagtctcttcacagccactgcaatgcttgcattagtttgtatgagaaagcctttgtaaacgatgccaaaagctccacgtcctagctcgtctttgaaaccatttgttgcttcttcaagctccttgtagctaaagcaatgcaaattcgactcgggaacttcttgagggggatgagacctttcattcttcttcttgtgaatgaagaaaaaacatgtacatattgcaccaagtaacataaagtttacacaaacggaagtacttaacatccccaatagaactctaatcaaaccactctggtttttcttgacaacttttgttacatgatcattagataaagtagtagagttaccttttcgaattttgatgaaagcaatagatggacggttgtgatcaactctcccatttgataagggaaacctcttcttccaacaagttcctcctctaagaacagcaacagcacataaacaatcattcaagcaagattctttacaagtttcccttgttgaagaagctattcttatgtaatctgaaccgggccaaccagcatttcttagctccacaacatcatatgcatctttacctgaactagttaactcatcttctttacagccttgaatgaaatctggtttacaatttccataactgtcattaggattgattagagagtacccttttaagcactcacactttggtctcttctctttattgagtctgcaaatggtattgtatccacaaactccaattccttcccaaacaacagtcgaaaagcaaatgtcattcggtatagaccaaagaggtgtccaactcacattgctactaaatttcttgggatgaaaatattgtgtgaaaaccccatcaaaactaagtgttgctcgaacatagtaatccattgttgacactactcttcctcgagttagaatcaatctttcgccttttcctatggaaacatacaagtaacccgattcattgaagactacttgtgttgttgcagtccctttagtgatgttagttgcataataaggctcattggcataattagaaggcaagtttattgtgttgagcacaacattcccatcttcccttaaccgaaattggaaccttcctttggaaaagttagactctgattgatgagatgaaaggacttgtcctatgtccaatacttgacttggtaaaattgtatctgttggattcttaaagctttcccataacttctttgaattgttaccttcaagtacaaagtttccttcattactaataacaccattaacaacagtttcatcaattgactcagatttccatagctctttgccttgaggagttgtgagaacaagtcctgtttcgggggttaacaccacgtttgatcttgctgcagctggtttatctccattggcacaccaaattatagttttttcaggtatcttggcataccatatgcatagtaagaagaagatatcatcttggtttttaagctggtgaaaaccgaaagcaaactcgccattctgagagagccaaggggaagaattctctgctgcgaaaagggaagatcctaagttgactttgccattaatggtttgagcaagaacttggtttggtgatgggaaaaagaggaaaagaatgagaacaagatgaggagaaagagccatgtattgttgtatgtaactagttatgatatttggttacttattactaattgtagaccaaactcaagtacagataggaggaacatatgaagctcttttggtccaaacacaaatcaaaatgaagagaaaaattaactgcaaaactccattaattcaatttcaatttcaaatcagtaaacaggtgctgtctgctcaaatttgtagcagttgaaaaaggaaaaaagggggtcatggtcataaagtgaaggttgaattttggtgttttactagtcttgattaagataataaattcatatgttaggatagtgttctagtggtaaatatgaatacgacaacaagttctatgattggatgctcttcattgagaaatactataagcgccgtgtctaacactacttaattagtcatattcagtctcatatgaattaatttagaatattgttattagtatcagtggtacctaacaacaccttacaattattaataatattctctaaaagttatttattttatttatttcgatatataattatacgaataacagtataatacataaaagggtgttagataccactagtaccttttagcattaatcattaattactatttgcaagacgacacctcatagtaatattaaagaacactgatactggtgcttaatagcaatgctcgtttaatttatatgattcatcattagactttgtcttcatgtataattatttgtatctgtaaacttcatctacatggatggaaaacatatgttaacggttattattaattacaggtgtaaagcattactcatatatgaatatattactcaaaaaagaaaaagaaagacctcacttatgctccttttcatattttgaatcaaaacatgtttatacatataacattacaaataccaatgataacatgttgaaagtagtttcaactatatggacaaacataagacaagtgtaaaattgacactaatttaattttgttaagtaaatttttggcctatctttaaaatgatgaggggcatggtggagcactcacttcaacaacaccttcaagcatctgaacaactctcctcatatttggtctaagagatggattttcttgaacacaccacatggaaatcatcacatatatctctaacctcttcttatcacccaagacatcatcttcataatccacaagaacatccaatgacccttctctgaagcaatcataagcccaatctgtcaatatcgctttcctttcctcaccaacttccatatccacatttcttctacaacaaacaatctcaagtaacaccactccaaagctatacacatcgactttcgaagtaatggctatgttcctaaaccactccggtgcaacatacccttttgtccctctaatggctgtatgtgtatggctctgattcatcatcagaagtttggccaaaccgaaatctgatatcttgggaatgttgtactcgtcgagaagtatgttttgaggctttatatcacaatgtatgatctgagtgttgcactcctcgtgtaaatataaaagcccgtttgcaattcctaaagcaagttcacatctttgagtccaactaggctttatgtcaccgaaaagaaagtttgctagagtgccattgctcaagaactcgtagaccaacaaacgattttctccatcatcacaatatccaagtaaccgaacaagattcttgtgatgtgtctggccaatggctttcagttccgccttgaattctctttcgccatctattagcgttggacttagtttcttcacagccacggcactgctaccattagtttgtacgagaaagcctttaaaaacaatgccaaaagctccacgtccgagttcatctttaaaaccgtcggtggcttcttcgagttccttgtaggtaaagcaacgcaaatttgactcgggaacttcttgtggagcaaaagaccttttattcctcttcttgtaaatgatgaaaaaccccatagacattgcagcaagtaacataaagttaacacataccgaagcacttaatacacccaatgtaactctcaccaaaccattctggtttttcttgatcacttctgtaaaaggattcttagataaagtagtagtggtagagttaccctttcgagttttgatcaaagcaatagttggattgctgttattcactctcccatttgataaaggaaacctcttcttccaacaggttccatttctaagaatagcaacagcacataaacaatcatccaagcaagattctttgcacatttctttggtggaaggtgttattctaatgaaatctgatccgggccaatcaacattcttgagctcaacaacatcatatgcatctttcccataactagttatctcatcttctttgcagccttgaatgaaatctggtttacaacttccataactgtcattttggttgagtagagagtacccttctaagcattcacacttcggtctcttatctttcttgaggctgcaaatggcattgtacccacaaactccaatacctgctgaaacaaaggttgagaaacaaatgttattcggtatagaccaaagaggtgtccaactcacattgctactaaagttcttgggataaaaatagtgtgtgaaaactccatcgaaactaattgaagctcgaacatagtaatcccttgttgacactactcttccttgtgttaaattgaacctttcgtcatttcctctcgaaatatacaagtagcccgtttcgttgaagattatctgagtggttgtggttgtagtcaccgaattagactgttcatcagtgaggttagttgcatagtaaggctcattaggatagtcagaaggcaagtttattgtgttgagcacaacattcccatcttcccttaaccgaaattggaaccttcctttggaatagttagtctctgattgatgagatgacaatacctgtcctatgtccattacttgacttggcaaaatggtatctgttggattttcaaagctttcccataactttttcgaatttctaccttcaaggataaagtccccttcattactcataacaccattagcaacactttcatcaactgactcagatttccatagctcttcgccttgaggagttgtaagagcaagtcctgtttcgggagttaacaccacgtttgatcttgctgcagccggcttatctccattagcacaccaaattatggttttgtcaggtatcttggcataccatatgcatagcaagaagaagatatcatcttggtttctaagctggcgaaaaccgaaagcaaactccccattctgagagagccaaggtgaagaattctctgctgcaaaaagggaagctcctaagttaactctgccattactggtttgagcgaaaactcggtttggtgatagaaaaaagagcaaagaaaagaaaacaagatgagaagataaagccattgttgttgtctttacattcaactcagtaactacttatgattttggtctctaaatttgtgctcaactaatcaaagaccaaactcaagtacagtggagtaacctggtgataatgtaactaaatcaaaaagaagataactaacacacattttaagactcttttgactttgttcaatcaaacactaatcaaattcaaacactgaacacgtagcagttcagaaaaaaaaaagagggtcatgatcaaataaaatatgaaggttgaaattttgtgtctcactaatatttaattagataattgttaaatcacatattggagaaaattctagtagcatatttgagtaagacactcaagttctctgattggatttagttattattatgattcatcatgagactatgttttacactcaactatgtttttattattattattattattattattattattattattattatactttagggttattatgggcgaaacatccttatgttttaactttataacacttaacctcttgattttttttagtgacaaaacccccttaattttgcttttctttacaaatttaaggcgtcagctaaatctcatcattaaataccaactggattgccactgagtgcacttgtgtatatatgacatattttcaatggctttgaaattttcgtgtcacatgtacacagtgatcatcccagttagcatttaacagtgaaatttaactagcgcttaaaatttacaaacaaaagtaaagttgagagagttttgccacagaaaagaaaaaaaaaatgaagggaataagtgtataaaaattaaaacaaaaagaagtttcattgtcaattaccctatattttaaataggcgtaaagcatactcatatatgacttgtaatttcaactatatgaacatagccaaaattgaaagttcatgagctaaaaattgagccaaaaacatagctgggaatagtaaagtaatacatttcaaaataaagtgtcaaatcaataatgatgcataagaacataaagtagttagaaagcaatagtattaagattatgattcaagtccatcaacacaagaaaagtttagttggtttcaaaaaatggggattgagcaaggttgaacatctacttcaatttcaaatcattaacaacatgaataacaatcttaatatttttcttgttatatacataatcaaagaaagaaagaaaaaatatcccttctggcatag

SEQ ID NO: 239159 - DNA, 2670 bp, Cannabis indica
atatatttatatattttgtttgccttctaaattctaacacatggatggttaattcaaatgaaattaaatcttatgaactgtgatgaatatgaactagataaacaaggtgtctcatgccttaaattttatttcgcagtttatattgcatcattctatcaacacgttgtagtccaaagacgggtatctctcttcctctctctctctcttgatgattcatggctcattatacttttatcttaatttcaatttttgtctttatattatgtataattgttttaaattttgtgtcattatcattcttccaccttattgtcttgctttattaattctagaatataacaagctttgattgctttaactaaacaggtgaagaaccctcttgaagaaagtgaagtcgttggaattacaaattatatagatttcggttttgaattgcagacaaggtattctgttccttctgatatccttttcctttatttgtttggctttatatcatgccttcttttcctatttgaagcattgacggtgaagaaacatcaatgatgcacgattctacctttcaaattggtgcatcttggcaagccaataaaaacttcctgctgaaggtattattaatttattcagatctgatgcttttgttcacgatgataacatgctcagctgacaatctaaaattcacgtatgcagggaaaggtgggtcctctcagttcatcagggacatgtgcattcaaatcatggtggaaaccttctttcacattgagtatttcaggtacctcttgttggtaaaagctgtacatattttaaatcactcttgaatatttaaatctctacatgcttacagacaaggaaggaagaggtacgtttttttagtatagatctagatatactcacgtacaaaattcacactacaagccaaaaaagtctcttaaaggtgactttatattgtactggttgattagtaatggctgggaaattgctactatcaaggactatccagcggaaatgttgtctcttgttttcttcttgttcccacagaaaataataaaaggaattctaggtatatgattagcttgatggtaagctgtgaaaatcggagataacatggtgaagtcactccaagaacacattgattatatcatataaatattgttcgatgttctatgacgtaaagaaagtaattagttgctgtcctgatccaagtctgcaacaagtatcaattgagatcattgtcttgcagctacaagagaccacactgttggaaacacggcttatggttttggtttacgtgttgagcacctcagggaagccaggtaggcttattccttgctcataattttccctacctcgtcaagttcatttaatgatttcatacatttcaagagtaaacactgagggttctcttacccagtctatttgatatgacggcaactgagggaggaggatacatgaatttgcactcatgatcactagtccatatattatcattcattgctgatatgaatggcttaaccttacactaaactattttcatgtgtttcgcagctacgaaagagctgatccaaattttgtgatgctgacaccaaataaagaacaccttgcggaaggcatagtttggaaaattggcaaaagaccaatgcttgaatcagatgtaaatgctggaaactttgatgctgttcctagagagctaagacccttgggaaatgtattgtaaatagtctttgcacctggaatcttgtcaaaccttttcctcaatttggttggctaaagtaatgggtttcataattagtgagccctcttgcgcgtacagacgttactactagggacgcctagcttcatcctcttcttctaaccacacggattacaatactaaactcgagggcccaactacgacttaaaaggacacgttatatacccacttttattaacaacaaaaataatgtcttgtgcactagtgacaataaatttttgatgtcaccccgagaatcctaaatgcacggttttgtgtagtagttacatataatgtatctctctctatgctgggatttgaactctagcattaagaaatgaagaccacaatcgtagacaaaatcaggtttgtacttcttcataccttcactaaacttaatttactgctccattcccgtacttgttttgatataacaaagcacaattttggaaaaatattctacaaaccagtcgaatatacaaaaaactaatgtaattaaatagtatttttttaacaatgaattaatttcaccataatcacatacaccatacatcactttatattaagtaaaatgatagaaaaacgagagaaaagaaacaaaactgaatcaactggacagagaaagcgaggaagaggaataaaaaaaatgataaaatatgctcaaatgcaaagtattgcttagctcaaaactaaaatacataatacataccttttagcttagcttatttgatggagtttgatgttttgaatttttagctaaattttacatatataataaaatagttatatatagagaagcgcatacattttcaaagattatattgtatggacactaaaagatcatcaacgacaatgttctatgctaagcaaaaactgtgaagaatgagagtgaaacataaacaatgaacactatttttgttatattatttttagggataattgcg

SEQ ID NO: 239160 - DNA, 3596 bp, Cannabis indica
aattttataattacactaatattatttttaatacattattaaataatatttcaaatataaatatttcattttttcaaacaaaaaatttataatctttaaaaataaaatgcattcaaaatattaaaaagaccaaaatcttaaataaaactagcagtacgtggctcagcacgtacattcacctagtagatatatagggctctatatatatttatattgtatggttaggtgatgttgaacttaaaactatccgtactattaaattagtatggttcaaacatattaatggtgagaaattaaaacaaataaattaccaaaattagaaagagaattgtgagtttgggaggttggaatttttcaatttttagagatgtacatttatttttacaacctaactcgtactacatatattttcaaaagaatgttttctatttattattaatttattttttataattacatgaaaataataatatataataatattattaatgaaagttttaagtgtatgaaatggttgggaaattaattaaaccatgtgttgtgtgtgcagttcccaatcaaggatttgaacttatctaggttgtattcaaaattcaaaagaatgttttatataataatgtataatataatttgtttaagttttaacagatcatcacaaaagtgcccaatattttttatgtgtaattacattttttaattatttatttttaagtaatattttagagacactgaaaaattatcaaaggaattttaaattcaaatttaaatttacacatgtcggataatacaactttttgattcattaaaagaatatttaatttacagttgttctagtaatttctatgtgggttgatatataaatttcagttgtaatttaaattactctgttaattattatatgagtttatatacagatttctgtaaaaatgtaaaaagaaaactacttcgaagtgtagaaacaaaaaaaatcctaaaaagatttttattaaataaaattatataaaatatgattttattttcttcatcagaatggatcacgtagtgcacattctatcctcactacttcaacttaatagtaatctcgaaaacccctgagtagttaaatgaaatttatacactctctttaaatggttgtcaactgaaactcttccacgcagaaatatcatggcctacctaatagggcacacaaacactcattactcctaaaaatgcatcacttttaaggcctaaaataaatattaccataaagactaaaatttaccatttaatattaaattatactaataataatatgttagacaattttatagcacgagttttaagtaatttaaagcacttaaaataaaaccttttacaaattatattaataagatggtaataatttagagaaatgctaaagggcaccagtggtacttagtaccctcctatgtgtcaatatgctattggtctaactaagtatcgggtctcatataatttaatataatagcttttagggagtatcgctaactaatcacaacgcgacatgtcgaaaaggtgctaggcaccactagtgcctaatagcaacgctcaataatttatgatgtttaagtgggattggaataatggcaattcaaagttatcatcacagttaacaaagtttgacatgtgttaatgccaataaagtcaaaaccgttttgccgtgtggaatagtcaaccttatgtttgcttcttaattaaaataatcatttattattattattattattattattattattacttattattctattttttttttagttctattattttttatcatcatacatgttaattaattatccactgcatgctatacacgttttgttcttctttatctttttacttaaggaaatgtaaataagaagttattttataaaatatatatttttttttttgaaaacattttataaaatatattatatgcaacaaattattatatgtttatcacatgcacttataaaattattttagataattatttaatattcaattactcgttaacgttatatatatttggtacaaaaaaaaaatataatatagtatatattaatggtaaatatcattttaagctatctttatcggttatttattttgttaaatattaaatttaattttatattttttaaaatagtatcatgagttaaatttttgtgaattattttttttatatgataattttaaaattaatttttagtacgaataaatgtaaaaaaaaatacaaatagtctagtcataaaatatttaaattattttattttgattaaaatttaaaacactattttattccattttaaaaaatatataactaaaattatcatttaataacaaaataaattatctaatccataatctttataaaactaataataaagagtatccaaaatggtatatttactctatacatcattataactttattagaaccttttatttttaattgatattagaaaggcatgcactttcatactttcattttatgccttttttttttctttctaatatcaattaagatattgtttttatggattttacacaatttgacataaattaacaacaaaaattataatatattttctttgtagggacaaaaattacaatattatttacacatgaattttgaagatttttggtgaagtagtagtactagtacttataatatctataataaagaaaatataaaactaaaattctttcatgcatggtggattatttaattgttttaatatggaccaatttcaatttattttaaaaaaaataaataaaaaattggactaattaaactcaaatcaataaatcgttataagataatgtgctaccacaaaatttagtcaaaacccatttagaaatataataatgaaaaatttatatctattttttttaaaataaaaaaaagtctatatctaactttagaaaagaaaagaaagtctatatctaatttaaattgtatttaagagtcacaaataaattgaataatgtatatatatatggtatgtgatctgatgcttcatattattattattgagaaaaattattattattgttgttgacaaaagatgtgcttcctattattttactcaaattaaataaataaataaataacacgataaagtgcaattagacagttttggttcttaattttaaaaatattaatatatgtattggtcggttatacattatttgtttaagtataatttatatatatattctactaaattataaaattttattaatagcaattagttaaaattttagcttgtcactgggacatctctcgagttagagatatgatcacggttagaattaaaaaacgaactaaaaaattaatcacttaatttccaaatcgtttcgcaaaaaaaaattaaaataaaatcaaatgaaaaagattgcagcatcacagttaaccttaagagcacttatattttgtttcatccaccgctcaaaagacacaacactagaatctgttgcatcaggttcaacctcatagcttgagcagtcaactattgtgtaaggtatgtaactacactactatatatgacaaacctttagcaattagaatttttccccccgaactttga

SEQ ID NO: 239161 - DNA, 3775 bp, Cannabis indica
ccttcctctttcttccaacaaaaatacactttaattcctacaagaaagacataaattgaatcaaaatcacatattttcatttataaaatatattacaataatttcatgaaaatatcaattaaaactcaatttattttatcatttaaaataaataaaagtgtatttttaaccactaatcaatgatcattggattcttgttgtacggaagaagcttgacagaaaaacacagagaaaaatcttgaggtttctctttgtagaattattctgggagtgaaatacaagaataaaaggatttgagaagaagagaggtctttatataggcttcatttatttaatttctccccaaaaaattaaatggaaaatttattccctataaaatcggtatgaggaaatggaaagagcagaaaatgctattgcgggggagtgcagctctcatcatgatccccataaagtgtgatttgaaactgccataatgggactgacacctaatggttagttgaagagactgaagtgtgatgttcacttttgtagagaacagtcgccaaagtatcaatcacgtggagcacacatgcctgccagcatctgtaagggtatcaaaagtcctcatccgaacagatgtttcgtacagggactttggggaaaatattatatcaaattttgcacatctaacgtgatatttacacgtggaataaataattagctagcctttaatatgacaagggacctccgggcaaaggaatgtgcctggaaaattctatatgaggctggagcctatgaactatggtttgccttccaagaagcagagaaaggcaagtcaatgcatcctccaagactgttttgtaagtaactccattgaaaaagacaagtctcgaggaagatctagcagggtgaccaaaatgccgaccagaataaatgatctcaggagtgtcggataaggccaaaattctcgacaattttatacctctaggtaaaaaaaatttgacggtctataaaattgttgcctatacgagcgtcgcgaatactgggtagaataggcgacggtggaaaaatatcgttataaaataattcctaatggtttaaaaccgtcggctatactatacccgacaatttaaaaccgtcgctataatggattgcccaaaaaaaatcatcttcttcatcctcctcaaaaccacttttcgtcataatggacaatttttaattcattatgtgtgtaacaattaatttattgttaatttatttttaatattcattattaatattattgtaaattatatatttatacttaatgtgtgtaataaaatcttattattgttttaaatattttatatatatatattattgtaatatatatatatttataaatataatttataatttattttttgttattttttattacattaccggcggagtacccaccgttattaatgtgtcaaataaataatttgacgttgtaaataccggtgggacccgccgctattggtctgccggtattagtcaataatagcggcggatgtgtcagttggccgctattactgactaataccgaccagatattactggcgggccaataccggtagaacccgccaataataccatataccggccaatttaatcattaataccgatagacccttccgcccttatttcttgtaattgttgtagtgccaccctcattgtattaatgctattattttattgctgaagggtttaatatgcttctctgcaaatttttattttttcatgggaagagttatatatataaatatatatatataataaaaaaaaaattaaaattgcagttatatgttcaattaatatagataattctacttactaacactgggagcatagattgtgaagttgttaagtacagttgttgtactaatactttttattaatttatttgtgaaataatttcaatttctttctatagtgtggctgctccactaatattttgcatatatcaaaaagctttatagctgggatttttttgttgcattataggcggcttctttgaatctataaatagtagtaagaagatttaataaaacaaaataattatatataattaatctacttgataaacatataaattattaaaacaatttgcttttaggatgctgtactgtacattattatatttaaatgaaattgtaattattatactagatatatgtatgtatgtataaagggacatatatagtatatacgatgttgatcatttgtggtttgtatatgggttggcatattaattagcctaagataggatcccttttgtggtgtagatttgtcattgtgtttgtgttgtatatggctttggcggttcctaaatgtcccctctgcccttattttattttatgatcagttataatatatgtatatataaattatatgatatatatttgggtaaatagcggtataagtactaaaagttttaagtttgtaaattacgtaatctcaatgtttatgtttagtggcataaatattcaatatttgtaaaactataatttttctctaatttcgtccgtacaaactctgttattttcttaaatatactcaatataaggtctagattcttgatcattgggtctacataaaaatatgtaggtacagttactttaaaatgttcctttaataaatttaaaacgaaatatgtactgacaaaactgaagaaaaattacagttttacaaacattaggtacttatgccgctaaaataaacattgggtttatgccgcttacaaacttaaaactttgggtacttatgccgctatttaccctatatatttatgtatcaagttactttaattaattatttttatttaagataaattttatttattagaagtaacttacttaatatatgtatattacatttgtgtataatttatatgtactgttacttttttacaatacttgattcattttaatcatttgaggctacctgaagtagctatagaaaagtgcattgtattgaaaattcttaattcgaatcttaaattatgcaatgtaatatataaacgttttaataaaaataaatacttgattcatcttcgtatccaatgtacattattagcaatagcgatttgtggtgggccagttataatacatgaatgtatgtatattgcaactccgtttgttttttagacttgttggaaaataacggatgtttaatgttttagtatccaaaataactttttagtcaatttttgttttatggtcatgtaaattatagctatttaagatattttgtaaaattttaaaaaatttgaaaaaaatttaaaatacgccgaaaattacgttcaactagtgcattgcatgcgtgactattttattatataaatgtgtaaaatagattgtttgaatattgttttctataatgtaaaattattctgaatttctcagtagaatatcttaaataactataacgtacatgaatatgaacaaaaattaaacaaatttttttttaaataccgaaataagtagatgatgcatcagtacatctcttttaataggtgtagtgtaaaatcaccgttaaacttttatataaatttataaatatgtatacatatatattactaataagtggaatataccaaaaagatttcttaacctgctcatttctttgcccaccacagaccacttaaggatggaggcaagatatagggagagtgggctcactccacaatcgaataagagaaatttatgtttagtgaccaaaattttaaattattgacaaatatagtgttctttatttattttttattaataaa

SEQ ID NO: 239162 - DNA, 1432 bp, Cannabis indica
tttttattttgggccctcggaaagtgtgggtcctaggcacgggcctagcccgcctatgcctagggccggccctgatgccaatatttaattgttcgaagtgttgaatcaacgagagatcttttagcgtcagcgatcaaaacaactctaattacaagcgggagatcaaaatagtaagtttttccactcaaaaactaatgctagaaggcgcactaatttaatctcttgtttgaaaaatggtgatggggtttcgatcacgtgagaaaatgacttgggtgatgttatggtaaattatttttaggctattttcacattagaagcatcagagtggggtgaggtgctctcgtgtatccctacggtgattggggcagagcagaatgacatgctacttcgaccggttagtatggatgaagtaaagcatctaatctttcaggtgcatttggataaatcactgagggcccaactttctattaaaagttttggggattgtggggaacgatgtagtggagacggttttgattcctaaaaagaaatgtcatgagtagatgaatgagttgaggccgatttcgttgtgcaatgtcattgctaaagttgtctcgaaggttttagcgaataagttgaaggtattgttcgaggatgtgatttttgaaagtcaaagtgtgttcattccagggcgctcagttactgataacatcatggtatagtttgaagtacttcattatttgaagccgaagcagacgggtaaggaagagtttatggctttgaagctcaacttgaataaagcatacaatagagttgaatggtcttatctttgtgctatgttgacccagatggggtttgctgagaggtgggttccacatctccatgtaccactagtctcttttagagttggtttttcatgacaatcaactaaattatcttttgtgatatttttattcttatctctaatatcttcttcttctctccatttttaattgctttgatatcaatatataaaattattattaaaataataaaattaatattaaatgcaaaaaattaccctacatgatttttgatcaaactaaaaagtaaaatatttggagattattatcaattaattattggattttttcaattgtgtataatttatccataattttttaaacactatctcaatttgttgtgggataagttgatgaatacctctctttgtatctattaatcaaaaacactttcaaattatatctattctatataaaatgtggctatataacaaaattcttggtttatgagaaattattgggtgactttttttaaaataaaaaaaataacaaattattagatattgacacgtaaagggtcagcctccatgtagttagttaaacctaaatgtaattaatccacttaaagtgttgcaattaataataaatttgttcatattgttgattttttt

SEQ ID NO: 239163 - DNA, 5627 bp, Cannabis indica
aaaacagaaaacaaaattgttgttttcaaaattctcattttttgtaactatgttttttgaaaactatttttaaaaaacaagaccaaagaaaccaaattttccgtttttaaaaacaaaaaataattttttagttataatgccaaacatgcaataactcgttctactgataaagccaaaacccatgcattgcctactaaatcatctagaagaacaaagattaaattaaaagctgaagtttcttattatgaggaccacttcatctcatgtctaagtaaatttctatttattcaaccataagtctaaaaaaaaattacaagtaattaatcctaattttctaatcctaataaatagacaaagtagaaagatggtcatatataactaacctttctattctcattaattcaaacaacccttattttgtcgttttaaggaaactattattatacactcacttttatcaactctttcacgattgagtctgagaatagataataacttattgttggattaattcaaaccttgtaattttttgtctttttcttttgcagtaatttggatcacttcgttaaaatattccatatgaaatcacgtggaggtaatgcttcaccaactttggatactattatgtgtactatgatcaattaatatgtttgtttaatccaagatatatataacatattcaatccaaaataattgggcaaaatctatccaataattgaaaagatagcctcattttcaacttataacaaaatctccatccaataattgattttaaaaacttttgagatttaaagtgataagtatcttttagttgtttcatgacagatggtcgaaagatagtaactttaattttggaagaatattatagaatcttaaaattccactaaaagttaatgatttactttggatagcttattctgggtgtttaccaaccctgtctcacttaaagggtaggtatgtggatatttctgttacttgtctggtgtgtaatgattgagtcgaatcaattcttcatattttggttgattgtccattaacaaaagtgtgttggcatgagattgatgaaacgttatggctatggcttctctcggtatttgatttctcaagttggtttcatcaagttttggaagtcgaaggtgtgtcatgtagctatgatttgctagtctctttggcatgctcgtaatggactagtgtggcatagtaaaagttctgttgcaaatgacgtggtggctgcagcgttgtcttactttaattaatgaaagggtgctcatgaacgttcaactaacactttggcttccaacacttgtgttagtatagagtattgtcgacttcaagtgttgatatgattaaagtcaatgtagatgtctctgtcatttttggagcagacttttttaggattagatggcttgctcgtgaccatcatgatagtgtgttatttcattcttcaaagcatatgcttggtcgagtttagctggttgtggctgagacaattagtttgaaggaagctctaagttcgatcaaacaacagggattctcatgcattgtgcatgagtcagactgcaagagtgttattgatgctcttcataattcagctcatatggtctcttctttggatttaattattttttattgtcattttttagtttttatgataaataatatttcttgtgcttttgttaaacgatctacaaacaagatcgctaactgtttagcgattgctacttgttcttttgttggtcgtagctatagtaaggaatttgtccgtgctctgctcttcagataattattttaaatgatttgtcaaattataattttcttgtaaaaaaataaataaataaacttttaccattgttatatacaatagtgcgtgtgtactcaataaaatacaaattaaactttttttattgatatgatcaaattctctttaattatattatatgggatctaaatttaaatttaattatataattacataaaataatttggtcaaattagtataattttattatttaaatttgatatttgattttagagtatattagaatttcaaaatatagaatgccaaatgagtatagagtacaatatgtgcattttctttatattatatgtaaaaagattaattttctttttaaaaaaacaaccatcttatatttatcaaaaggtaaagttttagtcaaatccacctaactacattatgtatcgcaaaattaccttttttttaaccattctttttaaatgagcaatcattgttaactttacctttgaatttacattgatttatttatgttatcatttcattaatgtgttctagaatgaaataagaagaggtattcataaatcacccttaagtaatatccaagtgattttcaaataaacatacatgctttgcaatacaaaaaattactataatacatgttccattcaacaatgtgttctctccatttctacaccaataaattaataaagccccttttggcttttttttaccattctactaatttgggtactcaactaaattatacaaaacttttccagccatgattacccaataaaagctgcataaactataatcaacattaccaaaaatgttctccttgcataggatatttttgatgatgcactagaaaacttgaatctctgagcctgatctctgcacattaaagaaacacaaagatgtattagtagagttcaaatcgaattctgattcgggtgagcgagtagaatagcacaaaacaagttagcaaagttgtagttttgatataatcttacttctgtagggatgatagtacaccacaaaatatggcattttcgggcaaagaaacctcggatttgtcatcctcagtgtttacgacgctgatgtacgtttcctggcctagataccacgagttcagattgtctgttcgaaggttccacatgccactattgtctagagaaatcaaaattgctgtccaagctccgggaaagacctgtagccagttcaaaaatcattctgttaacgttagttagttagttatgttagttggtcggttattatctgtctatagagtttgttagatggtagttagtttcataactaccacctctgtactatccattattccctatataaataaagcttttgactaagagtttagtcactttttcataaacactcaataaatccacgtatagtacaatttagacactgtgaaagctaagaaaaagaataaataggataggatttgtccctcccaaactataactattgtagagttttgccttatgaacgttttcttttttacaaaaatgccccctacgcggtaaagattactgcaaatatcccctatctgttacattttgttcatttctttaaataattttttgatgtagcactaacgtgatgttaatctggctcaatttaagagtcttaaatgcatataaatagcaatataaactgaattataagatatgcattcttagagctaatatttgtatgtttaatgttaacaaactggatttctaacaatttaaagttaaataaattctcgtactgtgattataaaacaattgttttgaaaaatgagcataatgtaactgaagatggatatttttataattcgacaaaatttttgcaacacaaaaattcagcgacaaaactctacaagggtcctaaaattcagagaagaaaaaatcctttttattgctggtccagacaatattttactgattccaggagacatcattgtcatgagtcaagtttcaaatggaggttttgctgatcaaactttcgaattcgattatagttatagaaacatgagtacctgcgtggtgctgcgagcaacaccgtcccacttgttgtaagtgtttctgctgttctctgtccaaactccaaaatccatactacaaaaagaatgagaaactgtccaattcatgttcctgacatctccaatttcataacagtgaaaaatgcaaacaaaagaagaacaaaaaagagccgaagagctcaccccactacaaaaaatgcatagccatccaaatggtagttctgaacagttgtgtcattgttctggaggatgatttccatgaaacctctataagtaccattaattagagatgtatcgactttggaacgtctgttcataattttattagggaaatcaagcttgtaaactcctggaatcttgaactgttcagcaagcttcaagggtgttgaaggtggtaaatatgaaatgccattgagggtagtacgccacttgccatttataagttcttgaggtttgtgagtgatcagatagaaatctgtgactgtaatttgaccatatttgaaggatccttgcgggtttggacgagcagcaccagcagagacattccatctaaacattgcaccaccatgacaaatactaattagtccataacaagaatttttgttaagggaatcaaaagcaaatcactagtagtaaatcataatccatcaatggtaagtataattgggttattgaataagatcctatttggttgagcttctgcttttgcttttagcttctcaggaagaatatagctttttcgagctaaaagctgaaactcgctggttacccaaccagcaacagatgtgcttttgaagattcgaaagtccaaatccaaaaacagtttttaaaagcctaaccaaccagggtctaaatatctataagacacatgttttaagaaagtgttttttagcacttgaaatagataacttctagccatgattgtaatattaagatactcagctacaaccttatggatcttgcttgattcattgagaaataggggtccaaatcagtaggaggatcggggagaggacctgatgcaggcccctgagagttcgagtagtgcaaaacggcaactccattaactcgagtccaagaagatgaattgacaaaacgagggctggcaacaatgtagtagtcactgctggcattttgatccattgttaccaagaatgaatatgactgacctacatgtatatccatgtttgagtagttctgttgaactgtatatgatccttcagtctcaacaagaagtaagttatggttttgtatcctgaaattcaaacttgttgagataccaacattatgcacccgtatacggtatgtttttcctgtttcaagacaaagttacaattagattgacaagctgtcttccattgccaaaaagaacaacaaaaagagaggtttactactaattacctggttcaacatttactaataagaaaggatttcctgctggaacaagtgcctcatcatatcgaaagggaccatgtccatttataataacaccatcaggaactccaagagcaattccattctcaacatcttttctcagttcctgttaccctcataaacatcggtctcaagttagatttttattttgggcttccattaacattttaaatattttattacaaaaagggttgatgaataaggtgttttgccattttagcccatatagttattgatctacagttaatgaccttaacatttatgtgaagtctaattgaagttgaagagtgagtttttctaaccagagttttgttgctaagtctcccttaactctataaatacatcatcaccattatttcttagttatctaaatgaatcaatcatgtttgt

SEQ ID NO: 239164 - DNA, 1471 bp, Cannabis indica
attgatttaaatatttagcaacttaaaaatattataaccgcgcgaagcgcggattagttgcctagttatatgataaacaaaccaacatgttacaattttttactctatttattatagtcatataggttaagaaataatagtatgaaaatttcaaacttaaactcaaacttaatttcttaataactagatataaagtcacaagtttatttgtacaacactaatggttagagtaatagtactaactatttaaacaaaagttgggattctatgccattagtatatatactacaatacaatatattctggtgtgagttctcttattggttgtttggtatattaatttaagatccttttacttaaattatagcaacttaataattagcataagcattgcaagagtacgtgataataaaactaacacttagccatattaatgaaaaacaaatttgcatcactaacaattctcaattcacatatgaaaattgtaggattttcttgtgctctttccaagaatgcccctacaccaactcaagaattgattaaaacgacaaggacaaaattgtccttgaaaagcaatacacggatttaaacaaaacgacacagaaacttggtcgttcccttcctacacgataaatcgtttagacaacgatttgtcgttcttcctcgaacaaaaccaatccaagagagctaaccctagctcagaacttgttacagaacctttgagagtttcacaaactctctctctttctctctggttctcaaaccctagaaccagagatatttttcgatcaactagatcgatctacccagaatccatccccaagaaacaccacaaacacacacacacacacacaaagatcaacaaatacaaacagtaaagagagaaaatagagagcaaacacagtgtttatagaggttcgtcctaaatcagggatacatcctcttttcgagctcgccttggagatgtttcttaggatctgcactattgaagaagaaattacaaacaagtgagaaatccaagtcacaagcttgactggtatttctgattttctctcaatctttctttttctgtattttcttttgatttctcactaactctctttcttttctttgcatgaacacttgggtgaacaacatcgagagctcatctctcaaatctaggatttctatttctggtatctctcaactgagagattggtaagtcctcctcccccttctatagcttctgtttctttagttgtaggtgtgtaacagaatttctgttgcaaaacagaaattcagttacacttagtcaataagttgttgtgtctggtgagtgggtaaagccacgagccgttttactttgtatttttctttcttctggtaaactgtaaaaacaagtggtccaggggagatttaatttaacaatttccaccttagatctctcctgggacacttgttattatagtgcaacattcttcaagggtcttag

SEQ ID NO: 239165 - DNA, 1308 bp, Cannabis indica
actttcatgtcaattatttttattctgataattatttatatacattatactcataatctatgaagatcatgttcaatcctctttttacgatcttcttattaaattagttaacaaaaaattgggtgaacaacttttttataaatacatgtatatttataaaaataattgatacataaaaatattaataacaaaataacattttgtgtttaagatttcggaaaggcacaaaatgacaagtaatatagctaaaaaaatgtgtttgtatgcatataattaggatttatgctcttcaaattttttaaactattaaaaattttctatccaatcctgcttaattttactaaaatgacgattgtacatgttttaaatcatgtctctcgaattttaatatgtattaaattgtgttctcaaactttgatattaattaaattaattatactctcgaactttaatatgtatcaaatcgtattccctaacttaaaaatgtatcaaattgtaccacctttaaattttcaaaaacatgatatttgataaaaaaaaaaattctaattagccctaaaatgaataatttatacataacatttacaattttaccacaaagataatttattgtgacttaaatcacaatttacattaaaaaaaagcctttgtataattaaattattcattttcttaattaatttcagataatgatataatagcactaactaatttcagttcatatattaaattactaatacatttttaatttacataaaacatgtataaaagaaaattctgtttaacaaaaattataaaaataaattctatattatcttttatgtaatgattcttctttggagttagaagttaacaagctgtatgaaattctaaggaaataatcattataggctctgaagggtccatgccactacttataataataagttgtttaattacgttttgacattttaattaatcatattaaaccaacccaaccaaaattaaaacaactaacaacaaatcaagccagacaagtggttcattgaaaatttattttatacataattaatgtcccctaattcttattaattaattacttgttctttttaataataacactctgggacaacaaaggactatatacttgcgttggacatcatttatctatagatcatgacataacattattcattatgaaattggaaaacaccatccatttatgatataaacacacataattaatacaaaatgggaaagttgagtttctatccttcatgttacactgtaccatcacaccataacaaaatatttatcacataatcttcc

SEQ ID NO: 239166 - DNA, 2469 bp, Cannabis indica
gacacttgtgtatgaagttctcctatgacaattggtgtgttgggacagttagaggtgaccaaaagagcgcaaggagttgttacaatgtctttgtttagacaattttcatggttcgagaaaagatacctattgctcctagagtggaaactgaagcggaaaccaagaccgtctaggaagattttgaagatgagctagacctccgtgtgggtacggaaagagtgattgagccgggtgtggaagaagttgacatatgtgaaaaaaccgtaccaaaaccattaaggtaggaagaaacatgccttcggcagtgaaagaaagcattgtaaatattgtcaagagaaatcaagatgtattggtgtggagccattctaatgttacaggaattgatcgtaacaccatctgccatgacttgaacatcaacaaagatgcaacaccagttcaccaaaaatgaaaaccattagactctatgatggaagaggtagtaaaagctaaagtagataagttattcacaaatgacttcctctgggaagctttgtatactgtttgatttccaaacacaattttggtacctaaacctaatgggatgttgaggatgtgtattgacttcacgaacctcaaaaaagcttgtcccaaagacaattttcctctcccatgtatatatcagatgctcgataccatgtccgactatcagttgtccaattaatggatacttactctatatacaatcagatcaagatgcaggttgctgatgaagaacacaccaacttccagacggataaaggtgtgtattgctacaaggtgatgccattcagtctaaaaaatgccagagcaacttatcagagaatggtcaataagatgttcaagaaccaattgggaagaaatatggaagtgtacatcgacgacatgctagtaaaatccaagacaaccagagaacactataaagaacttgaggaagccttttcggttctctcaaggtatgggatgaaacttaatctgaagaaatgttcatttggtgtctcctctgggaaatttttaggtttcattgttagctctcaaggaattgaagcaaactcggagaaaatcaaaaccttcatcaacatgccttctccataaaagcataaggatgtgtaaggcatcactagaaggatcgtttcccttagcaggttcatctcaaagtcaatagacaagtgcattatattcgttaacgtgttgagaggaaacaaaaaatttgaatcaactaaagaatttaaagaggccttctaaaaattgaaggaacatttaactaaagctcctattttgtcatagtttgttgaaggggaagacttgtatctctacttggcaatgtctgatcacaccatatgcgatgccttagtgtgagaggagggaaaggtccaactatcggtgtactatgtcagcaaaagattactgggtgtagtatcaaggtatcccttaatcgaaaaactaaccttttgcttactagttacctctcgaaagctcagaccttactttgaagctcatgccattaaagtactgaccaatcaccctctttgccaagtgcttcaaaagctggaggcttccagtcaattgcgaaaatgcacgatagagcttagccaattcaacaactaatatcagccacgggtatcaatcagaggttaagcactagctgactttatggtggaatgctctagaatgggcaaactcacagatgagtcagtcctagagttacccacatggaaagtatatgtagatggagcatctaatgaaaagggggttggagtgggagtatattaatttccatgtaagggcatcaactagaaagcgctatctgctttgaatttcctacctccatcaacgaagctaaccacaaagccatgctatcagggttacgactattgggattattttaccaagatcttaatttactaacaagtatgtttcattaacatcccaaatatgaatatctctaaaacaatgaaattaaacacataagatcttagaaaaccatacattaattgcagcagaataatatgactccttccattcaaatctctagcccttgattatttctgtcgcagagcattatcaagatctaaacctggatctctttctatccttcaagtttggttaccactgtcttccgcactacgattgagtacttgacttgctatgtgtgggcatgtaactctatcactataggttgattatgaagaacaatgaaggagggtttgaaattcaatagaaggtatctctcatctacttgttgttagagaatgaaaactaggtttgatttgattgaagttaatagttggatgagatgagagcatcacgttccttttataatttttagttgtgattttatgccctaaataaaacccatttcaatacaatatgatttgttatcaatagaagattaaaaatcaatttatgtttactatgtagttttctatgtttatggtttaatgtatacaattt

SEQ ID NO: 239167 - DNA, 6783 bp, Cannabis indica
attgatattaaattgagaaaagtgtttaattgtaaattttcctttattatattgatgatccgcaacagtactcgttgaattcacaaaaatattacaacgatataatttattatttagaggtactgaaaaaaatttatgaacaattaaaaattatgagtttatatggattattagatatatggctcttttacccttaagtttaaatatatttaagttatgtgaataaggggcattttggtagaatgccataaatgagataaacatgttttagtttattttcaaattaagaatcttgtagaaaaatcaattatacaaacacccttcccacaccaagagaggaacaagaaattttcctctaattctttctcaaattttgcttgaatcaagttgtaaaattaagttcattatgtggagagattaaagataaatttaaatctaattttgtatgattctagttatgaaatgtgttaggtttccatttttttaagtgaattatggatatgatgttgtggttgagttatgctctagttttcttctcttttggggttagagtttatggttagaaaagggagttcgcagctgtgtttgggttgttagggaatatttgaagctttgagttcaaagcttctactctcacatggtgaattttgaattaatgaattttattgtgttttaagtttacgaatatgttttattggtgatatagaattgttatggaagttttaagcttatttgattaggtattgaagaagagaactcaaaaaattttgagttagattttctatagcagaactggtcgacaagttctatgatccagtaaatcaattaacctagaaaactgatggaatagtttgtaggtctggtggactggttggtcagtcctggggtacctcgctttttgtatttttaggttatttatggtattacaaccttatttctcgataaggaaatttcatattatgaatttgagtcttagaaagtgttttagcgaaacatgcacttaccaatttaccatttatgtgacttagggcctccgatcgtcgagtagatttccactcaagttgcctgcatgcatgaattcagaattgaggtaagaatagcatgttcacatatgcacatgtttagtacagatgtatgttatattgccatctagctagcatgttaaagatagtagtatgggtgtacatagagttgcacagagataccaatatctgttgggcaatgttgaatagtatggattagtactaccaacaccagtacgactatagagtactggacttaagttagcattattattaatcaggccataggtacgaacgttcagatctcagtttatacgcattggacgctggtaataaacttatagtaattgagtgtatggatgctaaattacaagtttgatatatgttgtattacatatgttgtgccttgagttccttttaccctgagcgaagtgccttcttttagctctttccttgtcaacctctcctcctcaatcttctttctccgcctagagtcttccttcttggagccttgttccttgcctaatattaaaacaacctccatgttggctctcttcccttccttgtcgaagttgaaaggtggcttggagcgtttttgggacatggcagattgctctgggaagacaaacccctcgccatttttgtcaccatcaataaaagagtggtagaggaggaaaagtagctcctggcagaagtggaacttgttggagtggctccacctagatgacctcgtcagcagaggccctttcagtttgaacagccaaaactgcctcatccgccttagctagaagtggtggatctctagcaataggcttcatggaccctccggacctagccttacctttacgttcggtgtgagccactgcgtgcgcacggacctcctgagacttattctagacgttgccttgcacttgatctaggagacccatctccaacgtccagagttctctacaaaattgaaacaaagtaaggttagggacatgcgtaaaatggttagcgcaaagttaacaaaaatacaaaaggacttgggtctgggaataaccatggaatttactatattttagttctccccaagaaaacaaagttatgtccttccgccttaagaaactaccttattcatcaaacccctggtaaaacatgaggacaaacagatctaccctataggattgggacaacaaaataaggttttctgagctcctcacaatctcatctactctatcatagtaatacattacagggcacctatgcaaatctactactaaaaagtaagggtcgaagctcccctgattgatatgagccatcccgattggacgcgaaacgcgaatgagacagattggagttatacgtcttcctaaagtactggcacccatagtgccttcattcagaataacagtggcaaaacactctacaaactctgtctcctcgatcactgggtccagatgagcatgtttccaattcgctagccactttttgccaagcttggtggctttctagagttcatctaccacgatctcgacaatggcctccttgattgcagtcgaatcttaggtgagatccttaaaggtgtaccagtcaatgctttggtgcggggcaatcaacccaactcttctatgattggctgcggttaccaatcttccacttttagcatcgtcgaaggcattcccatgtacaaggtctccctttccacgaagacaacttgggacttggtggtgcaatattggctaagagcaaaaaaattgcattagtaaacaatttgctaagtgcagaaagaaatggaaagaaggaaaatggcgacgctaatccagaatcaagaagttaagtgatcgtgtcaaaactctcttcaaaggaaagttggatgtaaagaaccagtattcccagaagtctaggacatactttataataatggttgggaaaaccatcttggagcgcctcttcagcttgtagaacccaatgctagatttattcttctacatgggttatgatttgacaatgtaaaaatacagtatttcctccgattttggaacctccatgttcttatccatgcaaaggacgtaccatccagccagtagcttgtacaactgtagaatgagttggaagggtacaatcccccactatcatgaaaaagtttaaaaagtaacatctgattggaaggtgcactccgcatacgatgtgtgcccagctccaggcaccaaatccatccaccctcacggtaggcgactccccctagtgtgaaagcatattccaacaaaggcctggaatatgatggacccatcattccttggagtagcattttagcactttgtagttatggaactcattagagatttggtccatctctcactaagaggagttgtacactactttaggggcatcctcctaggatttctcctcattcgtctccattgcaagagaaacatccacaaagagctcctcaatcaactccactacctcgagctcaaagacgtccaacgtgatggttaattggagagaaatcaaaagaaaaaccaagtagttaaatacccatactaaagaatatagtaagggtataggagagtcctcccctagaacttcttagagaggtccatgctggacctaacattcaaaagaaaaatccccatagaactttgctccgggatgatcagatcgggaacacaagagtaaacagattattctcattgcttcattcaaaaccataagggtttcaatcaaagggtttcaaattaaacacgctcagctgcaacatttagaattgaatttccataaaaaatggataggcaacagagtttagagatcctaactccaactacaaacaaaatacatgccaaattatacgcacaatctcaagaatattctagacagaccaaaaatcctaaattccatctattatattctataggtcacatgcaaattgctgcctaaatcatcaacagagaatgcatctgtcatacccagaatttgaacaagaatttcgaccacaaaagaaattaaaatttacaaaaggctaagagaacttgcttaatgaaggcaaaagatgtggatgaggcaagaattgtagtcgaaatacttcaatggaaacctccttgagatggtgtatattggcctggagttcacaagcccaagcgatcaattttttgatttttgcttggaaatccaaaggtctcgatggatctagaggaggagtcgtaaggtctggtggcgaccctcttgggttttctctcgcacaaatttgaaaaagaattctaagacaatcgtcaaagagattggacattcacctaaggcaatgttcgatttttctctctcaagaaatttgaactcaaaatatgaaataggcaaaagtcgtgaattgtgttttcaactctatttataagtgggcggtgacgatctgtgtgctcctagaatcaatggcttagattgcattctagaatatacaaagttgatctgatagtccgggaatagaagggtcaacatttaatgcatgcatttgaatacagacattttcaattgaacgtccacgtctgtacgactagtggcatgattcaatcatcaacacgctaccctaagcatgaagaacttttccaacgcacatgaagttcacagatcaaggaactagtgccatgcgtaatccaccagctaaaattcaaagatccatgactgtccaccactaaagaaggaagaagtcaaaaagatctagatagaagacgcaaagcctccgcgactctcaagttttgtaagtttgtggggtaaacgttatccatgcttccagaaggaaggcacgtggcaattttaatacaaagttaattaattaaggcctgctcaaaggcccaacgagataatgggctaggaccatacaatgagatgggcctcacaaccatctgatatacaagtaatctatgtctaaagctggatgtccccggatgtggaagggcacctcactccacttaaaaagaagctatcaagaccctatagatgagcatttgggatacatccaaaagggttctccaagagacgccctgaaagccaatgttgaagctgacgtagcagtcctttgacactgaatcccaccaactgagggggtttcaccctatgtcagaccgtgagagtgcacataccaccaaaaacaacatccctcttgtcctatgaacactgttataacactatagtacgcaaaggcgacacacgcacgacacttgttgacctcaagtggtcccatgtcgtactgagcataactgccccatgaactgggcctcagtctttgggcccaaagtcattgtattttatgtatttcactactacaaaaaggaatcagtttttaagtgacatatataaaatttgcgctggttggtgtaacccacgcaaagactattattttttgcttcatttcataagtggcgccaaaagttttttacttcacttaataccaaagcaaatatagaaatgcatattttgcatcagttataaagtgaagcaaatatctttgcgtcgcactataacttacacaatttggtttttgcatcggttatgaaccatagcaagctaaaacaaaaatgaaacaaaaaccagatctagcccaaacaattctgagccaaatctaaaataaaaaactacagattcaatcaatttataccaataccatatacaatcaaattctataaaaataatctacaaaaatatatatcattgatttataaatttatatacatattatacacaatctccacaccacaacaacctatcgagccaccataacctcagaccaccatgaccgaattagaggaaagattggagagaaagagaaatacaaagataaaagagaaagagttcgaagataaagagagggacaaagatcggaggagaaaggacttacttccaacaaccgctgggcttctttgacatggtggaggtgggtgctagctaggcttcttcaacggcgctgggcgcgggcttagtcgacaccactacaccaactgaagatgaaggcagctgagagaaagagaagaggaagatagagagaactttgattttactttgggtctttttagtttaggtagctgaggtggtatgatttagggttagatattcggtgttatttggggtttctttaaatggacccgcaacccataggttttacgttttttaaatgagtgtgttttgagtcagttttgcaccgacgcaactttgcatcgtgcacaaccgatgcaaaccaagtccaccatcgatgctaatgttgcttcatatcacaaccgatgacaaattttacctttaattaattgtgtcagttttatagatttatcgacatcaaaactaacgctaaagccaattaatatttgaagtagtgttatcccattagtggtccatgttacacgcataccctagcaggtcgcgagtatattcatacatagattctagcctataaatactacatgataccttcatgccagaggagagaaactcattaatcaaatactatagctaaaagctagggttcttaagcttgtaaagaacaccattgtaatactttaaggttatctagcctaatataattgccttatggactagggttcattaacacccaaataacgtaaaaattcccatctccttttcatctttttaattttttttcttagttcataatttattattttgactttacaaaatcttagtaacattattcttaattttctatctattaaaaaaaaactctgaatttattatatgggatggggttgttaatcggctgaaaaaaaaaacgaaaaaaacgaaa

SEQ ID NO: 239168 - DNA, 3831 bp, Cannabis indica
attaataataataataataagggggcatataagtcatttacacactcaattttttattgatataaattttgtatataaattttttagatattttatattttaattctataaaaataattttttttttatctatattctataaatttttatatttatcatcctaaaatttatattttttttattacatatgtttatttatattcttataaaattataattttcatttttattttcacaaaaactatattttttcaataaaaataaatatttcattaatgttttaaaaaatattttttcaccctcactaaattattgggctaattccgctactatataaatacacatgaattaatcaaatgctacaataagtaattatatatatataaaaaaagaattttaattctctaattaaagagataagatttggaaatttggatattggtattaagaatttataagatataaagtgatcatgatctgatgtaatagagaaaattattactaattattggtaactatatgtttatatattctaaaaatttaaagacaggactgtgtatatggctatgtatatgatttagtttatatgtggtcgaaaaaaaaccaaagtaatatagtaattaattagtttggcgatagttacgtacacgacatttcaagaaatttattaattttgactgaaacccattgatccattaattaaaaaaaatgttaaatggcataggagagtgtattgtagattctacgttggagtttaagttatgcaatataatatataaacgcttaaattaaaaacatttgttaattagggtgacaattcatattcactactacaaaacaagccgcacatataattttattaatagcaatttaagcttttaataatccaatcaggacatcttccacattagacacgactaagattagaattaaaaatataaatcaaataattaccagcttaattcttagatcatttgacaaacatattaaaataaaagaattttaggcagctaaactctcacaactgtcatttcacttgtatttaaccttccaaacgcaaatttgatagtaaaatcctccaaactaccaaactggtagcaaatttatggtgtctttcgcttaactatcactatggactgcttatgtatacattcttgtacacaggtgtgcacagggcacgtttatattggtacacctaatatcattatttaaaaattattttaaaattaaataaaattataaaaataaaatatttaaaaaattaaaaaatattataaattttgaaataatgtttatgttttttaaataataatattaggtgtaccaataaaaatgtgatacgtgtataaaactgaatctctccaagtctttggtgttctttagccccaataccagcactctctctcgatctcaagtatgtgaagctctcagtatgaatgaagctactgaaggaagtctttatttaggcctccccaacattatgaggcataaaaagtcttcgagtcttggtttcctcaaaaataaagtcatctcttggatcaataatcggaatgaaaaatttctgtttcgtgctggtaaagagattttactcaaaactattatccaatcattacctacttatgctataagtgtgtttctccttcctataggcacttgtaatgatattgagaagctaatggcaatcttttggtaaaagactaattctagcaaaggaaatggcattatttggatatcatgggataggatggttgcccaaaacttgaaggcagtatgggtttttctcatttacatgactttaatcttactatatgttagcaaaataaggctagtgtcttatgtgtaaatctgattctctaatgggtcagctgagcttggttataatctaagttttatctggaggagtattttggagtgcccaaaatctggttcatttgggggctactagaattattgggaatggagctaccactagtattctatttcatcccctgctacctttttcagaggacaagtatgtaaccactactcaccctagtttgattaataaactagtaaattctttgttctttattgataattgtagttgggatattgaagtcatcaaagacatgttctctaactgcgaagctttgctaattttaggcattttgttacgcccaactactgatgtggatttttggtcatggttcgaagaacgaatatgtttgttctctattcgaagcgcttatcttctacagtctcataaaaactctgggacagttgttgataactttgggtttcagcgtagactttggcagcttaaaattccacataaagttaagaatttaatttggcgtgccatccgcggatgtccgccgacttgtttgtagcttgtcagaaagcatgttaaaatttcatcagtttgtcacgtctatcattctcatgctgaatcaattatacatgctctgcttacttgtaactatgctgaatcaattatacatgctatgcttccttgtaactttgccaagtcttgctgaaatgctttcagaatcatctatgacacaacttctctatcttcttttagctgcttgttggagaatattatgaagactttcgatgatgattttgttagcagaactgtcatgttgtgttaggcagtatggaaagccagaaaagatgtattatagaaagaaaaaaaaaacaccttcaattgatgaggttattgcattggcttgtgtttctcctgatcatggcaaaaagctcaagataacttggttagcatctttatttctcaaaagtaatagtgttataactgagcattggattaaatcataaataaaccacatcatggtcaatgttgatacatccttatttcacaaggagaactcttatggctttggaatagtagccagagatagtttcaataaactcattgaagcaaaaatttgttatcaaggaggaaatcacgctgctgaagtggtagaagctatgggaataaatgaagctcttagttgggttcagagtgaacaatggcagtttgtagagattgaaacagatagtatagttaccattcaagggattcaaaataatcaatctatgcactctgtctccaataatattcaaacttctgctttctctttacaaaatgttaatttacgttttattaaacgattatcaaatcgagtggtacatattctgactaggcactctcgatttctctctggttgtagcatttttcaacataacgtttgagccgatttacaagctttgttgtattaagaatgttaaattcaatgaagtcattatttcattaaaaaaaccgttaatttcttttattctattgaaaataattacacacaccatgtgctttggattttacattgaaaccctgttcagaacaattacataaaatatcaatttttgtttttatggtattctataaaacataagaaaataataaaaaaccacatgaaagtaacaaagaattgacatcaaaacaacatcaaaactaaataacaaaaaatcaatacaaaataacaagagtacaacatagaaatacataaaaattaaaaaatcatgtttatgtaaataaaatctaaacaaccataaaaatattgaaaatttcgtacaacccgtaattttataatttctttagaacttttcgcagttaaaccctctcaactattacttcacttgcacttaatcctctaagctcaaattttgacgataaaaccctcaaaactactgaactgctagtaaatttaaggtgtcatctattttccatatttaaccgtcaatatagactgcttatgtgtacacttttatctaggtgtcacatttatattgatacac

SEQ ID NO: 239169 - DNA, 2082 bp, Cannabis indica
atgaatgatactttgactctcgcctatcaagacactgtatcagtttcttggaaatcttggaaattatttaagatgtgcttgttttgtattttcacatgtctttgttatttgctaaatgcttaataatttctgaattgtgcgtgaatttatattgaaccatgttattttctgttattaattgtagttgtaaatttcgtgtaaaaataagaataactttgactcttgcctaccaggacatcgttggattcttattgtgtgtcatccaggactcttttcgctctttctcttgtttatatttgtcaggaaggccctgaatgagttggtccttttgttggatatcccttgggagagagttgatctcccaaatttgggtggatatcatttcagactgaagaaccaccctagtctcggctctgtccttttcctccgtagccttatccaagttctcttgaagagaacgcatggtctcctcaacctttctctcgacttaggtcttatgttttaagtatagttcacggtatttggcgtctaaattcttctcttcaaccgccagtttggccttgcagtcctcctgagtcttttttatgttggagttagcctgagtgttgacctgctccacttttcggcaaggcctcattttttattgacaaggattgaactttagcatgaagttggctaagttcaatagtcatgttacccacttctttagtggtcctctcttcgaacaatgccatctagggaaaggaaaataataggaaacggttatacacactttggtaataaaaatttcatcgaaagggagaatggttcaagaaattaagacctacccgtactccctattgcttagcagccaccgataatgtgtatggatcaacaccgctgctcacatcccatttctcagatgtatgctcactcccactaaggctcatgttatccaacatctttacagcatatgtggcaatggctctgcccactgtaggtaccaaattatggcttactatagcaagatgcaacaatgggccagaggaagaaggctgacgaattccctctgcaatctcagctgtcttgatagaagacaactgggtagcccgcttctgaagatttaattattctcactcatggtcccttttcaaaatggcagtggacacgcctacctttttaggatagtcattgccaagagcaggtggccttatggggaaggagaaacccaatgaaggaatcctacccccaatggtgtgctgagattgattagcagaggcaggcctaggagttgtgtgccctggaagatgttgaagtgtaggagactgagatgggtgtggggcagactgagacgacacattctgcaattgatgaggggatagagtctgatgttgctgcagtagttgaactcttttaggttgttgatgttgttgttgttgttattgttactgttgttgttgcggtacttattgttgttatttttgttgtggtcgttgttgttgtggctattgttgttgtggctattgttgttgttgctgctactgttacaatggcgggctagtcaacagtacatcgaatgcccctaggtctgggattaaagatttgaccctctttgtgatgggacctggagaagtctttgatcccttgcgcttagacttaacaggagtcccttttgggggaaagacaagtctgcctaatgtagaaaaatgagaaaaatgagagaaatgatttttattttctgatgatctcttttagtgtatacaaagggtatatataatacaatgtgaacacctagtaatactagagtaaatggaaaatacattaaatgtaaatttacaactaattgctagcttgatttcctacactccccctcaagctagatatatactaaacattcctaattttgaacttagttccctaaaattaggacgatggagagctttggttaagatatcagcagcttgttgtctcgagggaatatgcttcaaggtgatgatcttgttttcaatcttttcactgatgaagtgacgatcaatttcaacatgtttggtcctatcatgatgaactggattctttgctattgctatggctgattgattgtca

SEQ ID NO: 239170 - DNA, 1858 bp, Cannabis indica
tgaccatttgagctacccctcttaggtaatacagtattcttatttgtttcattacctctctactgcctgcatctccaaaataaacaggaaggtctagggcacggccaacagccactcgatcactggacaagggaaagaaaataatgtgacaattagtaatttctctaagcactgtatgagagagggaggaaaaacaataccattagttgtcagaccaggggatttacaaatttattatctaaactagctgaatagggtaaagcaaaagatcgtaaaacacactccttttatactgtataacaataggatgttttccaaaaatacaggtgaaaatggacagtatgaccatccaaataactaatttatattaataaagtcaagaaatgactcattttatattaataaataatgcacatagcttcaataactgcctagcttttttatttttctagccattaatcaggagtcttacctcctcacatcaagagctacaaatggaattaatcgctctgaaagaagctgagcaattatctggaacaaaaagcaaaaaaataataacagcaattacttaatatgacaaatatttgtaccttcacaagtctgaattcgaacaatttcgcaattaatttgtaaagcataactctgaaaaaataatacctggccaactcgtccaaatccacaaataattatatgatcttgcaaatcatccgtctataaattgaatcaaccaatcagaataaaaaattagtgaataaaattttatcaatacagatgaaaataacattaatcaatacacatcagggtttctgtctaaatcatgcatcaacagaagataccaattcgacacattatattgctacttgtgtgtcttcaaaacttctttccgtagtagtctaatgaagaaagacaaaatgtctttgcaaaacaatatgttgctacttagttagtcaatgtttcacacaaaatcatatatatatttatatagatataaacatttctaattatatttgcatcatcgcaaactcattaatctactaaaaactttattgtaatgttttgtagatcagtagccaaagtgattaaaatgactaatgagccaatatttctgtagcttctgtctaaaatagtaaaatgtagtaaaattatgcatatttgttttttaaatttttgtagattctgcatagaaagaagtgcaatgcagtggaaagcatgattcacactataaaataaataattcatgcaccaaatccctgaaaattaataaaatataagcaatagtgatttctcatgatttgttacctcactctccacaggtaataaacttcgaacatcgtgctgctcaaaacgagatgcaattaactggcctccagcagcaagccatggtgtgagggccattgaaatacccaccacaagaaaaagtaatgaagaaaattgtgcagacattataccctggacaagaaacaatttagctaagtaatacaagcaagtaaaagtactattgtaaaaatattctttcatttctgttaaaagagttcaggtatgacatatttcatattaagtagtattgtaggattagatgaggagctggaattcaaaaagaaacaaagggcagcaacaaacaacatttgcagccaccatttatgtatgcatttatttctctgggaggaggtgaggagggcaataaaaataggcgttctccttttcttttctttttttaaatggataaacatacgcattaaaatgcctaaaaacagaggcagtcttcaactcatatgtcattctagcacaagcaactaacagatcattagacttgcccaaatcatttttaactacacacatatatatacagagagagaga

SEQ ID NO: 239171 - DNA, 2663 bp, Cannabis indica
ctgtgttaggacattttacctttggcaccagggtaatcacagttgagttaatttcgttgaggatcttgccatattcaaggaaggaagtaacagcttggaagatattgtccccaatggtatcctaattatcttggaagaaataactagaataaccatcaggacctggtgacttagaaccaggaatgtcaaaaacagttcttttcacttcttcctttgtaaattttcccatcaacatctctgagtgctccttagacaccgtagggcccctccttaagattccaatgatcactgatctcctattctccatagtagttccagaaggcttttatagtattcaagaaaagcctcttgcaccaataagggatcattcactctctccccattctattgttcattagaaaaaattatgttttaccttagtctttgttttatactagtatgaaacaaagtagtattgttgtctccatcatgaatccaagccatctttgctttttgtttcagaaatgacacataatcctattgaacttttatataaatctccctagcctccttctcttcattttacagctcaatattcaaaggacattaatgcaagctggtctgaacttcatccaacctgattttggcactagtagcagcagcttgtaagtcagaatagccctctttgtttatttcttttagcacacctttgaaaattttcagctttgaaacaagctgaaacattttagaaccatctattggtttagaccatgtctatactaagttactttcatacttagaatgagatttccacattctaaagtatttgaacggtttgatccccctatttaggtgaggatacaaagtaagaatccctagagaatggtcaaacaacccctcattaaaaaagtagctttagtattctcgtaagtattgagctgtgtttagttagctataatcctgtcaatcttagagaaaatacgatcttccccctgctacttatttgaccatgtaaagaaattcccactggactttacatcttctaattggcactggcgcacacactgcaaaaaatcatcatcatggtagcttctaactcgatgacctattctctcctcctttgacaagagctcattaaaatctcccataagacaccaattcccatttgataccaattcacaaatatctctccataaatttttcatctcattttgattatttgatgcataaatcacagtcaaaaaactgtcaaatataccatcagttgtaattattcttaggtgcataagcttacttgtgcatataataatatccacaatgaacctcaatggattccaagcaattacaagcttccctctagcatgccaagctatgttggaagagaaacactaaccctcaaaaacattagagtacaagttcacaagtttaggacccttgacccttgtcttaaagagaccaacaaaatcaactttttgagaactaataaattgcttaattagtctttgttttttttgattgttggctcctcgaacattccaacataaaagtttatccattggaaagagagggatatcccccctctccagtattgctcaattgtcccatgtcttctgttgcattaacttccatatcctgctgcccagaatcctcatctaggatctgaaaagcattgttaacctttagggcttctgttgtctttgttttctctactggtttgctccccttagttacttccatgaaaccatcttcatctactatcttcttcttcctatgatcttccttaacaatccactcctgtttgcctttagcatctttcttgcaatcctctgttagatgccctaaactagaacaatggttgcaagcgataggcttccactcatattttaccccaacatggacattacatcaatgttcattctcaaattctagcaagttaggaaaatgttgatccatccttacttcaattacaattctagggtagtttagcatatctctttcctttgtaactgagtcaaccataaccgggttacccagttgccccacaattttgaacaatgatctttgtccccaatatttaaggtctaagttttcaagctggatccatattgggacacacttcacatcttctttcttgaagttcacattaggatcccacaacttcaatatcactggtcttctattgaagaagatatatcccccattaagcacttgatccctatccatcatagaattgaaacggatgatgaagataccataagatagcattttcacacgatcaatcttgtccttccatactctttttgcaaaaccttccaagatgtgcaatggcgggttcaagcgaagcacatagcaaacaatggagggtttccaaaacagcacctcatcctctgtttaatatgattatatattaaaaattttaatatatagaattttagctttctcgcttttttttctctaggttttcagctcttgcagctgtagccatggcaaaaactagatcgaaggggattgcaaagcgaaaatctgaggaagaaagggacgcgaaacttagtaatcgctaggaaagttacagatggagatgcggtaagtggaatcgaaccaatcgagttttcagacaaagaggatgaacttagagaagaacaagcttcagatctgctactggttgatgtatttcagcctcctct

SEQ ID NO: 239172 - DNA, 1945 bp, Cannabis indica
attgattagccataataatataacatcttcaaatagtattatacactactataaaaccttctaacatatttgtcatcataataaatacttaattaagtgagttattgagtcattattattattattgtgcatctaccacaatttatatttaattataagtggtgacattttattataaagcaataataagtagtaattattatgtatagatatagatatttgatttcaaaggttgtgtggagacttgtttttagtgggtgagagagattgccgccggcccttagtggtcacccatgcaattattgacttcttttggatctttggtcaaatttgtttttaaaaaatatcatataattattttatttcaaatgacatataattagctaggggtctctctccaggacactcctttctcgtagacctcattttgacatcaaatttagccttattattttcatatatatagataaattttatatgtaaattttttataaaattctaaataaattaaaatactaaaatatttaaatcatatttttaatattgtaaattattcaaaattttataaaatttaaaattatgtataacttcaacatacgtaattataaaaaaaaaattaaactaaaatactctcttaaatgctaaatcaaataaaatgtctaccaaatataaatctttaaaaaagtgtattataaacttaccaaaaatatatatatcttggataaattttaatatttatgatcttaattattatacttattttgtccattgatgtgtccatctcattttgttgttttttttacttaaaaaaaaaaaaaaagaaatatcaccttcttaattaatttcactatgttgcaactgtactcagaatttgagagagacatatattttgtttttgtgagggaacaaaaaataaattaaatatgtgtaaaataatttaatcatcactctaaaactaatattatgtttttatacatatcacctttaaatacaaaggtactataaattccacaaaatatttactaaaaatccactatcaaaatatttagattaattttcatataccaaataaattaaaatgaattaataatttcttttcttttgtttttttggtcctatcctagagagtactcatgtccctttgttaatttgttttatttgtctaacgaggtttacttttttggttatcctcttataatatatgtttgagtccccctataatctctaattggatattctcccattttaccattcaatagtaataaaatcccaaacccaaataataagaaaaaagaagctacaattcaattaaataacaaattttatttaatttaaattgaaatatattaaaccggatattaatttatttattttttaagaaagagaaaataaaatttatattattaaatcaattggacaaagttctttacatgaagatataacttgagcaaaatctaatcaagtcatttataataataataaaaaaaaccctaacaataatcttaacaaaggatttaataaaaaccaaactcgcgtccaatcaccaaaaccatattaatctatattaaaataccattactgtaagaataaaactaacataaaataccattaaaactgagacaacaaatctcataatgagatataagaaagacttttttgtgtacgaacgactatatatcccatactcccatgtgaaaccaaagagagagagaaaacatgttattattatattaattattattagtaaatatatatttgtttttacataacccaaaatcaattaaaaatccttaagagggatgtggtcaccacgtggatgttcaacaaaagtagtctatactataataataataataataataataataataataaggatatgattttgtcccgtaatatactttcggaatgtattccgtggtatgggtctcaaggtacattaaat

SEQ ID NO: 239173 - DNA, 5831 bp, Cannabis indica
tatatatatatatattctcttgaaatgagaaagtattgtacctagaatgacatttattacttttccaaaattaattatttgaatacataaccagacattgagaaggcttgctcagaatagggaggcagctaggaaaagcagacttcggaaaaaggttagtttggctttgatacctatatattgatattattataattatgataattattccataaaattggaaaagataatgtcgtttcttcattattttggtacttattaattattgcttttgtcgttttcatctccaggcatatgtgcaacagttagagtccagtaggataaaactcactcagcttgaacaagaactacaaagagctagagcacaggtacacactcacattgtcacacacacacaattaatgaaatctataattttatataattatgaaatattcattcaaagaattaattgggtgttttatttattgattttacataatagggaatgtttttcaatggtggaactctagttggaggtgagcaaggccttccaattggtattaacaacactagtcaaggtaataattgattaatctctcatttattaataaatgttttatttaaaattataattgtggacttattaattaagtgatgattattaattagaagcggtggttttcgacatggaatatgggagatggcaagaggagcagcaccgtctgatgtgcgagcttagggcagcggtgcaagagcatttgcctgaaaatgagctaagaatatatgtggagaattgcttggcacattacgacctaatgatgaatctcaagggcatggtcgccaaatcagacgtatttcatcttgtttccggtatgtggaaaactccagccgaacgatgtttcatgtggattggtggatttcggccttctgagctcatcaaggtattacatcgtacacgttcttgttaattaatcttcggtttattttatatatgttatagataattagtcaataagaatggtcacatcaaaatgagattattaataagaatgggcgcagggggcacgttttaaatgtaagtattttgctataaaaagtaggatcaacaggtatggggaaatagtagtgggttctttacatatgtagagatagagataatttactaagaagtttattaatgcatggaggtgggtatgtatgtatgtatggctataactattgctatatggctatggctaagggagatatcgttgtgtttgtgtgaatgttattaagtgaaatgacaaaagtactatatcgctaaggtttccaaaataaggtgttgttaggtatttttccgataaagctattatctgttattgcaatttttgggttttgaaaaagagagagagaaagcaaattaagtagttacacggcactattattctctctctgtccttttcactatattttcatgttcatttgtttatatctttcttatttaatttattgttaacaaataagaaaaaattattattacatacaatcatacatatatatgtaaccataaccaaactgaattgagtaaagtcgtttaatattctgaaaagaacgttattttcatactttaaatattatttcaaacttttaaaaagatatttatatatatctattaaattgatagtgtggtttttcccttatgttagtgaaaatgtatatttttcagattattctgagtcaaatagagccattaacagagcaacaaatattgggcatatgtggattacaacagtcgacccaagagactgaagaagctctctctcaagggcttgagtctctgaaccagtcactttcggacacaataacctctgactccttaagctgccctcctaacatggccaactacatgggccagatggctatcgccatgaacaagctctctacgctcgaaggtttcgttagacaggtgcgtacacgttataatattttatacatagttatatatatatgtgtgtgccatgtgttattatgaatgatcataattatacataaaaatatttaagcatgtgcaattcattgttcataaacatctttttatctaattaaaaataaattacgtgaacaaaaaaatgtaatatggaattactagtaatacttagggagaataatcatgagagatgagaaactatacatttaggtccctatccatttgtggtcctccataatgatatctctctctgaaacgtgggacccacaaggaacaagaatctgttcctgtttgggttgggaaacctaccaccgatgccatgaactactccatgtctcactctcacgaggacccttttggtggttacatggaatctatatataatatttatatatatttatatatatataatatatgtatatgccagtgcccacacacactatcatacacatagtttatagacagaaatttatgtatctacccttgttttgtacgactgattaataacattggcgtcccattaacattattattagttagttgagaaaaagaacttaatatactatattatcataagtgcaaaccgattaattagtttaatttctttttcttgtcatttttgtataattctagatatgataatatttggaatgtacaataattaaatgtttttttctgactagatataactgaaaggtttacggattaagtatctagtcctagctaggagatttttataatttagtccagctatatagcatgcatgtagtttagctaactcttcctcgtatgatcatctctatcataagtccaccttagtttcatctagtttgtaatgatgacacacaagcataaaaattccgacacgtggcacaatcacatatagctggtcctcacaaatgtccaatattcaccaaggatggcctcttctagcccataacgtatgatgtcatagtgtcagctcgtaaccgtttgactaactaaggctgcttttcacactcttaaccacacatacatacattttttttaattaaaatatatatataacttcttaaatgtttttcaaaaaaaaaaaaaaattgacttactatcacagaaaaaatttcaatgacccgccgaataagaataatgcaactaactgcacgtgtctttgaacacgcaacttgatctttcttgttatatttagagaaaaagaaattaaccgttacttttatatcttttttgttatataggatagttatattatataaggtggtagaacgaggagttttagtttgaataatcagttaataaggcggaccttaatgaagatatagagacaaattatcattatatataatgtcaaatatataactgtggaaagactaatttaagtttaccactttatatacttgatttcaagttgactaatttatctcaatttcattatattatggtctccatatagtactacgtgttagatcataatttatattggatttatttgaatgtggattattagtcaaaatatttcaagttattccaagtgtgctatcatttcatagtttaaaatctctttttagtatgtatgccccgttttggtgtgaaaaatggtacaagtaaaacctaccccacgactaatttacaatttcattttgtactacttgacaatgaaaacattttgatgttaattatgtgtaaagtaatcttagctgagacgtttcattaattaattaacattaaagtctttccattatttattcaaactaagacccttggttcacattaattcctgtcctagtaatgaaataataattaaacagcaaataatttggtcatcgtgtgtgtgtgcactatattgacatatgtaaaattacatacatatatatatattgagattaatattttgtaattattacaggctgatcatctgaggcaccaaacgttgcaccggctacaccaactcctgactacccgccaagctgcgaggtgtttgctagcgattgccgagtactttcatcgtcttcgagcgcttagctctctctggctgactcgttctcgacaagaatgagtaatgatattgaaaaagaaaatgccgaaaccctaagccaattcaaagctttcatccatctctttttcttttattttgttctttcgttacataaatatatcattagttggcttatatatcgatcgctaatattatttagtatttaactttcttttcttttgttatattttcttttttcttttaatttcacacatatgatatcatgtatagtgctagacattaattataattaagtaacggttcaagaagtagactttaatcactctttcagtatttctctctccctctcaattaagattttaactctaactaccaagctttaacctataataaaattttggtaattaattgcatatgccttgagcaaccattaccaaagaatgtaggaaaaaacataacactgccaaaagaaagagaagcatggttatgaagactatggtatagttcctccaaatgaataggttttcattagttatctttcattcttggaaagtcgttcacttacgtaagccagtcttgaaaggctttcttgtccttccgaaaaaggtcttcaagatagctagccctcctccagaaatgagttctggatagctagttgttcctcctgggaaggaaattctgaatagtcgactccagctagctctatcctatccagaagctccttcagtgagtgcctttggtcagtgatctcgaagctcatatatgttcctggatgcactaaaactgacactgacgtggagacttcgctaaagaagagttgattaagttagttattcgctaactaacttaacaacattgattcttgtagccaccgactttaggatcttgattctaagcctataaatacaatccacacttaagcatttgcaagcagatgaacctcatacaattcagattgagattgagagctagagagagattgagattgaaaggtaagagattggatttagattttgtaagaagaatcttctgtagatgaagaagattcttgggtaaaagtgtgagagttgaaatactttgagagaactaaatagagaatctttatcgactgtattataccggttcttgttcaatcaataaagaggatttggtggtattctagaactgagtagagccataaattacatcgatctatcgaacttgaaccagtatatatcatggtgttatcttttgttgttttctaccttaatcgttttctggttttacatactctattcatcccaaatcctctaatgacgtaagctaggaatacgaccattccatagttttaaaagagttttggatatagacttagatgggacgacatttaggatgggccttggctggcatgggccttagttctaagtgggtatccagtttttgtcctcttgtgacttcggcaagagtttgattctataggcatataaaaccttatcttcatatgtggtttccttaaaaacattgtatgaagcttaatggtgagtctattatagtcgaatattcaacttaagacttcacatggctcggatcctgtaaggatctctgccttagccgtagctcggtacgtggcccttatagaagcaacgtctaggtcttttctggctattatacggctctagtagggccttgtcctcatgcatgtgaactgatctcatatccggcctcaaggctttcatgttcttgttttggccaataagccctctatttttgaacacgactattatttagccttaaacccatctatgacggacatataatcatcctatttgtcttcttatggccttgacaagtaagggtccgaatttactttgtcaagctgaagtatgcctgcacgacttagaggcaagtttagta

SEQ ID NO: 239174 - DNA, 1728 bp, Cannabis indica
ttatacaagaagtacatttacataaatgttttcccaccatgtgaggcacgtgcttgaggcacaaacaccttcttaagtgcaagtgtatcaatgtaaacacttacataaacattagccataagtatttgttgttcaatttttttctttcttgcattgagattgaagacccataaatataaaacagaaatattcgaaaccattaaaggccaagcaagaggtatcccatcagctcaaaactacattagttttctactcatacaactcgttccctccactcactcatatcggttaaataattatcaaaattatttgttcaagctagaataaggctatatatatacatatataatatcctgaagtaatttcaatcgtaaaagctcccatagtagcaatgaagaagagagactcaacaaggatggtgattgtgatcagcctggtgttggtgttgcttttcttcttcatcattttgcagataaatttcatcccaaattcgacgtttgattacttaaatttcactcaatattattcggtcaataactctactcttcaaggtacgcacacgacacatcaccgattatgctttaattttcttttgaaaagtctaccataatactttgccaactatgtgtagaggaattttctcaacttaattgctctttaatttcaaccacaatcgatcaataatcaaatcaatagactattctccttaaaattattaaataactgcttcgtagtggggttcaattaatctcttgtagactccatctccaaatatggacttttatcaaatcgagttctctctagctgtttatagtaaagtataaattaataattaatgttctattcatactattgatagaagcataaccaggttaaaattttaggaaacacgaataagctaactatggtctttgattatgttgagctgatcgtgcattatgttgtatgataacaaagaaatagatagtgatcatgataattggcaagtaggactcgtttcatatacatttatttaattaattattttttatctatttttggaacacgtagatttatttatttcaggtacgtaataccaagttcttaatgtttggtgattcaaaatcctagaaatattataccattttctcacatggattccctttatcgtgccaaatttgatataaagtatggcatattggtcaaatttggcacatacaaatcagttttatctttcaattgaatctataaccgctaattaatattgtttattgtaatacgtcaaaaaaatattgtttattttaatattgaaaagcttttactttacttcatttattatttattaatattatatactaataaataactcgcgctttgcgacagatattttaaaaaatatataaatttttagataaaataaattatactttttatttaatgataactaaattttaaaattatataaaattttaacattactaatttttttatagagtttatagaaggcgccacattattgccctatgttttatcctttatataggtatatgtgatattagcgataaaaccacttaacattatattttttaacatttagccataaaatcaattttttacggtaaaactacctaaattgcacttttgttttggtcattaccctttcgtccaaaagtctctattaactggcacggtggactgcccatgtatacacaggtgtacttgtatcatatttttagtggtccacataat

SEQ ID NO: 239175 - DNA, 5195 bp, Cannabis indica
ttgtaaatgggctttctctgctgctcgattattttcaacgctcgtagtaggatgctttgatcgacacccaatagcatggcggtgttgttttgagttgtcgttggtgcggcagcaatcgcagctatgttagctggaatcaccaccttaatactcgtagctggtgtgttaggtaggttgacaacatttgctaggttatttccattgtctgtgacttgatcgcccacttggggaccatggggctcatcgcaatttcagggcatttgagatcatgcccaaaaaactgcattaaggtgatcataaagatcacctctgtgaacatggtatctccgtcctcgtggtgcctctacggggctagacctggtataaacaccaggagaattactctgtgaggatgaagaataagatacagcatcatttacctcattttgcagttgggctctgctttgagggttgcgtcgctcgggatcctccttttgtgtcactcacggttagcatttcgtgcgacttgttccctttgcgtggggtagtttaagtcgagtcccttctatccaattcgttgttccctgcaagtgcaattattagttcgtcgcctagtatttgttaacttagggttatttgaacgcgtgtttggtactcaaggaggatgtcgggtcctgacccttctgttgaccttagcctgcaaagcctgcatttgctcttatagggtcgtataattggctatggtcagttgaatgattcatcagacactacaaccggtgtgataggtaggagctgtcctacagtggctttcggtgttgatgtttctcaaacatgaccagtggtttaaggaaataagttgaggggagtaacggtggtacgtcccactcctccattgatggtgtcgacaggtgttgtttcattacctaggtgtggaacattcagtgttctaacattgaaagaacccgtgttgttatctccattccactagtttccatcaattatgattttcctccaaaatcagtagtaaagtactttcctatagacagtgccaaatgttcttggaggaatttagacaacagcgaagaaaatattataataaaaatatgaacaagattatgcgagtattcaaactatggacacagaggcgtacgggaactataaataacacaaagagaatatagtggtttagtcagatcatagtctgcttagtcaattgttgcaagggtttttatgtccttgtccatttcatgttgaatcactcctttatatacaaagaaagtgtcctttgattacacagagattgattaaattatcaactcatttgtacattgaatataaacatttaaatcaattaaaacgtaaatacaataaatgaagaacagttttggctcaatttactaattacagcaatgtatgcgatctttatggtacgaaatgtttgttcatgtcctcgcataagcttgtatgctcaaaatgcatacaagactaatcgagtctaggatgtgtgcgtcctgttcgagtcacatatgcagacatcctgtaagaggtccataacttaggacatgcgagtccttatcgagttatcaagaacgttgggtcattcggagcaactcgctaagtagagaatcaatctttactacttcacaggaagacctttatagttctacaatatatctcagtatatgcgagtcttaaattcgatctttggtcctgcatggtgcgagacataagaatgcgactacactcttcagtcacatcatcccgctgagtctaatcaggtgaggtttacactcaagaggtctccttttgacatctctgctctccttgaggagagtgagtccacgtcatatttttattggagccttgtcttgagtttttaggtgaaaaacactataacactccccaaggagggtcagtcagtcaagtccccacatcaatagatccttctgtgcaagcatagttggaccaagtcacggacatgatcaaaggcaaagttggtccgaagccttcagaccttgaacttgatcggtcaaggggatcaccttcctcggtgtacataaatgccttgcttggctatgttcaaaatgatggcatggaagatgtattctaggcgagaagaccaacttgctatcattacaaatcaatctctagaaggaaattgttatgtgtggtgttgcatattcccagggacattgtcagagacggctcaacaatggtactttaaactcaccctaggaatgtttaactcttgggttgagttctcactagaattttacacaaaattcttatcctcgagactggtacaatcacagctagaagaccttgtcgaagttaaactataacaaggggaaactttgaaagtttacatccagaggtttatggatgaaggtaccaaagtcaaaggccgatatacaaccatactgcgggcatactcccattaagtgacttctagaaaaatatttagagaatctctaccaataacatgaaagagttccttaataaagctgaacactttatcaaactttaagaacccatacgacaagcccatgcagggcatgtcaacatcaggcagtcacggggcatccaacagcctcatggcatactaggcgcgtgtgcagacatcaacaactctgcccggatctctaatggaaaaagcaatagaagcaagcgtagcaccaaaaactctgcgtgaaacagtggaaaaaaggggaagtttaatacttctcccatgccacagaagaataaggagatgaagtacacctgcttcaccctcctaacaaagaagcccgaggccatcgtcatggctactcaaggaattgtcccataccgaaagccgttccgtatcagaaagaagatgggcaggagtaacatgtcaaagttctacagatatcacaatgactttggccatgacactaatgagtttaaagagggagattcaatacctcaaagtgcgtaacaacccccaccggcgtcgttatgtgcaagatgaccaaactcaggcagaaggtgcctagaatggagatccaatgcaacaacctgtggtaggaaactgaggggttatcattggcggaccccacattgcaggaaagaccaaaaaagctagggagtgttatgcttggacactctgtcaccagtccaaaagcgacatcctaactgtcaaagacaagtgctctaagcaacaaaatctcatagagcccacgatctccttcactgaagaagatgttgcttagttcagtttcctgcacaatgaacccctagtcattactatacaaatctagaacatgaccgtagaaagatgtatggttgacggcggagcctcctctgacattcttttcaaataaccatatgaaaagatggggatccaactcactgacctggtgccttataacaaagtgatgtatggcttctttatccaaggcattgcatatattgggtatatcagattaccccttacagttggagaaaatccaactaccataacattaatgacacagtttgtcaggattaacgttctctctactttcaacgccatgacaggccaaccgaccctcaacgacctaaaggcgataacatctacctacctcctatgcctcaaatttccatttaggcatggggtggaatgcgtgaggatagaccaacagtctacccatcactgctacaacctggccctgtccatggcaaaaaaaagagaagatgcccaccaaaagcccaaaaaatgagcctagcaaggggaaatgaagtctagcccaaggcagggacactggcatagatcctcgctttagggatcctgcaggaagcttcgagcctgtagaagagttggaaaagtggaggttgatcccactcttttgacaagaagactgtttattggaaaaggctttgctccaaaaattaaatcaatattgataacatttctaagggcaaaacaagacctttttgcatggtcacatggagatatggttggaatcgacccctccgtgatgacccattcactcaaaattaatccaagcatctggcctatacagtaaaaaaaggcagttgttggacaaagagctcgtccaagcgctcaaagaaaaggttgaacgataagagcccatgacttcataacatacgcattctacccacaatgtgtattcaacctggtactggtgcctaaacccaacaagaagtggagagtatgcatcgacttcataaacctgaataaagcatgtccaaaagactactttccactcccccgaattgaccagcttgtagatgccacagcaggccatgaaatcttgagtttcatggacgcgtattcaggttataatcagataaagatgcatccaccagatcaagagcacactagcttcatgacaaaccaaggccatactactacaaagtcataaccttcaggttgaaaaatgcaggggccacgtatgaaaggctggtgaacatgatgttaacagatctcatcgaccacaacatggaggtgtatgtggacgacatgcttgttaagtccaaaatggctggggacacgtggaggacttatgcaagtgctttaaaatccttcacatctacaacatgaagctcaacggcctcaaatgctcttttcgtgtaagatcaggaaaattcattggcttcatagtcaaggccaggggaatagaagaaaacctagacaagatccaagcgctttttgatatgaagtcgcccacaactattaaggaagtaaaagacctagcaggacacattgctacattaagcgaatttgtgtccaagtctacagacgaatgtgtatccttctcaacattcttagaggcaacaaaaaatttgagtagacagaggaatgtgatgtgagctccaagcttgagcttcaaagctcaaagcttggtaacaccacaaccagccatcacaacctactaaattcaacctaaaacaacatatgtaacatccagaagccaaactcaaacacaaagaatgatcacagcatcaaaaacaccattttaccattaaaatccaaagttttgagtttaaagctttacacatgattaattcccactaactaacaacaaaaccagcttgaatccactcaattaaacatatctaagcttctgaaaacaacaacaacaacaactaacagcaaccacaacaccaaaatcaccaagcatacaacaattttcatccttaaaattcaagaacacaacaagaaatttaaagaactataccttggcttgagatca

SEQ ID NO: 239176 - DNA, 2927 bp, Cannabis indica
aaatcttaaaaaaattagaaatttaataaatatataaaattatttagaaaaatagaaaaactaaaaaaatattatgtctagttaaacaaatctagattttttgagaaaaagatagactcaaacttgtatacaaactagatgaatctagactgatcaataatgtgtggaaataaatattagtttgagtttctatctagatttttttattaagagttagtcccacattgctaatgtgtggaaattaattgtgatatataagatgaatgagttactcctcccattgccaattggttttgagatggaaccccattcatcttatctcccaaattctaacatggtatcagagctacttgtgatctgttgtgagcccaaattgccatcggtccaaaaagtcgtttgtgatccgttgtgagccaaagtgttctcggtccaaacagatacttctgttgtttcccctttaacctccattgtgtgccaatttccagtgttggtgtctttgacctatttcaaaaatccacaaatttcccgacgtgtacacccacaaatttctcgatatttggccttgtgggattctttcaaatgtcacattcggtcttgtggtctcttaaatgtcgtttgttatacccaaactttccatgccaaaacgtgaggagggtgtattaagatttagtctcacattgctaatgtgtggaaataaattgtgatatataagatgaatggaatactcctccaattgtcaattgattttgagatggaactcattcatcttatctcccaaattttaacaaacatactatcaagttaccaaaatattcactgcttttcaagtaaagcacgcgagccgatccagacacgcatgttgcatatgaacttggcaaaaaaatgagcttagatatggcaaagtagagggtataacccttaaatgtcaaggcatattcatcaggatgtgtggaaagaaaatttgcgtattaataatttaaaaataaaataaaataaaatgatcttgcttggtgtgttagactgcaagttaagcaagctactcagcccatacactaatgtctgagcagttctgagggtctttttcaataaagaaaagaaagacagaaaggtgaaaattttgtcccaacaccaagtttccttttcctaacctaacccttccttctttcattgggttttttctcatttcgatttcgaccgttagcttggaagatgaccaagcaacaagaaccacgacataggtcccacatttaatcaagtgcttcgagatcatcagtagtacgttgtggtaattaatgtacttttgttgattagtgatatagttatttcgtctttttatgtttaatcctatctcaacaaacctcaaaagggatgttaagaaactcattaaaactttaattgttagatctgaggcgtaaattttacttttatttctgtgtagttgttgtaataataaataaagactttctaactacaaaaagcacctcatcactcttttgatataaacaattaatctatcattttttaatgcccccattccaattaatggtggaaaacttgctgtacagccatgtattcgacgtgttacgtccaaccattgaatttgtctttggcatctcccaaagattttgaacaaatctgaagcaattcttcatggttggcaagtcaatttaattacagtaatccattatatatattttttaattcttacacaagtaataatcagctttttggccatatttctttctttcaactgcagaagtatagctttggatttgatttttctaataagtttcatatacacgagagatctcaatttggtttcggtgcctcctttatgttattctcaccacactaaataattaccttaactttttcaacccatgtggagcttgagcatatataacatgttctgccctcctttacatcacaacattatattcccccatcagtctcctttttattctcaataatctttctgttcccttttgttgggtcaatctcataagtaatcccccacccctttattaacaccataattatgcctaatttggactatcttagtgtgcaatcgccgagttcttaatgtactcacttaagtaactttttagaacatacaaattatggtttcatagagaaaaggttattattgaaaattgcataattattacttttgaccttattatgtgtccactaccaaatgggtatagcttagcttaatccaaatatattatatttattgggaaaaaaatcttgcaaaacaataatgaattgaaaagctgttagtctctacctttgttttgtggctcaaacctccaagttaaatataaaagcgatgcatagaggagacataacatgtgcaaacgctgcaattcttcatcatgaccttcatctttaagtgggttttctggattatgacccaaagtgggtttagttcctcgttagattttaatatttattacttgattttattttctagttaattgtcaaaaaattctgataattaatgtgacagggtgataaaatatctcacgtataaatatagggttttggtctctgaaatcttcactcattctgtaaaaacaataaattttatctaaagagagttgagagagtgagaagcccgatttctaatattgaatctatcgctaggattaaagctcaaatatcaatggctggaggtatttcggtcctttcattgcatgtacgattttgatacatctatagttattccgctttatatatcgttcatatatggtttattttcatataatattaagtctaacagttggtattagagtcattttatctctaccttaatttatgtttgagtttttatatgtatatataagttcacatgatcggtttattttggtttatgtccgattgtgatttcttttctttttaatctttttgattcatgttgtgtt

SEQ ID NO: 239177 - DNA, 3892 bp, Cannabis indica
tttttttttttttgttgaaataatgtattagtgaaccaattcatattgggccataatgagaaattgaaagcccatttgagaagataaaatagccatcgtcctcgttatcatataactcataatccaattccaagctcttctccaatggcttccatttggtgccactcactatcactcctccccattcacaaatcatcatcatcatcattatctaatcccaccttagtttttccatccctcgccaaaatttctaaacccaactcattttctcgacctcttatcaagttatgcagctccggtaacggtgccacgaatccaacgacgtcctcttccactgtcccagacgaagaagaagctcagaatttacccaccgagttgtccatgagtatagataatcttctcagcttcttcaatatcaatttgggtcattggaatggttctttctttgtaagcatcactctttctttttattaccaaagtcaaaataagtaattacattttatttcaaaatgaatgcaagctgtgtctgaatataaattcttaatttgttggttggtgaaattgtaaccatttacaactaataattttagggtgcaaattattacatagtatagtaattataatattttaaaatagatgtgtgtttagatataaggtgataattactcatgaaattaattcttaattagtgtaattatacttaattctgattaaatacgaagcattagtaggaagaagtggatagtataattgagacttttcaattatttctaattacacagtttaaaataattacgtggctagataaacaggtaaaactgtgtaattaccttcaattacacttaattccaatttcctcttggctttccaaatgcaggcttagtagttttttagtaattacgtagtataattacatccaattcccattgacacgagtggtaatttacacctctaattactttcaattacatcattacaatgcaattaaatagtcatacaaatacataaaactgtataattatcttcaattacatccaattccaattccctcgtgtcttttcaaatgctccctaaatgatgagtttgtattgtttatttacgatttggtctagtcttaatctgtttggcagcctagaaaagaaaaagaaaatccaacttgggttatcctagttttgggttaaggcattgtggtttatagttttggtttgaatggtctgaaaggttctgaatattttgctaaatgcccctttagtaccatgactgcattttctttaaattacatattttcactctggtccttgtgttgaatgtgataaagttctgttttttatttgttctttttcagcaatttgatgctgggggaaaactactgcataaattggatactaagcttgcagttagctcttatggggaggatgacctcgccagccttattcaaacgtaagattataaaggagaaaccataagtattagttattgtgtatttcatataatgagcttactattgtcacattatctatagattatacattaaacaacccccatcaacagtctctgggtctgaggatgatgatgatgagctggaatgggcagaatacaagataaaagaaactaatatgtttactgtggataaatatcaacaggtggggttttccaacactttagagatgtagatttcactttataattgggtgaatttccatggagatacatagcttatagctttgttttgtttgtgtggtctcttgttttctgttgaatatccattgtaattagcctgcagattggctactttcccaatgagaaagcattttctctgaggtaccaaactgctggaatgctagaaaccgtgcttcgacaaggggttctaggggaagatgatattggcgaagaatcgcctaagtaagtggtacttagctagctagaagaatgttctcaagcattggcttctttccatttcacacttttattgaatgttttcttgccatgtagaaatctgaagcttccttcccgtcgcccttccatagtatgtgaaagttgtctgtattcattggagaaagacatgagagcaagagcattccatatcatggacccgaaaggtgttgtagaaatgcttcttattttcctcgaggaaagaggcgaagggttgctcgatcatccttcaattagtcatactacggcggtaaagtcacatgctgcaactaattagctatgattctgattatgttgttagaataatcttccccagttctcttttctggtttcaggacaacacagacagggtttcaccatttcttggtaggtggaaaggtcattccttaacaaagcgaagtggcgtttatggagccacaattgctgaagctgacacagtagcatcacttgaaatggatgacaagggtaaacttattcaggtagtcactccaaacaagttagaacatttgcctaataacattttcgggtttaatttcctttttctaatcttatcttacactaaacaattttcagaatatggcttcaacatctgctgggggcgatgtaaccacatcggtaccatggaccggtgtcatgcttaacaatatggttatcttcgagggaggttaccaaatcacgctgttgcccggtggaatgtacatggggagcccttgtgatgtgtcgaggagcgttgcagagtccaagtcattccatttggagttctgttggctcgaatcgcctggtaagagacagaggttagttcgaacttacgatgttgaaggcttggcagtttcatctacttacttttatgagaccaaaatttgacattttataagaacagaaaatagactgaatttggttttgtacttgtgtaatcattggaagaagttgcttgcttatgatgatcattgccaattttcatagatggttaaatagttacaatttcttgttaaatggactacattgcaaatttgtgatgaactcagggagtcgactgctgataaaactacttgaaggaccatttgatgttcccataaatttgatgaacaaccatgctataattagttttgaagattatattgaaatcattgatttttaaaattgtaattttccaatatcactttgtcttattgtaattcgctaataatatcactgctcatgctcttgctcaactagctatctctctcgagtcatcttgtgtttggtggtcgggtctatctagtcgtcttgagtagtcgcctcgagtcattaaaaagaaaataaaaaaaaattgtaatcaaggtatgataaagcatgtgatgttagcactaacgagaagaaaaaagaagagacttattatataaaagaacattgttataagatatcagtggtgtctaatactatttaaaagtgacattttacgattggttagcgataatttataaaattattactttatattttacggaactcgataattaattataaaaatagtgatataaagaatgctgagatattttttagcatctctttatataaaattataaatcacttctagaagaccataggcaaaagtgagctatagacgttagactacttattaagagtccataggcaccaactttaggaaggaaaaaaaaattcataggcatcaagacttttattttgactactttttttaatggaacaaaataaaaaaagttaagacatattgtgcaagggtagcatatattttattaattattattattattatttatttattattaataggagaaaagttaaaaaaaaaaacaatttgtttcatataaactaagctaattaggattttttttctccaaatttcgatatgtattacattatatctttcgaacttttaagtcgttaaaaattcttcatgaactattcttcttgttagattgaagagtttctgtcgttaaaa

SEQ ID NO: 239178 - DNA, 2118 bp, Cannabis indica
tgatcttcattccacacatcatccaaaacaatcaagaatctctttccttgaaggatgtctcaaagtcgcttctgcaaattaaacattaccacccgaatcatgtgtgtgtcgaacatcttctctccaaatcttccatcctcaaacaaactcaacaatcccaaacctatatctaataacttcaattcaaatgagatgtgatgataatgaggatagcataaatataataagaaccattgcagagttctcaacaagtttcttcaatgccaaaactgaaatgctaactaccacctgaaatgacacatttttaattaaataaataataagagaaacccctaactatttacaacatatcatatcagtattgtgttagacattttaaagtgtttaacagctatgcttgtggcagaaattttggaattggaagacaaatgtgggataaataaaggtaaaaaatttcacctactaaatgttaatatagtttggtaaaagattaattaaaagatagaaaatagaaaattgcgactattatgtgtactgtgagtccataattttatttataattttgctttatttcagctttgttttatattatagaagctagctaaataaatatattgagtaagagtagtcttcccaatataaatacaatattaattggtttcctttttttgaaagagaatttctattccaaccaaacaccaataaggaatacaagaaccagccttggccttaactaaggctgttaattaacagccaaatatattatatgcaatgcaaacaaacagagccaaaaggcataacacaacacagtgcagcccttcaaatatagccaaagcttccaatatatatatatatatataggagtagcacaaaacatggaagaccattcaaatgcttattagtacaatacacaaatttgaaaggaagatgccaacaaatcatcccagcttcaacaaccagattaacatgatgtccacccattacatcccaccagcacaacccaaactcactcactttcgctgtcaacaatgcagaatagtttcagctgccaaattgcacaagggacaatgatcaaccccaactagctcgccatacaaaattcatctgtgttgttcttagaaggtgattcaagatttcctgtattatatgaaacgaaatatgccataattagaattgtttgagctccattggatgttttaattgtaaactacttttgtttgagttttatttacctgttgttttcattctcttttacaaatgcagataacatgaagattctatctcattgattttctgcaacacattccaaaaatattattgtcaagtacttaatcattcatttacaatattaattgtttcaacagacacccactacaatcaactatacatacatacatacaaagatgtaaaatcacataccttaattagttgcaacggaagtacacaaattgaaacattctttcattttctagatcttcatcttccttctccctcatctccaatatgatctaatattcacatgtggaatatgagatatcttgtgccaatcctccccgacttccttctcgcatctctgctccagttttgggcactgcacaatagacaatttcttcaggttggtcagcctttgcatgctcataggaatacattccaaatcccaacaacccttaatccctaactctttaagagttgtaagatttccaagccaatcaggcaacgacgcaagctctgagatatatgatatttccaaatattcaagtgaggagaggtgctgcaagccctcgggcagcacaggcaacctttgagaagctatagataggtgttggagagatatgagttgattaggaccacttggaaacccttcttcaattgctggacaattatcgatgccaattctccgtaatgaacaatctctgaacattccctctggtaggcacttgagtttaaaacatatctgatttctaaggactgtagagcaataaggccattgaggaagtcagacggcaactcctgaatccgccaaaaatcccgaattgtaagttgttgtagactagtgagattatgtagcagtattttggggaagggaagtcaaatcacaatgatgcatgtcaagactca

SEQ ID NO: 239179 - DNA, 1355 bp, Cannabis indica
caatgtagtttcacatatatacttcttcacatttatctaaaatcagaaagacctccaaacctttccttcttcaattttttgaaccccagaatctttgttgcaaagtccatggaccctatcaccaacacggataattccagaagaaactcgtccagttaatatccgtccaagataaaagtccttttccatcatagagacctaatatgaaattttatgagcaccgtcaaattcaatgatgccaactgactagaatataatggatgacaacatcaggaaacaaataatacaactttttgcagcaaattaatttattttttataaattacttgcttgcaacgataaaatacaagatccaaatacatataagagtagctgagtttcaagtgatatattacatcaatgtacattaccctaaaataaattaatgattttaagaaagtacattagaaaaacacatttgaaaacaataatgaaacaaaatgacatctaaataaatatgtttctcaagaagtcatataaacattataatatacaaaccatcatttggaaaggcgcatcagtatctgcagtaggtggacaaacatgctttatgatggcatcaagcaactgagacatatttctcgcatcaggaagagggtctttggtgaaggtggtggaagcccatccttctttagcagaggcatatagaacgggaaagtctagctgctcctctaaataaaaaataaaagatcattaatcaaaattattactaagtgattaacatcaacaaaatcaaaaagtaggttagcataagaattttttctctactgatataatttccgcacctgtagcaccaagattggcaaaaagatcaaataccaagctctccacctcattgcatgtctcctcagaaactgcatttatagtaaccacaaacatggacttaagaaaaaggataataataaaaaataattataactgtcaaataaacagggcttttaccaggaagaacaaatgggaaacattttgtgcactgaaaaagcatgaaaattttgcaatcttgagcaggatgttactaagctatataatatacaaggcatggagatataaagcatacatgtgtttgccaaagatatggaagaatcattacaccaatcacaataatcatgcatgtgcacaaggtttctatcatacaaacctgcaggccggtctactttgttaaggagaagaatagggcgcaggccatacttcaaagcttttgcaagtcaaattttgtctgtgcaagtggaccctcaccagcatcaactctaaaactgcaccttcaaccatacccacaactcgctcaacctgtacattgcatattaacaatgaaaacc

SEQ ID NO: 239180 - DNA, 1654 bp, Cannabis indica
aatatatatattatattttcaagatgcttttgagtattattcccacttgtgaattttcttagaaattaacaaatttgaataaacaatgaaatcagacatatggaacctttttttttccactttttttttatatatatatattttttttaaattaaaaaaaaatattctctgtgaaagagagagagaaattatctgttagtataaatatttatttatttttatatattttttggtcctaagctgcttccaaaatagtagcacaaaaagtttggttgtctattaatgagaatctataataccccaaataatgctcaatttagaaaaatatactcatcaccaatatatatgatctttcgatcaaatttcttcctttaatataatttagctttttttaaaaaaaataataaataaatgaggggaaataaaatttggctttgcttttattgctttacatccaaaatcaacttttagaaaaagttgtattaatctattattcatctcactttattattttacactttttgaaaattgcaacattggatgggtgcagatgatcatgatataaatattgatcatagtactattgctaaaaaaactttattgtctatatcatcatgaaatattttctactttttggatgagataattaatacttttatttttaatttttttttttttaaaaaagattgaaaagaaaaggacttttattacttacagttttttctgttataattaataatgtaatgcaaaatctatggtgttttgtttttatcataatcatcattattgtgcatggtcatatatatatttttactcttgaattatggcttatatattattgttctttcgaactttttaactcgttaaaaataatttttaaattatttatagttttgtaaattgtgataaatatttataaagtaattaagaataatcaataaagaagagatgaaaaaaaaaattagagtttcattcaactataaaatcaaaagtaaaagaatacaactaattaataagaaaacttaatttatatatgcaactataattaaactaaaacaaaaaagatactaaaataaccctaattaggatttcattcaatatcatgatgttgtaaattttctaaggtaagctaaaacttttaaacgagaaatatgaccaaaacgagagtgccacaaataaaaattagaagacaaatgagacaaacgaaaaaaaaaaaagacaaatcaacactaagagttgtatatagtaatctcagttcatccaaaatatataatcctcctgcttacgaccgattttaatcagcttctgagactgtggatcatccacatgaaatgaagtagaagaaaaaaaatactgaataactataatcacacaattgaatgggagtaccattagcactcatgacaggcacaaatgatatgtgactcaaataaataaaagatgcaaaatgcagagacatatagtgtgaagcaccagagtccaaaatccatgtggaagctgagtagcaagaaacttttgaaactattctgacagagtagcgaaattttaagagccagatgaaggaacagctgcagcagtactaaattgtggaggtcgaatttaaactgtgattggttacccacataaggaggcttggactaatatatttattttg

SEQ ID NO: 239181 - DNA, 4113 bp, Cannabis indica
gacaaaaaaaaaacctaattaatccaaatgcccgacagtatgagtatatctgtaaacggccaatctcaagtccctccaggcttcagattccatccaactgaggaagaacttttgcagtactacttgaagaagaaggtctccaatcagagtatcgatctcgacgttattcgcgatgtcgatctcaataagctcgagccgtgggatatccaaggtatatttatgtacttaattatattcttacacactcgatgtgggactatatacatatattaattaattggtgttgcagagaggtgtaaaataggaacaactccacaaaacgattgggacttctttagccataaagacaagaagtatccgacgggaacgcggactaatcgggcgacagcggccggtttctggaaagccacggggcgtgacaaggtgatttacagcaactccaaaaggattggtatgaggaagactctagtcttttacaaaggcagagctcctcatggactcaagtccgattggattatgcacgaatacagactcgatgataacactattactactacaaacgatatcatcattaccaataatatacatgtaagtacacacaccaccaatattttacatttatataaattaattacttaattatattgacatttttgtttttaataattgtgtagggtgagaataattctccggaagagggatgggtggtttgtcgtatattcaagaagaaaaatcatcatcagaaaagtagtgtagatcatcagagtactagtagtccagtggttaacaccgtactaatggaatcaacggaggagatgacggtgtttgattcttcatcaatcggtgacgagggggctttggagcaaatatttcagtacatgggaaagactggtactacttgcaaggaagaagacgcaggtacagaaaacgacaccaatgatgacacaaacgacaactcaaaaaactgcagatttcttccaatcaacaacgacactactacttcatcattattcttgaagcttccaagcctggagagcccaaattctagccaaaacggttatcaccaacccatcaataataataataacaatggcgacattattagtccaaattttgggtttatgaataatcatcatcagatgatgttggactcgaatctaatgatcatatccaactgggcaactcttgatcggctagtggcttgccagttaaatggtcagactgatcaggcttccatggattattgtactgataataatcagaatcatcatcatcatatgcaagtacctccagtgaccactaccaccgtccgatcatcttcatcaagtaataagccccaagctgaatacaacaacgaaattgggctatggagtagtacttttgccaagtcatcatcatcatcattgttgccgtccgaaccaatatgccacgtgtccaatgcttcattataacataacaaacccaactaataattaataatgagaagaattatatattttataattttattttatatatatattatgtgtcatgtagttgttcgaagtcatatagagaaacataattaccaggcagttatatatgtgtaacgatcgcaattaatattaattacatttacatggtgtttagaattaaacaactaatttataatataaaaaaaagcaggtgataattaagaaagaaagctttagatgggatggcattgtcaaccaaatttattattattatttttttctccggttaatcacgatgtctaccattattttttttccatctagaagatctagtaagttaattattatggccagggtactggaaatcataacatctttctcttactaaaataataattttaattatactttattgatattttgtaattattctaatatatttcatataatcagatcagttgatattaggaacaataataatagtaataatcaattatatatctttccgccatgtggcttgtctgttaattgtttaaggatagtacagagaccatgtatggttagctctctaatcctattggtccacaaaaagaggcactgtataaatatatatacatatttatatatatacgtttagggctgatgtaatgtcattatcgaatataggtctccttaattatatgaatcaatacacagcaatattaattcagaataaaatcccgattatgttaattaatttttgtttattataacttttacatgttatatgtatttatatatatctatgatgaccagccgcaggtgacttaccctacttcaaaacaagtcaaaagagaatcaaggagacttttttattttcagtttttatagaaaaagaaaaaaaatgatcttaatagtctactcatcagcgaagggaaaagcatttgcgcactcgctaagttgaccagatggacgagaagtgccagtacgtatagtacttgaatggttcacatataaattaaagcctctcaatattatctttttacgtatatatatatattatttattaattgacaaaatattttttctgtcacctttttttttgtcttttggaggggtatactagtgagcagtagaaaaatatcttcttttgattcacatgcattgtactatattataagagataattgtagatgacaagtttggtacatatatatatactggacatagtccacaccaatcggtcaaatcactttattgtagtctatataatatgacagaaaattatacgtaagcaacagttataaaagaaaaatgagtatgtatatataatcattacttcgttatcgtgctttatctggattgattttcttcctctaccagctgtatatatatatgtgttgagtttattaccgaattattttcagaaaagtttagttatactttccttgtttaatgatcatcctttagatcgtcagtaagaaataatatcaaaattaatggccgactaaggatataaataatagtataagtatccaattttaagttttaagtttgtaacgtgtataaatacaatatttataaaacaataagttttttctaattcgttaatacagattagattatgttttgaatttattaaaaaaatatttaatcggggtgttcataaaatagtcggtccaatccaatctacacgattcaatctaatccaactcgagtgcggatacatgcacttgtgtagattagattgaattgaaaaattttaaatccgcacttgtgcggattgaatgttaattgacatgtaaaagtaactgattcaatcaaattcacatatatttataaaaaaaattaaaaaattatatatacaaataatattttcatgtaaagaaatagtaatttttttttttgataattcagaaattcattgcaccacaatcaaatttttacaacctaaaagcaccttaaaataaaaggccttgaatatttttctattcttaaaaaaaaaactatacaactttataaactttaaagaaatagtaatttaaaaagtctaatacatataatacaattatattttaaaatttaatagatcaaatgtataatccattcttataggtataaagtttctctacatacaatttaaaacaaaattaaacatttctttatatatatgattttttattcctttaaatttattatctgttattttatttattttaatttattattggagacataaaataataataatttattttattttgttgctagttatgtaaaaaaaatattaaataatttaatattaaaaagtaactaatccaaaataactgatctaatccgtacttttacggatcggattagattgaatttgagctattgtgcggatttgattgaatcaaaaaaaatggaatccgcacttagtgcggatcggatacgctatgaacaaaatagtacagattggattagatgaacactcattttaaaagtataattgatactacatatttctatctatacgcaatatgtatactatgtacatgaatctgattcacatagtgtcaaattaaaaaattaaaaaaaaatcttagtgttgtattttaaaaaaagagaaattgcaatgtatacagtatttttcattatttttttttttactttacgtttttttttattttttactaaa

SEQ ID NO: 239182 - DNA, 2257 bp, Cannabis indica
aataactgcttgcagctcagaattgaatccatctggaaaaagaatattagttatccaaccaacatcaaaagcaaataaaagcagacaaattactgaaatgaagatatcatttatagcattaacacagagattggattagaaatacttggaaacatgcctactgaaactcacacgatgaacaatctcttaatgacattcgaatcctattacgagcatatagaatactttgatttgtagggtcctccacccaagtttgttgacctccttgacatatctgcaacagatataagataaatagcatgatgatgtttatctcaaaatcaataacagtgcataaaaaaataagaaagaaatatggagacactcgtgtaaaaaccttgtacatgtcttccttggaaaaatccaggagcggtcgcacaagaagaatgccataatcttttgcatcggaagaatgagtgtatgaggagaaaatttgagaaatgaacggcattccagcaagtccaagcacactgctgtggcgtgatagtctaagaacaaataattcagcctgcatgcatctcagaaaccactaattctaacattttcgaagcctccaaaataaatagaaaaggtcaaaactaaaacaatgatacacctaaattttggataaataatcaattctagacagagattttaactaaagggatgctggacaaaacctggtcatccatatgatgtgcgataagtaacgcactgatctggttctggatgcagactttctgaaaatgttggtacctgaaatccaaacccccttctaaagagtcataattcactcttcagcctaacacagacaagtatactacaccataggaagcttagtgtaaaacttttcttcgaaaaagactgtcttaaagaaaatctctaacattttctcatttataaaacacaaaaacaagctctttcaatcaaccccagagagtaaaataaaagtaatcacctcatgtcacgagctgcttcctgcaagtgaccttgtttaggacgaccatcagaccactcacaatggacaatctcacatctgattcctacacaaagtgcatgtaagccatctatatatattctagaaccaaaacaacaaatcaacacaattgaatgtacccattgtagagactcgactagaaacaatgtttgcctcctctttgctctcagcacgcaggctgtgatcgatgattatagccaaaagcccgtcaataaagccatcagaatctcggtttgtactaaggccattggtcttccaatgggcagacaaaacacacaatgccatactatcaggtcctccagagactcccatagctataaaccaaaaaaagagtcaatctaagctaagttacttgaaagaacagtaacaatgaaaaacaaacgacataaacaaaagcttcagtctttgtcatagaataatcagttatgtagataattatcagagatatccaaaaatttaaacttatatattaagaagaataagctctaatcgaccggattagtaataaactagcaaagtttagcgggaaccaaagggaagtaaaggaagatgaaaaatgatttaccgaccgatgcgatggtggggtttgaggccggccaaggtcattcgtctagaaaaagcttggtgatacttggtcatgtcgatagtctcttgggtggtgaaagaagaagaacagcggagagggagatgataaagaaatgggatagtgcgtactgaaagaggtagagtggagatggaagaaaagagtggattggcagcaaatgccatggtttctattcggaacgggataattagccctcgcgccattactcttcactccactccctcagcagtcggcttcaggtctcacccgcccaccaccctcatcctatatttgctaaataaactaacaaggttttcatctcctaagttcttagtttacacttaagtggccttcgttgaggtaatgaaaactttgcgaatgtattttaaaggtggatatggacggcaaaaacacttgaattttatatttttttttaatatttaattataaaaattgaaattttgacattagaacttattgaattcaagttttgttttgcccattacacttttgtccaaaaatttaagttatgtggcacaattgactgtccacgtgtacacgtggtaaatttttagtggtctacgtaatattaattattaaaaaaataaaaatcatttaaaaataaataaaattaatatacaaattaacactttatttat

SEQ ID NO: 239183 - DNA, 1757 bp, Cannabis indica
tatatatataaaaaaaacatatttgaaaagattataaatattattagcaatgttaacatatgtgaaatattggggtaaaacaaaaaaaaaatacttcacaatcatattttataaaaaaaaataactaaaattatattaagggtaaatattatttttgattatgtgttttgcaaaagaaattgattagataatctataaaaattagaccttatattttttaaaataatactaaataataccattacaataaatgatcaacgaagctcgtgaatatcagaaaaaagagacaagatatcaaatgaaatatttccaaattctccaaacaatggagttttattcatcaaggctatacatattctctctgacaattcgagcccacctccaactgcgaaaaacttaggcgagaacaaagcatgagcccctgaaaaccatcccctcaaccactcacaccgtcaaagacacacttaaaaacttaaaagaacaacaactaaggataacccacttaggatcttacgatcttacgggacttaagccctcactaacaaaaacatatttacaaatatacattataaattctctttaattttcttaaatattcacaaaatatcattcaaaataaaattttacaataattaagtcccacaaaatataatatttttaaaattagacaaaaataacttttatacttattttaagctctcactaaataaaaattttaagtctgtcactaatgccagtccacactttagaaaataacatttttttcaaaatggtataggaatgtgtttgattttttttaaagaaaaaaaaataataattaattagggtatagattaattgaattaaaaaggctaaaatggtagtgcttatgtcaacattagacactactatacactacacacactagtcacgtagtaataccaaagacatagaatctgcctccataattgactcaccaattatactttttttttctttttttattttaattataaaaaatttattacccctcaattcaattaatgttactatttatatacacataatatattccaacatttaaaaatttacaattttagtaagaaaactgtacaaatagttaccaaatcctttcaaactcttataaaaatatattgcaataagccaaaatttttgttttatctataaaaaaggaagatggaggtgccacttgtacttaaataattttaaaaaggaaattaatttaaatacttcaaaatatattgcaatttttgtaaaaaccataaaaattataaaaagaattctatttacacctcacaaaatgataaatacaatctcaatattcaaaaatattaagctcaaaataattttttaaaaaaccacttaatctttttttttttaaaaaaaaattcatacatcattttttattaatttcaatatgtattttaattttttttctaataaaatttaatgtaatatttttgttattaatatttaaaatataattatttttttatatgtatattctttaagaatataaattggaagaaaaaaataaatataattaaagatatattttatgtaaaataaaaattattaaaatagactatattttatatattttttcagttacaaataaaactcctctttaaaaaaaaaaattattctacataaaatatatatatatatttgattatgttagtttttttatttattttttttaatttaaatttttaaaaaatatacttgtcaaacaaaaataaattatatttcaaata

SEQ ID NO: 239184 - DNA, 833 bp, Cannabis indica
ttttttttttttttgctgaaacacaacactttcacttatgtgaattaagcaataatagtggattagacgcatgtgtgagctgtgtgcacgtatgtggacttgtgcatcatattatttttaactatgagcaagttcttaacatgaaaaagttgtaacaaagaatcccaaattggtttcattacataataatgtggtccaatttttttttttattattatttattaatgttactgttgttatcattattacaagagactttttttaatcatattattataagagacttttatatatgcctttggttccaacatatacgttgttaattacaacttacaagacagagatcaataaagggtaaactcatttaataaattgttgagaatattatataataaaaaatcaagttgtaattgtccaaaattataggcaaacccacatttattaatatcgaaacgcatgcctccaaaggaatattggttggtcccactagttcccaactttcgtcacccactataaatttttatatataaaaagaatattagtggttaaactacttgaatttttcatttgtaacagttaatcacaaaaattgaaattttagcgccataactatttaaaccctagttttgctttgctctgtacccttccgtacaaaaatcacagttaagtgccacggtggactgtccgacgtgtacacacttgtacacgtagtaaatttttagtggtccacgtaatattaatttctaaaatattataaaatttaacttaaaaattataaaaattacaaatatatatataaaaaaatattttattttactgttctctttttcttt

SEQ ID NO: 239185 - DNA, 5034 bp, Cannabis indica
aagttcaaaggaggattagtggttcagaagatatggaactcattggttggggagattctcaagatagatcaagattgcacgagggagtagtgatgaaaaggtagagacaactgggaagagagcttggtcgaggaggttgatcgagaggattttctaacaaattctcagcaacaatggaagcatttcatggaaggtaagtctttctttcgtgattctaaactggcatataatgaacccattcttaaagatgggttaaaaattgctcaagttgatattgatgaggttcaagaacatgaatactgtatgagtggaagagttctctcatatgtaacaactccctaagaccaatgatcaagaaaactaatgagattttgtatggaaaatgcccaatgaaggtatttctaagatcacttatgggaaaataagacatagtatacgagcgctatgtatgttacatgagaattcacaaaatttaatggtacatgagagccatgtgtgtcacatacaccttggtatatgggagccaaattttacccttgtatatgggagtttggagtttcagaagcattcaaaaaattccgcacacctaagttgatatttataatgaaatgttgttattattgatagtaaccgagtttcttaatcctaaagtgctagtgcgagtgctggtaagttcattaagttgatcagctacacacaaagactatttgtacaatagagttaagcactattatggtttgatatataaacacttgaggtcacacaagaatataatgaccaagtttataaatctaaagtgctagtgcaagtgctcctctgtggatcacaaaagtcaaaaagaaagaaaagaatcattaattatataaagctttggaagcaggacactgcatcttgtggagagtttcttattaattataagaaaccctttaggagtaggacgataccccagttgttgtatttctagttctaaactcctcctaagtatgagacattgtatttaacaagagtttagtaaaatctttctttttttctttttttcttccttagagttttttctttaacaaggttctatgagttgaaatcatcaagcaaaggttctttcaaaacctatcatttttcccttatacgaggagatctagcgggttcatctgcactactctttcacagttattcatctcacttatgatgataaagtaagatgatgcttgaacaacaagtgcaaaagtcattacccaccatgcctcgacaatggtctatctcgttgctagcagatagttttgataaaataacttcaaagcttctccctagtcactaagaaattgatgttgggggaaacaacatcaaaactaaggccacccctaagccagcatttcaactttccacctacctgtcttgttccttacaacaacatgcaacctgtctcgttcccaatagcgacatgcactgatcgcttcttcaatcgataaagaatgaccctctcattagtgagatttgaatcactaacacgatgatggaaaatgtgatgatttatgatgaagcatcatcaaatatattattcaaacaaaccctgaaaagaatgggtttatccctgcaagaatcttgtggccatagtaagaacttaatgtatggtttcagcagagctgacatcgcttcctatggtaaaattagattaccactaatagtagaaacaaccccacggtggaacatcactattactactttcatagtgattgataccaagtctcctttgaattttaacactgtatgacctttgagccatcacatctatctaccacatatctgttaagttcttgacaacatctggtatcaatcgtcttctttaaaaccagagagttgcatgtgaatgttacaaaacgtcattgacatttgccaagaagagctcctcaattatgttattagctgaggggatgaagaagacctcctccactatgctaacaaccgagggaatgacaaagacctcctccactgttgagatagctgaagggacaaaaaaggcctctttcactttgaatacagccaaataaatgatgaaggtctctatggttaagaccaaggaaaaatagagactacacctacaatcactccaaggtgcacctgagacggagaagacatcatccccatctcagatatattaattcaagagttggtcacatcctcaatcgatcaaagaatggacaacaactgctacaactttttgtaggcagtcgccaagaagacatcctcccttgtaaaggcaaggagatgaagaaggcctcctctgctataaagccaaggagatttggaagccccctccattgtaaagatgaggagaggaagaaggcctcctctgctgtaaagccgagaagatgatgaaggccttctagctgtaaagctaaggagcttacgaaggcctcctacgctgtaaagctaaggagttcaggaatgcctcctacgctataaagctaaggagttactgaaggcctcctctagtgtgaagctgaagagatgatcaagactatcttagctgtaagcatatcctaaagaatgctaaagacctccaatgatgcaacctaggaaggaataaagactacaactatattacttaaacaagtgttgtgacaagagaaccaattataagggaatagccaaagatcaaagctagtgttgacatgatttcacattatctcaaaataaagggaatcactcaagcatatgatctaaagagaatttctaagattttcaaaatcgatgcctacttggtagtttcaagagaaacaagcttagttcacattatcaagttaaccttacaaaagtgtaaagttgacttgaggggaaaatgtttacaccaaaagtagtcttggtgacatggacatcaatgtttgatatgtgggaagaaggaaatcattcctatagtgaaagaattcgagtcatagcagtcaacttgggaaagggtccatagccctacatttaggttgaatttaaggctccgaaatgggtatttggatcctttagtattctgagtcatgaagacacgaagaatccaagtctgagcacaaaagttgaaaatacacgaacaacacctcaaaagtcaacctaggtgcctagggttttacccagcgcctaggttgacatcccaactaaggtttggtttatgggaccgtctagtgcacatgggtcaaaatttgtactaggacatcagttagacatatcacaaacatatttggtgtattagaatcagattcatagcacttttattttgagcacctggagcactaggtgccccatgcacccagcgcccaggttgacatattctcaatctagggcacttccaagcatcaaaatgaagaactgacctaagcatattattctttttcatcaacaatgaggaagcaagtacatttgaaggataaacaaaccaacttggaggctagaatgggggcccaacgcccatgttaacacttgatgctggcccaacgccaggatgaccttttctcatcctgggccatttacaatgacttgttttgagaattcttccaggcatattctctattttcataacagattaagatacatgtgtttctgggaatcaaacataacagtttggtggcctaaaacttgactcaacgcgtaggttgatacctaatcctgggccttacgcctacgttaatattttgtcaacctaggttgttcctaaacaatttcccaaaaaagtgtttggggaattttttcatcaatagatataacaaagacacaagtaaaattgaggagaacatgagaatctcgaagggcagaaaactgagcccagtgcccaggttaacgttgtgttgggcccatcgcctaagttgacaatcaacctggtacgctagctccgatcactcaaatacaaattcctctctaagcattcctctcaggcatggtcataactagggtaggagacctcatcctctatttcaagaaccttgaaagtatgaaaacaacatcccataaactcctgaaagagcacgtaatgcccaggttgacatatgacctaacgtgggttctacttatccaattctgcttctgtcttgagcgtttgtctagattttcatagtaaacaagagctatgagaaattcacaacttcatatttttttttttggcaaaataacttagtcacaaattgggtagttttcagtctcctaattttggaaatagcaacatctttgagaattggaaaacgacttctccagaacaaagaaattaactaagtggtgtcaaaataacatttaggcttcaaaaaatacatctccgacatgatttctcactcataaagcatcaatgttgacgtcatatgtcaacttgggcgcaagatgtcaacctgggtgctggtattagagcaaccttcaataaaacagtcataactcactcaatattgatatgattgacacaatttaaattgtgttttaaagatatttgaatgctctatcaagttatgtcttacactcaaatcgaatttctaaaagttagtaagtccaaattttgtcattaagagagttaagaatttaagatacaacctatctgaggtgggtcccgcggacgcgactcaagctccaaaaattgaagactggtctttggagtcaatttcaccgttaaatcatcatgaacaataaaaaatagcctaaatttatttttccatatttttttagaatattttatcattattattttaaatagaaccttgttccccccttaaaggagagagctcttctaatttattttttaaattcacaaaagtacccataaggttagagcttctttctttagaaattagagttttcacacttagtcatttctcttataattctcatgaaaataaaaattcaaagttgacgtaacttcattactattgcgatatggggagtgaacttgtataaattatgtgtgtccatctacttactctacccatctctatttttatctcaccaaccttgcatgctagtattggcctatattattaagtagaccctaaaattttaagtatatttttatcctttagt

SEQ ID NO: 239186 - DNA, 3082 bp, Cannabis indica
tttagtaattgtttttcttttctggtttgcattaatagctagaacataggagaaaattaataagattggctatttcttttgtcgccgctatgtacaaaacagacataaattataataattgatttaagttgtcttttatttttatttaacagaagacgaaattataaattttatagtcttctttaactttttcttttaatgagtgtttttataggaaaatagtaattctagaagagaagaagagaaaaatcgtaagtgtacaacagcgaaaacctaatcgtatttttttttttgatttaatgaattttattttatttattttattatatataaataaaaagtgactcatgaatttctcataaactattttatttttaataataaatcattttacttttaatataaataaaaaaatcacacatgaatttatcataaaccaagaattctgttatatacgaaatgaaatataaaagaaaatacaagtttacatcactaaaccatataaatgaaattgtgaaataacgtatataaggtgaatccacttaattttattattattatttaaattaataattaaataatagcaacggtaaacattcatttactaatacctaataaatatatatacacacgtgcaacatatttttttaaccaatactgtaaattatttgattttcttcaagaatatacattataaataaatacagttaataccatcataatcaaaaaaaagtataatttcaatattattatttctattacagccacaacattacaaaatgtaatgatacatgcaccaaatatataccccaaaagggccagaacattacataatgactagattggttgaaaaaataccactacggagtacacatcattaattcaaagtccaaaatacataatttaataccatattattttattaatacaataaattagtctccttatacaaatatatattcaaaagatacgaacttgtaacagttgttacttgttagtctgccaagtgcagactatatgtaattataatttgactcaagttgatgagttgtgcaatttacttataatagtagtaaatatacagctataaatagatatattttgattaaataaataatataaataactgctaacaactcaaaggcaccacgtgtgatattctttagtcctaatagcaaatgctcttaacataaactacttataaaatcttcaaataagcagccattcaaacattcaaaccaatacatcaactttggttgttgcggttcaaacttgaatccatttgtttagtgctttttaaggaattcaatggcttcatttctttgacatgttcttatattctttttgatacatcatccatattcgaccatgtatctatactattcaaaagaagaacttggctaagagttccaatcaacaccaagaagaattccaagtttcaaacattgaacccattcggcaataagcaaaaatgagcagccaacccaaatatacaaccaaaaacttggcctttcgttgcttacaaaggtcaatgttgtttactagaatttagtataatttaggtacaccaacccagtagaagacaagtaaaagttgatggactatagaaataatatcagtatcattactactcggtagtaccttatctcacagctccttttgggctcttaagcgagccattgttgggcccacggcgctacctctcaaagacctagaagaccatgatgaactcttggatgtgctccccgctgaatctttcttcttattccaattgttctcctgggatagctgtgctttctttgcgttcaggctctcgcagatttcatcccacacgtccactttcccgttttctacataaacaaactaaaatattaagcccatccatgaaaattttactgtattcaataactctatgtagtttatactccattggtaacctgattcatcgataccttgtactggggacttggctttctcagagatgggtattgaggacttagctttctcctcaccgataccttgtactggggacttggctttatcagagatgggtattgcggacttagctttctccttaaagatgaccttagaacttgacgcttggcagaccccatttgagactgatttagctttatcagcgtttaagttggcatcatcacacttgatgattcgaacatcagcaagagaccaataatctatctgcaaagggactccatttgttagactattacaattaagaatcggcaacagtgccaacactctggtcgctagatataattatagatgtgataaaatcatggggttgcaaaatataataatttatcctgtcaatgaaagtaacatcacacatgtacaagaaaacaaaataaatctgatggaattgtaacaatccctcggaatgaaatctgatgttcttaaaataagaatcaaaatttgataatgtaagctataagttgcaatttctgatgaaacacatgcttatggaaaaagagaactgcttagtacctcaagagagccatcttctgcatagagagacacatttggttgctcagattcctcatctctcttctcaaaaacaattggatactctggaacttgtattagagttatcttatcagatttagattcatagtttgatacttttccaacctaataaaaagagtatgttagtacactaacccagggtgagtacacattattatcattgttttggttttaaaagaatggttgatggggtttatatatgagtttagggcagagagacttgtacccggaaagatgagagttcaggagtccaggatgctgataactcgaccagacgatatgccactgtatcacctacctgtgttgcattatagcaaagaagctatcattctcaaaataaagaccacaaaaatcttaagaaattgcaataataactaactaattgagtatattgtttttggactttatctagatccgtgaaaaaagaaaaaagaggataaataaccaaagcataagcatagcacgaggcaacaaacctggggtaaggtgctacaaggcttaagcttatcaaagtctacaggaacatctacagtagttt

SEQ ID NO: 239187 - DNA, 1725 bp, Cannabis indica
tttaaattttgttatttattattttcaacaattccaattttaattgccaaatagaaaataaaatagcctatttgtacttgataattagcctatttttgttattaaacaatttcttttatattccaaattttagtagaattttaatttctatttccagtttacatttgcaacgatatattttgacatttataagtatatgaagtttctatttctactcatggatctaaattatgtgttgcacgtatgaaaaatggactctttatattttgagacgtgatagactagtagctcgttataatgaaccttttaatgtatagttgaacatagatcacataagcaaaaaaagatcgataacaatgaagagatatatctatagcatctgcatctaggtcatatagactatgataggataacgagactatacaaacatggtccttttcccgagtcaattcttggtgagttaccagtatgcaaatcctatcaagaaggcaaaatgaatatgagacaattctctgcaatgggaaatccatgctgaaaagccactaaagatattatatttatatattcgtagaactttcagtgtactagccagggatgattatgtgtacttcgtctccttcgtagacaactactttaaatactcaaatttttgcatgatgcgtaaaaaatcagacacatttgaatagttcaaagaatttctggaaatggctcaaaaccaaataggtaaaagtttaaagatcttgcaaactgataggaggtgagaatatttagatatgaagtttaaagataatttaaatgaacttagaattctatctcaattgattgctccatgaactccacaacaaaatagtgttgcaaaatgttggaatcacactttgttggatattgttaggtcaatgattaactacttcatctatctacattcttcttgggatgtgctatagaaacaaaaacttacattttatgtgcttccgtctaagttaattcctaagacacccttagaatgacggaatggtaaacaacctagtttacatcatttcagaatatggggatgcctcactaatttccttaggaaaaaagatttgaaacttgagtctcgacttacattttcgttggctattccaaagagactaggggtagactatactatagtgatcaagagaagaaagtgttcgtctcaatggatgctacttttcttgataaagactatatttgacacttcaaacttcgcaggatgatagtattagaggagatgacgtcaaaattaacttaccactgttactccaaatcaaatatcacagtacctcatccactacaagaaaattatcctatcttggcagttaaaaacccccacaagatagacctatcttggcagttatcaaccaccgcgcgaggatctgaccgtcgatataaagatgatgacctgtctcgacagttgggaactgccgagataaagtaccttatctcgacggttcaaaatataactgtcataataagtgtgacacatgctcacatatatgtgcaatgttgacactggaaccgccaagatagggttacaatctcggcatttccttttgaactgttgagattgctactctatctcggcgagataggtttatgatgacagtttgttaagaaccgccgtattgattttaggtagaaaaatatatatatattttttttaatttttcccatacatcgatagtcaagatatatacaatatta

SEQ ID NO: 239188 - DNA, 2153 bp, Cannabis indica
tatactcttacatttcacggaccttgtagctatgaagtatgctgttgttggtaatcatcgtcaatatgtccattgtctagtcatattctcgaattttttcattctacagaactttttcttttccctctttaaatgtgtaaatgattcctttgtttgtcccccattttttgaactgtatagattgcaggtctcctctttcgttgagtatgggaagcacacgatcttatagtgaagatgtaactcacatgcctgtcgtgacagaccctgatctaaatagggcttttaaggatttgttggctgctagttgggatgacctccctgatagtcttgtccatgaagtaaaggctgctttgtctaagaataccgatgacaatgctggaaaggaagctttaaccaatgtttttcgtgctgctgtagcatctgaggaatttggtgagatcatcatgaatttaaagatggaattcgatgacactgttggaatgagtggcgaggtattgttgtgtgcatgaagtatgcttgctgattatttgctacatgttcttgtccttggtgttggtcctcatgagtttgatgtttgatcttgtttgtagaatataaagcccttgtcaaaagagcatgcgaatgcacttcaaacaattttcagtcgctacaatacctatttggaagcatttgggcctgatgagacctatctgcgaaagaaagtggagacagaactaggatcaaagatgatttacttgaagatgagatgtggtggcttaagttctgactggggaaaggtattcattaaatctagaaaaacctttggtatttaatttctttacaagtatcattttcatatattatctcgattctcaattttatcagtatggcacttgaagataccaaaatgagaatccttagaatgttgtacatggaagaagttagggctgtttaggatgtagtagtttttgcaaacgcagtatttttattttagctaatatttaccttagtctttttacttttttgtggtaattaatgagagttagaagaggtgacttgaaatgtttccactgaaaaggtttttatttctttaaagctagttgcttggtccctaataacttttcgtgtgcttaattaatacaggtatcagttctaggaacctctgggcttgctggatcttatgtcgagaaaagagcttaactccataactgtgacaattttcaaagtagttgtgggctttcttgtgtttgaaatcgtgtttctgaatatttggagaaagacctgtgtgtcctttcctcagaaaccataattttcaggttgatgacagttcagttcaataagagcttatctttgtcaacgataatgcaatataacagttcagttcaataagagcctatctttgtcaacgaacaacgataatggaatatgttattacacaccttggttttcatgataatctagaatagtgttgaataatcttattgcactgcagcaccagagtaggcatagactgatgtcaccattagaggattttagaacaaagtgcataatacaaatacaaatatgtgctaattatttgcactttggcaagcaaatcaataactcttgtactaaaacaactatttgatttcggagaaaattactcattgttttttttttttgtaatggaaaattactcattgtttgattttggccagtggtgttaatcccataatttatcatagccagcagatttttgttctgctggctgtgccaaagtcaaacatttcgtgccactaatgtgttagtgttagtgtctcgtagcatcttcactggttgaggcaacttcttataaggggcgttcatcaaaacgcctagactgcaaatactaccaatcaacatgtcaattagaagtgtttgtaaaatacttaatttaatttttacaatttaattccaatctgcaaagtgtggatatttgcacttgtacggattagaaaatttaaaatttgtacttgtgtggattagatgttaattaatatctaaaagtaactgatctaatttaatctatacatatttatatgggtaaatatcattttggaccctctgttttacaaaagttacaaattggaccctgtgttttgtaaaattacaaaatggatcctgtatttttaaaatagtacaaatatgaccctgaa

SEQ ID NO: 239189 - DNA, 1999 bp, Cannabis indica
attttaatttttatataattaatatttttatacatttaaatttttattataccttttatttttatattaggatatttctcgtcccatcccattagggaatatgcgagagataggcgggatggggacggatggagcactcctcgataattccctatcccgtgtgcatagactaaacaccatgtgtcttttagcacttctcttatatgaaatactaaaatgcctaatctatccaaattgttaaataataattggttcaaataagaatcagatttcatgtaatttaatataataatttttataaattatcgctaactattattaagacgtcacctcataatagcatctaacactactgatggtctaataacaatgctcatgatttatccaaactcaatataataaattaagggtgaacatcgatctttttggtcgggttataacacattttaatcaacctactataaattttgggttgtaaaaatctaattaagctacccaattaagaattagaaaagtttaacccatccaataattttgacaatttattcggagggttaatccacctacatcgttataacttttttttattagtttgtagtgttcaaaataattaaatttaatattaataaaatattatatgtgtacttgaagtttaaaaatattattgtctaaattattgctacaaacttaaaaatgagaacatgcaatattaattattaaacaacacatctttaaaaaataaaaataaaatattaatctactattctaaattcttaagatcatcctcaataattaaatacaatcaacataaataactataaattttaaatatcaaaaaaactttataaaattaaaatctatatatataatataaaagaaagcatacaataaatctacgtgccatcttagaattttttttcattctattttaattttttttgagatttttctattttatttgaaaaataactatgtatacaattcttcaaatacattaaaattaaatatctcactttatttataaattatttagatattttccatatatgttataaatattactcttattatgccatattaatttatctaaaaatattttttttataggtggttgattaatttcttatcctataaattttttattattaacgtcttacttttaaagttttttatttttcatctaatatacaatttataagttttttatttttatatattatataatttgttatttacctcttgaaaagtagttatttataaattattaatgtcttactctataagtttttcattttcatttaatatacaatttataagttttttaattttttatctaatacataataatattaaatttattatttaccttttaaaaagtaattatttataaattaataaatattatatatatgaaataattttattttaaaaattttatatatactttcctatattttatttgctcaaaaaaaatattcaaactaaattattttaaatgaaattgaataattttttttttctctatatatactgttttattttttttacctttatttttatattctttaagatatacctacttttatagataatatctctgatgtaaattatgtgttcaacttaagtgaaaggtgagggtacgtatattggataacctactcataaaattgggtacttttaaatgaaatataatataagagtatttttgattaatagatacaaaaaagaatatttcttagcttatcccagtaattattgaagagtttagtttttaattgagattattcaaattgtatttttcgtcaattgaatcagtttagtttgaattatgatttatttaagttgggcggtttgtaaaaaattatgaagactcttgctaaataacaaggaggggatatgtgattaattatcaagtttatcaaatatccaagcccccaactatatttttagtttataaaaaaataaaaacccaacataaattaaataataatgataaaaa

SEQ ID NO: 239190 - DNA, 2520 bp, Cannabis indica
aaaataatttccaacagtaaatgggttcatcgtctcaaaatgaacaaagatgggtcacttgacaggcatcaattttgaggagacctttagctctatagtaaaacccacaacatgttactaatgtatttctcaatggaccattaaatgaagttgtttacatgaaacaaccacctagttttgaggataagaattgccctacacatgtgtgtaagttgcacaaggcaatatatggtcttaaacaagcaccccgtgcttggaatgagtacttgttaaggcaaacattacttgattgaggctttcacagatcacggcctgacagttccttatttgcttatggcttagggcacaacttagtcatcttcttagtctatgttgacgaaattttggtaacttagaccgaatgccaagttaattactaagcttgttgttgacctgaacaaaagcttttctctcaaagatcttggtcaagttcactattttcttggagttgagatatacacagacaattcagggatgtacttaagccaaacaaagtacatcattgatttactgctagaagttcagatggagggggcaacgtcgtgttcgaatcctgtaagtgccaacacgaaattgtcattaaaagagggtgccattccaggattttactatgtatcgaagcaccataggggcattgcaatacctatctcttactcaactgtatgtttcctttattgtcaataaactaagtcagtttttgcaagcacctactactctgcactgggaagcctgcaaacggttgcttagatacctcaaaggctctattaaaaaagggttatgtctcaagcctgttgctgctccaacacatcatgcctactctgatgcagattgagcaagctgtgtagatgatcgaagatcaactgggggttacttggtgtttctaggaggaaatctaataagccggtctgtcaaaaagcaacaagttgttgcaaggtcaagcactgaaagtgagttttgtgctttggcaaatgttgtagaaaaacttaagtggattcattctcgtcttgctgaacttcaagttcctttagcccattgtcttattatttgggtagacaatcaaagtgccactgcactagctgccaatcctatcatccatggcaggtcaaaacatacactacaccaaaaaccccaatcaataatattttaaaatgccactattactaatatttagtgacattttatattttagtggcatttgtataaattgtaagctataccaatgtgactaaaaatacaagtgtcactaattaattttttagtgccatcttaaaatgtcacctaaatataaattgtggcaatttgaaatgtcactataatatttactatatatttgtttaatattaatttagtgacatatgatgatgatgatgaaaaccacaattggtgttgagattccttgttatgtgatgtacacgtttttttgcctacatatgtaattaaatatcattaacatatttcattggttagtaattctttttattatatcatttgaaaaattaaaacttaacgagttgtgaagaagtgacatttcgattgtagttaagagcctgtacataaatatattcagttctaaatattaaaaaacattgagtaataataaaaactaaagatagataattttttttaaaaaaaaaattgagagattaaaggtctaaccatgtcaagtataatagatttgtcatttgcattgtaatcatgtttgttggtttgaactagagatcttaattcttttaattcagcttctagagtctgtatatacttcctttgatttcctctcttagtggatttattttcccatacgtcggatgggaaaacaccaaaaccgtacatacggactgatccgtatttttctttacccattacctcagagaaagtgtcattcatactcctttcctttgatacatccttattcaactcttgtttctcttgtaattgtacctatcattaatataagttaagaaataataaaaaaaaatagtaggcataaattaacaattattcaatcataccattacttcttttgttgtatcagttacactttatatctttttttgtataacagattttaaacatatcagcacgtgtcggtgtaattccaccattctttttctacaaataaaaatattagttgcagttaaatattaatcaaaatacgcataattacaaagcagtgttcaatttacatgctaaaataattttgtagtttacctgtgcatctcgaatttgtgcaaaactttttgtgccagttgtatgattgtatttcttttgactacgactagccttgtttgtggcactccttttctaaaataatatataaattacacttaataaatattaaattcatgaaatatgatcaaaacaatatactcaattaaatatgaaaataaaaagtacatttgcatcatctgttgcccaatattttattaattcctcccattgcccgtcatatactcttttgtccttatattttttttgctcctc

SEQ ID NO: 239191 - DNA, 1961 bp, Cannabis indica
aaaatctacctctttcattatatattgacctacatatctgaaaatacaagaagatttaaacaaactccattgacccacaaataaaaatctctctgaaacaagaacaaagcaaagctatgcatctgcaaatcttcaaataacccaaataaataataataaataaatataaatctcaccctccctcacatgcagatcgttttaaatttaaatgggtccaacaaccataaaaatatatcaaataagaagaagactgaactaaataaatataaaaattaaagtttcaaacttttctcaaaaatctaaccttttcattactgcatgtactaaaagctgaaagctaaaccaaaatccaagccatggaaacatagatggtttccacagaggtaagaaaaagagagagaaaccaagttctgagcagaacccacttggcaatcacactgttttgctctaaaaaaactcttctttctcttaacgtgacaaaaaaatctctttttttctttttcccatggaaaatgaacaagtgttttcaaatgaacggtgtcgattaatcgtctgacgccatcaaatggctgagatggaatccagatcaatataccaataaagcccgtaaatttaggatatttttatttaattacagaaaaattatgaataaaaactttgtcttttattgtgtgtgttgtgagagagtagctgtgtttgagggaaatgtcctttattagtccactccgaagcaatgttgttttttggttcggagaatccgagccttgtgttttgtaaaatctgacgaattccgaagctaaagtttggatcttcaggtttgagtttgacccaatgcgcggcaaatccaaatttttggtttctgcctctgagatttggccacgtggtttaattatgaccgttcgatgatgtttctgtgtctcgtggagggttcctttttatttattattatttaattgtatttttgattggattattgattatttaatagttggctgcaggggattacatatgtccacacaataaattttaaataaatgttttcttttgcataaatttttaaataaatgtttggttaatgacaatacaaaaggattaattaacatttgtaagattttttataaatgtaaaacacgttttttaattaaattgatgatgaaatttgttaaataataataagaatagttaagtttataaaatgactaaaaaaattaaatataatcaaaatatttttcatagtatcatttaaaggtagtgatttaaaactctataagagctattacaatatatttaattgtattgatagagatataacacattagacggtgctaggttgtatcttactgactcttagggacgttgcatgtgtactttttataaattagcttataataataaactaacagtttaaataaaattatgatttaattaaaatcttgctaactaatttgaagcataaaatttcttaacattattctttcaagatcaaggaatccctttaaaatattacaaaatatgtcattacattatttaaataaaatacacattaagttcagaatatcgtaaaaaatgaatctcgacaactcgactccacttgctggataagctgatatgtacattcattggagaagatctctgactcattattgtccaaatgtttcttaacctttacctccaccacatagcactcgttagttacaaaaactcaacaaaaaaagtaataacataatatcacaattagtatataaatatcattaaccaaattcaaataatcacaagtatataaatatttagtaatacacaagtacttgtgcgatatgataagtcatatttgctactttataaagtaatcgatcacattgttgtttaataagacaatcctaatattcaggtccggtcctcagttgaaataggtcataaagcaaaaaaaaaaaaaaacttgaacccttactataaagataaat

SEQ ID NO: 239192 - DNA, 6168 bp, Cannabis indica
tttttttttcttgagagaaaagattattaattaataacggcctacttctctttcaggagaacagacaaatagacaatttatcaattgaacagaataataaattgaaaaagaaaatataatttcatgtttatataaaagcaattaaaataagagaacaaacaaagctcaagtaggctagcacttacgctgacaacactataatatattgactatgtccctacaccaaatcgagtagtacagcatatactcttgagtaaaatttaatagtactgtcacgtttctttctatttatttaatttgaattaattatttaatatcaaaattgtttgtgcttacaacattgcctctctcattgaatttagtttaattaaattggtgttatttggttctctatataaatgttgccatatatccctcatgtatatcacaacatctttcttcccttctcaatcacaagtagaagtacttctattgcttctttctcactctctttagttcttgtgtaacctcaaaatcaaatattcatattctctcatattacttatagttcgtttttttgtcttcactaccatgacaatggattgcctcaacctctgcaaacagcaggtaattatatattggaatttattcctatgatcacaacactaataatacgtataatggtattgtactcttgttatgacttataagttcatgatgtgtataaagtttaatttatgtactaattttcaataaataatctagatatatagaccagaacaaagcacagtaaacaataaagattaattttctactttacgtaacagaatttgtcaacaaattactaaataaaattcaaagcattaattaaaaggtccgatagtaatgttcgtattgatatatagcatgtatataaaatcatcaatacgtacagtgttgaccggtttattttatgaaccgaggatcagcaattaatgcatgaaattattctatctcttttaaagaaacaaaaaatacttgttttatacaagttaacacaattaaattatgtatacattgatgatggcagggacacgacgatgaagaagataagggaataattatgtttacccttgatggaagtattgataggcaaggtcgcccagcagttcgagggaggactggctcttggtttgctggaattctcattctacgtacgtatacgtacattagtaaatattacacctccatctcatatttatatacagtaatataatttctttattgtataattcatcattgttttttccaaatgcttaatgagatccaacagtactagttttaagggagacatatgatatggatatataggttattctttccttttttcctatatatattctttttacggcaagcatatatgcatgtgcaaccaaaaacaccaatttggtatgtatttcctatttttgttatttattatgtttttatattattttagtaaatattaactatatatgtacttatatatattgagataatatacaaatagtacattttaaaaaattaaatactttgcaaaagttgcattccataaaaaatgtattcaatatatccatttaattatttggtaaaataaaataattattatatcaaattaattaacttcagccaaaaatagtaattttaatgggaatcacatcactataatttgtatggttaaaattatactagatatattgaaaacattgataaaattttagtttctcaatttttaacattgatattgaaaacaaattttatttttgaaaagaaaaatatatgtttagtaacttttattattattattattattattattatttatttaagtaaagtaagaagatagaaaaaatgtcatagtgtttggataaaaaaaatgaaaagtatgtttttaatttaaaagtaaagaagttaagatttatagtttctacaaaaagacttttgaaaaattatttttaaaattaaaataattgacataaattttaatttactaataaaagatttttttaataatatccaaatacataaaaaaaagtatttttaataaaaaaaaaatgatcctatataaaaatgtgtttaataactttttttaattactattatttatttaagtaaactaaaatatataaagtagagcaacgacacaagacgatatgagggataaagtgtagtaataatgaagaataaagagactacaaaataaggctatatgattaaaaaattatttaaataaatcttgataataacttggtctttttttttcaattttaattattatgctaccaataaaaattaaattttgaccactggatattatgctaaagttagatttcactttgtacgtagtaataaaaaaataagaaaatataataaattgaatttaaagaaatatgaaatgtttgtagtaaaccaaggtttggcaacattggcattcttcggggtaggagtgaacttggtgttgttcttgacgagggtgttggatcaagacaacgcagaggctgcaaataatgtcagcaaatggactggcactgtctaccttgctctcttgttggggctttcctaagtgacgcttattggggaaggttcaaaacatgtgctatctttcaagcaatctttgtctttgtaaaatctctaaactcaccaccaattttttacatatatattgtttatttctttaattattcgtttccttgtgcatgcatggtagggtttggcttcactatcactatcgacatacatatttttactcaagcctagaggctgcggtgatgaaaaatctagttgtgaagaccattcaagtttggggatagcattgttctacatctccatttatttgattgccttaggaaacggagggtaccaacccaacatagccacttttggagcagatcagtttgatgaggaggaccctatagaaggtcaagcaaagatcgctttcttcagttacttctacttggctttgaatcttggatccctattttcaaacacaattttaggctattttgaggacaaagggatgtggactttgggattttgggcttctactggatctgctggcctagccttgttgttgttcctttgtggtacaccacagtaccgacacttcagtcctaagggcaacccgctttctaggttttgtcaagtggtggttgcagcggctagaaaatggaaggttgagatgacgccaagtggagacaattgttcgaggatgtttcacaattgacatctcaaaatggtgctagaaacatgctacacacccaaggtttcaagtaagttttggtccttgttaattgattgcttcttattaatcaatttctttattaagtgaaaaaggaatagagaagaacctatatgtgcaagtaattaatgataatataatattgaacattgtagatgtttgccacgtaatatgaaagaacaacgaagtgattattaataatttgttttattattacttcagatttttggataaagcagcagtcatcactaagaaagacctcaaccgaatgaaagataatgttgttcacacgaatccatggcatctttgcacagtgacacaagtggaggaagttaaaagtatactaagactactccccatttggctctgcacaattctctactctgtcgtcttcacacagatggcctcactcttcgtcgagcaaggcgctgtaatgaataccaaacttgttggcttccatattccaccagcgagtatgtccagcttcgacattctcagtgtcgccgccatgattttcttctaccggagaatccttgaccccatagctattagaatcaccaaaaaccctaaaggactcacagagctccaaagaatgggaataggccttgttatagccataatgtcaatggtatcagctggagttgttgaagtgtacaggttaaagtacatagaagaggagtgtaataatgctaccactggcataatatgtagtagtagtggatcatcagtatcaagccaaagttccttgagcattttttggcaaattccacaatatgttcttgtgggagcttcagaggtttttatgtatgttgggcaattggagttctttaatggtcaagccccggatggcttgaagagctttggcagtgcattgtgcatgacctctatatctcttgggaactatgtgagtagcttgttagtgattatggtaatgaaaatctctacaacagatgatatgcctggttggatccctgcaaacctcaacaaaggtcatttagagaggttttattttctcctggcagctttaaccactgtggatcttatggtctacattttgtgtgcaaagttttacaagtatacgaagtttgaagaaagaaataatgggcaagataacaattgccatgaaagtactactaatgttcactctatggagcttcgggcttgagtatgactttattaggatgcaatgtttgttttgatcacgtacgcacgagtctttactataaaatcatgtttggcgcatataataaatatatgttagataaaataagaatgtgtgccatgcattcatgtgtttgaatttgcttgtgaaatagagtataatatgcttatgttagcgatgaagctaaagaagaaatagaatttcgattctattatctctaattaagcagagcagacaatttaattaccatgtacgaataagatgtactaaagcataatgtcttatatttgtataatttatgatgttatatttccaacttgaatgtaagatgtgattgatactattaatcaacttaaggcgatatgaatgaggattaatcttcttttctacttccagtagtcctattttcttttccttgctaaaatcttgttattattttgcaaaataatttgcacaatattctatttttgaattttatgtggttttcgtatcttttttttttaataattaaagacttttatttaagaaaacccaaactagtagccacaaaagggggccacttcccttaacaaactagaatttttgacttttgcctctctagcccaacaagctaatatatcagcaaacacattcttcgtctaaggaacaaaggacacagtaatttcgttaaaagacgtacagaggaacaaacaatacgagaacaaagagaaaacgttccaaccatacggtaaagaaccaaccgtgaaggcaagagctgtcgtcttcgagtcggtttcaattcgaacttttggcccatctttctccaaagccgtttgcaaagccaaagctataccacaaagtacatcatcgacagaagagaaccccacagcaacccatgagtcctctaagacctgatcatgcttgtgaataatagcaaaacctgctattttcccaacgacaaaagtgtctacaatacagcaccagtagtcctcctcagaacaattttcaagcatatgtatctttgcagcagcctcgtccaaatgttcgaaccacaatcggttactaaaaaattctgcaactctcgaaatataatccttatacaccaaatttatatcacactgtttatctttgaaaatcaaatcattgcgccacttccacaatgtatcacaggtacaggcaatgaaaatttaaagttcaaaatccttcaaattacaccattagatgccaaaatctgtgagattattccagtttaagcagtcaatgtgaattccccttctaaaccaaatcccacgtgtgaaaggacaacaacaaaatagatgaaaagtagattcagaatctgttataatgtgaaaattccacctagaaacttgagaccaagctcccgtaaaaatgacatgtggactcaagctatcagaaggagaccactcgaggataaacctcgcctgaatcaaacttagcgagatgatgtgaccttgacagagttaagtcgcattattgcgcctcgcatgacgtgggaccaagaagaaaatattcaagactcgcatataccaagatattcacgatgtctacgaagacttctcctgcgaattagtaaagaccgttcctttacatagcgagttagtacgaaagacttaatatgctcgatgattcgataaggacttgcacgttccagatcatcaacactggtaaggtatctgcaggtgcgacttgattaggacgcaaatacctaagtacgagactcgttaatctcgtcttaacaataacgcaccttaagcctgcgagcttgtgcgag

SEQ ID NO: 239193 - DNA, 1839 bp, Cannabis indica
atgtcaaaagacaagacttttttgcactacaaattattattattacatcagtctaagatttaattctatataaatcattcaatgagtcataatgttctcaattatatgcaatttagtatttggagtgtgtaattttttaacatgatcatgtagtatttatatatgtgtagtaagaaaagtaaaaaaaacaaatataatcacataaaactttaacacattcaatttaattaagcgagtcttatttggagtaagcacaactccatacaaagttacatacaaaaatgacaaaaagtaaaatatgaatgcatatatattttttattagtgcaccacacacatatatataaacattgagcatgatcagtcatcatcatcatcatcatcataaaattaagcatgataattaataatgtgtgatgatgttcatgatcttcaaataccacaaaaagtcttgatagtacgcctaataagaggattaagactcttattgggttgttggggatgatcaggcgaatcaatatgatgatagtaacgattgaattcgaaatgatcaaatggtttataacgtaatggatgttcatcgtccacaaactctttaggaacatcaaccactccatttataaatgtaaatagcgcaactgaatatctctccttattcttcctttccattaagtcatttaacatcacacgatgctcgcatccacgcactctgtcattgctccatgcctgaccaacataatttttcaaaacacagaatccaaaataatataaatgaattacgagttgtagtagttacttaccatgagtccttctcctgcaaggactataaaagatgaagtggaattaggttttagaacaggaatccaatgaccatttttcgttttgatttgaagaccgttgatttgattttgatgaagaatggataagatggtactgtctctatgatcaatcaatgcaacgttagagtcacccttttctcgaactttgtatttcaccattcgtaataggtgaaaacttgaattcttaaacgactcgaatcgatcaccttgatccacaccatacttctcaaacaccattctcatcactatttcatatatttcttctaaccgttttgagaaacacatcacactttcactgtttatcgatcatatatcaaatcataacacgtccaaaatatatatccaaaattattataaataataattaaaaaggttaacaaaaatatatatatttaccagaaattatgatttccttgaggccacataatgttggtgaaagattgagctccttgtagagtggttggattatctattgcgatgttttggaagggtggaacatctttagcttcatcatcatcatcatcatgatcatcattatctgcaacattattattattgtttacaacaatatagctctttgggccaggcctatcactcactctctgttttttttgcttttttcgggaagatttaatacttgtttggctgcatcaaatatagaattgtgaagctcaattggaaacttttcgtacataatttccacacatccatactcttccagtccatacacaacttctttcgaagcccaaatccatgattcagatccaggtttcaacttttccacactgaaatctataacaggaattatcatattgttaataatatattatgtttctcttttagtgtgtagcttgctattgtaagatttagcttatattatttatatagcttgctattgtagaggtaataattaattatattaagataaaccatattgtttgctaattaataattattaattattgaaggaaattattgtaattaataatttgtttattttt

SEQ ID NO: 239194 - DNA, 3625 bp, Cannabis indica
tttttctgcatttgtttaatagtctttcttttgtggctcatggttgtgtgttttggctgccccgttctgctaacttggtggcccataatgtggcggcgtgggctgcgtcccacaatgtttgtcgtcccctactggaaagggaagtatcaccctttgttgctacctaagtgtcttgttttgctggtttttcttaatgaagtttcagttatcaaaaaaaaaaagaaaaaagaaaaaatcttgatgtggtccttaaaaggtcaaaaacgacatgtggtttactcaaaacaactcaactccatagagtggtggctcagttcagagttttcctagctcaaatttgatacacgaaaagtggggaatcaggaaaggaaggatgaggaaactgagatgggtaatggacggaagtgggttttgggagctggacgcctccaccccgaccaccatcgatggactagctcggcctattcccggagacacacttcccttgggcttatccagaggtgctaggctttcccgccccaaacagattgacttctttcaacgattcatggccgcccctgttgttccttcttactccgccgccgatggcttcaatcttcaacgcgttctcaccatccctttcgctgacaactggtaaccatttcatttcaattttctgctttcatatattggtgtagaatataatatcatgcaattgtggacttcagctttaacccacccagaatttgaatgtacggattaattacagtgataggctgataccagaattgggtttcattatctatgcaatgcagctttaccacattgctgggtcagtttaatttgcaaaaattcgtttcgtccatgaagcatagtggagataaacctaaatcagcatcgtcatggcttcaaaaaattggaagacacttaaagaataagtcattatatgcttatggtttgtgctcggagttatttttaacacctgatgatacatttctacttagtgttgataaatatgttgaaaaagacttgtctcgaaagaaagcagtttttcatcacaaggtaaaatagctttcagctttagcacttactaagattgcagttggttatagcgtaaagactaattgcagatgacatttatatcttttatgctttatgtgaagaatgtttcattctatgcttgcagtttccttatcatgatttaactgtggaggcagtttggccaggactttttattgacaaggatagaaactattgggatgtgccatttttagtggcagttgatttggcttcttctgtttccgattctggcataagttatcacctttctgcgctccacaattcgggctcaccggagcagtttgatggcaatgggagcaatcaagcacccacgattctgcttcccgggttgtctgtgaaaggtgcttttgcctataagaaggatatagagctatggagaagtattgcaccgaagttggagatggttcagccatatgatatttttctcttgaatcctcgtgtttcagcttcaggaatcattggtaagacattgccaacttcttttacagatttcattgatcctctggaactcagctaagaagagtacaaactaataaagatttcatcttttccattaattgaatcaagcagttctctggttcatctgaaagctgtaactaatctgtggtgggcatgatggtttgtcatagcatgtagttgccaaattttattgctagatgtagagtctcaaggagatttgaggatgaaaatctgttacgaatgcttaaatttgaacctaaactgttttgtgcaacttttataaaatggtatatgtaaatcacattttccttcgcatataggtgctgctgttacagcttgtttaggtgagaattcagcaaggccaagaagattggaagaaagttttcagggttttagatgctatagtttccagtctggctctgtaaaatctgccttacaagcagacatgtttggatctctattatttacagctcagtatgggagcttccagaagccttatttcgatcttacccgatttcatgctcgactggatttcccttctggttcaaaatttctttcaggtgcaatacggctagcacaagattttgtgaattctcagcagccaacttctaatgcccttcaaactgtttgcccaaatacatttctctcccttcagcagcaggtattttgaggcatatctatgcattcagtgcttagaatttatttttcttttgacttttttcaaacattgtttgtttgcagattgctgggccttttagtttgagggttgattccggaatttctgttgatttgaggaaccaagattggaatataggtctggaagagcccataattgccctagaatatgcattgcaggtccttggttctgccaaggccattgcttggtattccccaaagcaacaagaattcatgattgagcttcgtttctttgagacttaaatcatttaccctcaattatttatagtttatgctacaaccatgagtaattagagatttttttcactcatctcacatagctccataaagagtactagtattacttaccagtttgtagcagaaattgatttaagaaaaaagtaagaggcataggaaattaaattgagccacattcttctaagaccatctctaacctatacacataatttggtgtcaaaaactattttcattctaaccacaacactaaaaattacactcactaaaaaagatatttattatttattattattattatattaacttttaatgaaataaaatatttttttaactactatactaacttactaaaatcactacaattataatatttaattaataaaattagtaaaacatattaaattaaaatatcatattgcaataatataaatattacattagtagagaaaaaatattacattaatgacgaaaaaattgcaataaattaaatcaaacttaaaacacacatttgaaaagattaattaaattatattaattttgcgagctaccatattcgttccgcgggtgttcgattaatgcatttcaaagctcaacatgagcttttttatctttaatttttctatgtctagcaagaaattattgaaattgagcattatcatcttctaccatctcaatttatggacttggtactttgactcgctcttcaattgatgcatttagatcatgttcatcttctattatcatattatgcataataatacacaaagtcattatatcatgtaaaactttttaattccaaagacgtgtcagtccaacaataattgcaaatctagactgcaatattctaaatgcgtgttcaacatctttcttacatgtttcttgtctcattgcaaataattttttttttggaccgcgtggataatgaataatttgaacaagagtagaccatcttagatatataccatcaactaaataataaaccatattatactctttttctttaataacacaattagcgggtggagcaatagcttgagcaagattagcaaaaagatgagatgcttctagcacattaatgtcgttattagattctggtaaactaaaatattcatgtcatatccagagatcatagtcagctattgctttaagaataatagtcggggacccactacga

SEQ ID NO: 239195 - DNA, 2187 bp, Cannabis indica
tttcttaagctaatctatatctagggcgaggtgcatatatatatatatatatatatatgagtcatcataatctaaatcgaacacccaactcacatatatatctttgatatattatatatcataaagttgggctatctcccacaacgtcacaaaccatcattatcaatcttaatttttgctcttccattagtgtcaaaaacaaacattgcatatctatcttagaaaactatgtattacgtaccatatagtttaatttgttaaacttataatcactatacatgcaccctttaacctaatattactatacctataaaaacccttcttccccttcttccaactccatcatcaaaaacaattatatcatcaaatcccacacgtcttaaacaacccaagaaaaaagaaaagaaaagaaaatttcactacaacaaaatgatgaaacaagttatcatcttgtccttcttcattgtcttcctctttcactcttcttctactttagctcaatctccagctcactccccaactcagcctcaaaaaccaattcctaaagctcaatcgcctactactaaacccgtccttgctcaaccgccatctcaagcagtactaccggctccttctcaagctccaacccaaaagcctctccctcacaccccaccgcgaaagccaacccctaagccagccccgcctaatgtcactgagatccttgacaaagctggaggcttcagtgtcttcgtccgcctccttaaaaacactcaagtcgtcaatcagatcgaaaatcaactcaacacttccaacagcttaaccatattggccccaaccaacggcggattctctagtctaaaagccggcgctctcaacggccttacccctgagcaaaaagtccaactccttcaataccatatccttccatcctacgttcccctccaaaacttcgaaaccctaaccaaccctgtccgtacacaagccagtaacactgaggattaccctatgaacattacaacagagggaaacttcgtaaacatttctactggaattgttaacgctacactttctggtacagtctactctgataatcaactagccatttatagagttgatactgttcttcttcctttaggtatctttggctcgaaagcgcctactccttctcctactcctgctcctactccagctccactcgcgcatttaaaacctaagaagtcttctactccaacaagtacttcatcatcatcctcagctgctttgccttccaactcatcattggcacctaaagcgcctaaaaagccattaaatttgtcgtcaaccacctcttcctcgatcagtcctgtggcggcattggatgaatccggtgtcgttgccctaacttcaagtaatggtgtcatgattggccttgttgtgactggggtcgctgcagttatgagtattttgggttaattatgatcaatatgtttgagtacttgtaattcatagatcatgattgatgatttatccggaataatttgaaagttatttatcatttgttattattttatagtagtagttaaatatattattgtatgttgtgatgatcagaacttttgtattgtgtggatttggttgatatatattcttttgttttcccacatttaagcactatatcatatattatttatttcattttttattacatgcaactctaattaatatttatgataaattcgtagtttgtttattataactataatataggttgttatagaagaaagtttgagtaattaaatatttttctccatgtgctaaaattaagattcctgtgtttgtgatacaaaatgatcccactaattggccgatccagaattcaatgctaggataatttagttatacatttaatataatctaaaataataaataaatagttaaatttaactagaattaatgatggtttagcaacatttctatcgtagtggtcataaatttgaacctaatttgaatcttatacttgatttgttttttctaataaaaaaaatagatacatgcacatatagaaagaaagggcaatatgatttaaaacatggtcttccatgtaaatttaaagcatcttaaccaattattctatttaattactatgtatatatgaaaacaaaaattgtatgttaatatattttcaaataaaattgaatgaaattagacaaaagtccttaaatttaacaa

SEQ ID NO: 239196 - DNA, 2242 bp, Cannabis indica
agattggtcgaattgacatggccgagaggttcatgaaggacatggtggagagagggattgagcccaatgtagtgacgtacaatgtgttgttgaatgggatttgtaggcatgcgagtttgcatccagaggagaggtttgagaggacgataaggaatgcagagaaggtgttcgatgaaatgaaaaggagagggattgagcccgacgtgacaagtttttctattgttcttcatgtctatagccgggctcataagccgcagctctcgcttgataaattggaggaaatgagagagaaaggtatctctccaaatgtggcgacttatacttcggtggttaagtgcctgtgttcttgtgggaggctcaaagaagcagaggagttgcttgatgagatgatcagaggcggaattagtccatcggcggtgacttataattgtttcttcaaagagtttagaggaagaaaagatgtggaaagtgctatgaaattgtataggaagatgaaggaggagagtttgtgcatgcctagtctgcatacatacaacattttggttgctatgttcttggagctgaatagtttggagagtgttagagagatttggaatgatatgaaggagagtggatgtgggccagatttggattcgtacacgacattgattcatggattatgcgagaagcaaaagtggagggaggcttgccagtattttgtggagatgatagagaagggttttctgcctcagaaagtcacttttgaaactttgtacaagggattaatacagtctgatatgttgagaacttggaggagattgaagaagagacttgaccaagagtctattacgtttggttctgagtttcaaacttatcaccttaagccttataagagataatatgtgcccacactaataagcaattataaacaaacacattttgagtaccggatcataatttatgcgttcaattcctagtatccgttctttctacagtggcgttgctaattttcatgcgattgattacttttaactcacaaggtaaaaaaaatttaaaaaaacacccacaaggtattatatgaagttaaacactacttgagtcttgagttgacaaagaagcttggcggtaaaactgagggactttctatgctaaatagaaaagtaagtgtgccagttctgcttaatgccttaatacaattaggaatttttctcactagtttcaccaactattctttatcttcgaccctaaaacatttctaaaccaatatcatttcgaaaaacgaaaacatttttttttattattataattaggtgcgaggcgagtaaaaagcttgaccattattattatttacaaaacggaaaagtaaagcttgtgtatcaagaattctttttagtgttttttttttctttgatgaaaagaattctttttagttattttaagcagttttgttcttagtttccctttgtgacactagtgcttcatgttctgaagtttgatatagcatgtgaagttgcagagttgtgattgatgaattgagtcaattttaataggaaaaagttggagatttacttctgatttatttagcaaaatttggagtcaggagccaagttcttgtcaactgttcgcaaagcaagctgtactgatgtagaaaatgcagctgtgagatatgaacacacacatatctatatatttcctctaactaatagtagtactgatatataaacattgcagaaaatggcgaatgcacatgattttatctcaacatttctggacaaagaatagctattgcaagagcactcctggtaaactcaagaagccttctttttggatgatgctggtagtgctcttgatgctcaaagtgaatatctagttcaggtaagtttgacataccacctttctaattttctcaatttgtctttttctcaaaaatctattttctttttctcgacatgaaataagactaatacacaactaaaacttgtattttaattggtttgcaaacattgcctcaaattttgtgttaatactaaaggataccatggattctctaatgaaggaaagcaccgtctttgtctttgtcatagctcattgtccaatgtcaaaacagcagacaccatggctgttgtttctgagggacaaacagttgaaagtgatactcatcagaagctactctcgaatcgtggtatttatacttgtttggaggcaatttacaaggaacttgagaaataatctgaacttgaattactattgtagaagacaagtt

SEQ ID NO: 239197 - DNA, 3650 bp, Cannabis indica
tttttatttatttatttatttattttttattttttattttcgtctgtggcctctgttcccgccggactgaacaaaacttaattaacaatggcttgtaggcttccgacgcagctggctacacctggaaaactccatcatcctcatcacacaaagctctcaacttgccatggcgtactatcctggcggcgtactttagcaacggatgctctctgttcttcaaccccatcttcttccacagctctctctggttcgtcaccttcattttttattcaacatttacgaaatttatgttttgggtattattgggttggcttccaatttccttatttgagttgattactgtttttgtgggcattttggtatcagtgaattctcacaagcggcctttagtaacttgtactgctcggacgaatgttggagcagtgaatcttgctcccgggacgccggttaggccgactagcatacttgtggtgggtgctaccggaactttgggccggcagattgtaaggcgggcactagacgaaggctacgatgttaggtgcctcgtgaggcctagaccagctcctgctgattttcttcgtgactggggcgccactgtggtcaatgtacgtatcaatcttccctttgctttcgacgtttttcaatataattttgactaattctaaactaaaccttccaacccagttactggttttgtttgcaattatcattactctatcaaacattgggctgcaatgtattgcatattgttgtgttttagacaacaccaacaacctcaactatcacatgaaacactcaaacacaaatcaaatgcaaaacagaatgtaaacaataattaaaatgacagagaaatattagaacacaagcaattatagaggttcgaattcgaaattcctccttaaaatggagagccaattcctcttgaattcccttaggaatcctctttcactatatcaatgttaaaactttgaaacaaattacacagctgaaactatatcgatggtgtctttgttagaaagtcccacattgataatgtgtatgaacttaataccatacataacaagcatagactactcctctcattgtcaattgccttttgagatggaacccatgccatgccctttttctatattactaagtaatgaacttaatggctatatctaggttactgcaaaacacatttttatatagtactttcaataccaaacttagtactatataaagaaaaatgttatcccaatcacaatgtaatactataaaataccatacctcataataacacatcctgagatagattcaattgagtgaatgaacaactactcattcttatatatctgtttattataagttgattgttgctcagtaaaccagttccattcagaaatcatgatgttgaggggacaatgtattatttatatgctgtttgtttcaatattgttgtagctaagtagtaagaattgttcatttgtgccaagttggttctgtggtggcatgttaaatttgtgtagcatttttggtaacctgaagttgaattactcactgcgaagtatttttggagcaggcagatcttagcaaaccagagacaattcctgtaacgttggttggcattcacactgttattgattgtgccacagggcgcccagaagagcctataaagacggtaggatataactaataattttctctacagtagtttcatattgattggtttttgcattctttttatgctatatttcttttttcctaaaaacaagtagaggaattcatgtgtcattcagcaagctcagtatatatctttatggtaaaggtgcaaatattgattccagacctttgctaagcaatcatttttcccttaaactaagctctttattgtgtcttctttatttttcaagtgctatgtggaattacctgtttgtacaaaatgctgtttgttaaaaatgaaaaggagaacaagtctaaatcctataattgatttgttgttattcgttgattactggccttaactgtatctttcctttctcctgtttaggtagattgggaaggaaaagttgctctcatacagtgtgcaaaagctatgggaatcaagaaatttgtgttcttttccattcacaattgtgataagcaccctgaagttcccttaatggagatcaaatattgtactgagaagtttattcaggaatcaggcctcgatcaccttactattaggttatgtggctttatgcaagtaagtcacgaaactgattattctactttcctatacaaaatttgttacatgcctaatgttactctttcataacctatgaagttgatgtttctaatgttagtatttaaaaattctctcgattttggttacaagttcaataacaaagttgcttgtcatatttttagggccttatcggacagtatgctgtacctatactagaagagaaatctgtttggggaacagatgcacctactcgaattgcctacatggacacacaggtattgcatccgtcaatgtcctttttacatactttcgatctcatttttatgatatctgatccattttgtgtaggatgtagctcgtctaacttttatagctttacgaaatgagaatcttaacgggaaacttctaacgtttgctggtcctcgtgcatggacaactcaagaggtaaataagaacattatcattatttcaacgcttgtttcctcctcttttactgtttgctttctcctagctcttcagtttactaaattagagcttatcatctttaaaaatgctacgtatactctctcccgaacctacatattccaaaaaccctggcttacttcattgttacctgaaaccaaagcccaagtatcttgtaggtgataacattgtgtgagaggcttgcggggcaggatgcaaatgttacaacagtcccagtttccatcttgagagtcactcgacagctaactcggttgtttcagtggacgaatgatgttgccgatagactggcattttcagaggtaaattatgcaatctcctctttgatgtaaaatcatttattgcagaactaacatgttgcctttggtattcataggttctttcaagtgatactgtcttctctgctccaatgaccgaaacatataatctgctcggtgtggatagcaaagatataatttcgctagagaaatatttacaagattacttcacaaatattctgaagaaattgaaagatctcaaagcacagtcaaagcaaacggatatttacttttgaaggaagagcccgttttacaatgtagaggaagccatgtatgtattgacaacttttggggtttgacacacctcatttttcttttcctttttatctctttcaaaaatttatgatgtagaaagtaaattgttgagtaccaaagcaacaaactaagattgcaagagacaatacattcaaaggcagtgagaagcaaagatagcacaatcaaacgcaaactttacttggttcggatcagaattaaaaaaattcactttccctgtcagaatcaagatcacaatacaagatcactttgatatgcactcactcagccaaagactagctatattatagaattctctcaatgggaatctctttgaaggttatggtgaactctaatgatgaagattgttgaagaagccacctttatatcaatga

SEQ ID NO: 239198 - DNA, 2284 bp, Cannabis indica
tgtttaaacaacatacttgtgagtagatctaagatcctggtaaaataatatccaacacatacttctcatctgcgaggacaccacacattaatacaatgataaggggctgaagaacgattagacaaagtctaaaagacctatgacaaatgaaagttctccatgtgtaaatttcaaaatgcacccaaggtgagctccatgcagctaaggggagctccacgcagctaaggagctccatgcattagctgctctacgcagctaagaggagctccacgcaactaggggagatccacgcattaaatgctccatgcagctaaggggagctccacgtataagctgctccatgcatctaggaggagcttcatgcacgagctactccacgcagcagcgagcggcctccacagctcgaacacctgtagcctcatgttcccatgtatttggtctactcatacaaatagaagcaagaagaagatattgagactggaaatgtttaagccaagaatcgcagacaagatagcaactatgcaatgaatattagtataggagacatggctcatttcatccgaggtacaagcaaaagaggcaactttagtgtaacttaggatgtctgatatatcagactacctgagagactatgttatcaggtgtgaaagcgacttgacatcctatgtttttgggatttgataaagttgtaaagtatgaaaggctcactataaatagagcccttggactcattgtaaaggggattctttggtagaaaaaaggatattgaaaatgcagtttttctaaatagtgaagagagtaatatttacttcaagtattctcttattaagatcctaaaaaatcattttaagctcttgttatttcgttgacgagctcttaccgtcaacactttgccttttgttcctttttcgctgtagcttgctcacttttttgctaagtcgcatacgattctcgttctcgttcacgattgttttaggcaaactctcaatgcttcttgcagcatcatcatgagtttgagaagggttgttaaatatttattagtgttagtttagtcttttcaattatttgagtgttttatgttattgtctatataaggtttgcttaaaaattatattatttaattttgactttgcaattaaatgaaatcatgacctctctttttcttcttttttattatgttttctgttattgttgaacaattatcacttggaagcttgtgaactaatttactcatgtctttggtcttttaggtgacagttttgttaacagcgtttgttggattccttgtcttgctaatcacgttctgcatgacttggtttcttgtgctgcgtcccacgattaggcttgttctttttcctcaagggaaataatgctccttctttttcctcaagggaagtaccacctcaccctttgttggtactacaaactaggttgctttgttttggattggtttttgtggaaattgatcctccaaaccaacctattatccaactccttaaaccaactaacttaactaactatcggttatgttagttagttagttggtgctatccttgtttgagttgggtctatatataagtctagtctttttcactttaaggagcagagcaacaaaaggttgaagagagagaataagagagaggatttgggagttgcttagggttctaagctgagagttctgttcttgaagagggtcaagaacaagggggtgtactcgggttggtagagagaaaactgtgactgttttctctggtgtgtgtcaagtgccatctaagctgtgattgctctggttattgtaattgtattgatgctctcttattcacatattaatgaagaatttgtgatgtttctcagctggagtatggccagggatcatgttgatctctaggaccggaaccaggataaaatcttgtgctgttctttgattgatttctggtttgattcattgtgttgattaattggtttatgttcattattactgttcaagttgtgagtttattgcaggttttatgattgaatcctcaaagttatttccgctggaattacaacaaaatcagagcttaggttcaagatccaattgaggaagtcaagaatcaagattcaatcaagactcatctgcaaccagtcatgacaggatcagcaagatttgaacttgagaagttcaatgggacaggggactttggcctatggagggaaagtttgaagggaattcttgttcatcaaaaagttgccaaggcatttaaacccaaggaagaactcattgacaagttgcagaaggaagaac

SEQ ID NO: 239199 - DNA, 1860 bp, Cannabis indica
ctctcactctcgaagccccaactcctacaaacatctcaatgaattctgatcccgaaagcgagaagaaaggcaccccggcctcccctgcaatggccttggctagcagtgtcttccctgttcctggtggccctactagcagaactcctttcggaatcttagcccccacggcagcaaacttttctggggtctttaagaactctacaatctcttgaaaatcttgctttgcttcatcaactccagcaacatcatcaaatgtcacccctgtatttggcttccatctgaaatttggctttgctcctggtataaataaatattggttaagtacttatgaaaaagtttaaggaatgttttggtagcccttcttatgtttctgaagaattttttagctcaattttgtttaatgattatgtaactattttttaagttgtttgaacttatattgaacaaaaaaatctattttaaatatcgaaacagatagaaaggctatcaaaacattccgagtacagtatgtgaaggtgtactacaaattttatgtaagtattattgtcaaagtaaatacataccttcctagaccaaatggtaagtttgggccaccagcaggtgtgtttgatcctgaactccttaagagtaatgctccaattaatatcaatggaaatgccaagtttcccaacaaatcaagtacagcaggccacatgctgacctccaaaggatgagcagcaaagtcaacattcttctctttcaatttggttaataattctcttggcaatccaggtaactgaactttgaccctttggatcttctccagtgcaggagtgtatatctcagcaatagctctagtaccattctcaaaaaggtcaactttctttacagctccttcatctaagtactccaagaatcttgagtaagacattctatttgaagttgatgaaacagggctctctggctcagctgcctttgcaggggagctaaaaacagagaaccctgttcctgtaatgcctaaagtagtaaactttatcaaatttcttctactgagtttgaattctgagggagtttggggacatgggtcttgtctgtttgtgaattttgggacatgggtatcctttgatgaagtgtattgggatttgtataagggagggagtgagagggagagagataaggcagtggcattagtagacattattgtcttaaaaactcaatcttgcaatgttgtttgaatttgtaatagtaatgtgtttaatgtttgaaaaattggtaacttggtattggtaaagacttgtttaaatatgtaaaaactaagagacttccagtactttttttttgtcattttcttttttggtcttgaagattccagaaaggtgttagtagttgttgttattagtagttgttattattatggtttataaatcaagcttaaatagttgttgtatgaaggttcttgaaattatgttggattaacacaaacatcgtttggacaaattttatgttagccaaacacttggaagaagaaaaatggtttattatggattagggtgtgactttgaactctattaatcacatcaaaataatgatgccaagtaataagtggctttccttacattctaaaatttcaaatcaatttttaaagaaaaaatcaaataaaaaaaaacaaaacaaaacaaaaacttttgaataaaaaataattgtttaaagaaataaaaattaatatacaatgtatacattattgttttttttttcttttttgaatattaatttttgatactaaaagaaagaagattgttattaggcacataaaaataattagttatattttataaaattattgtattaaattatgtggaactaaatatttaattgtactaa

SEQ ID NO: 239200 - DNA, 3205 bp, Cannabis indica
attaagtcgcaattgctcactgattaatgcaaaacaagcttcactcactgtaatgagtcagagtcacacctgatcccaccttcactctctcaataaagccaaatataaagtcaatgcagtggtcaactttttttatcaaacgatcaccaccgttgaatttatgttttgacgagtcaaagaatctaccatgtggacgctcgcaccgtatctttttctctcttccctataatttgttgtagcgccaaattttcgcggcgccttctcaaaattcgaattttcacggaaaagcatagaaagttgaaaagaaaattttaaaactaaaactagaaacaacttcattatccctctatttttcagatctgattctcactcaattcgaactcttctctgaatatctttactttttctactcaaaatcttcaatcatattttcttttcttcttgattctttaattaaatttattgcgggatgagctttggtttctttcaaatttactaagctcaaaatcgaacgaaatcaatggtgagggagcaaagtgtcgagtctttttactcaaagctccgtcaatcggcgaaggagtcttctaattctcatctcttgatatttccgtcaacttcagatgcggattcactttgcgctcttaaaatcattttcaacgttcttgaatctgattcggttcgatatgcttgttacccggtttcttcttttcaagaaattcacaaatatgcaggttcagatttgtcttcttcgtctgagaaacctgtttctatacttttgattaattggggatgtcaccgggacttgaggaaagttttgaaattagggccggcggcgcgggtttttgttgttgatagtcaccgtccgattcatttgcataatttgtgtgagcagaatgatcgagtggttgtgctttatactttggatgatgaaaaccagtctgatttggcgtatgattttgatgtttcggctttggctaatgcgagtgagatgaatagtgatgacgaggctgatgaagattcggaaagcgatgatgatgatgacagcgaaagtgaaagtgaaggggaagaagaagctggtcgtgggtcgaggaagcgaaggagagtttctccagaaaatgaagacgatccagttcagctttttcggaaactgaaaaaggagtattatcgaatgggtacgtttcatggtaaaccttctggttgtttaatgtatgaattgtcacattctttaaggaagaacacaaacgaattgctgtggttagcttgtgtttcgttgactgatcagttcgttcatgagcgtttaactgatgaaagataccaagctggggttatggagcttgaacaacatataaacagttcgggtaatttggatgctgtaacttctgtaactcttaaagatggaacaaagattcgtgcaccctgtgcttctagaattgcttatgaagatgagcctagactaatgttgttacaagaatggaatttgtttgattcaatgctttgttcatcgtatatggcaactaaattgaaaacatggagtgataatgggatgaaaaagcttaagcttcttcttgcccggatgggatttgcacttgtggattgccaacagaagtttcaatacatgaatcttgaagtgaagaagaagatgaaagatgagtttgaacggtttctacccgagtatggacttactgatttctattacaggagtttcttgaggctacatggctatagttcaagggtttctgctgcagatgttgtctatggagttactgctcttcttgagtcttttgtgaaaacagatggctcttgtgcatctaagcagttcggtgtggcctatgatgctttgtcgttgggcaatcttgataagctcaaagatggaatgcaacatgctattaagatacaaagagctattctaagacagggaagcacagcgataactaagagcggttgtataagaagtggaaggaagtttcggtgggtgaagcttgaagattcggtggatacaaaactattggggtacccacaagcattgactaagttttgttattttttgatggatgctctgcgggaaaaaggcgctagaatgaaacctttgctatgtgcttgcttgttgcatgagcccaacaaggtgttgattgtaggggtttgtggaaagcctcgacttggggctgttcaaggaaatgcatttggaattgcatttaggaatgcagctgaggagattggagcagagttcttccatgaattgtttgagtcttcttggattgtattagatactgcttctgtcaattcttttatggtaaggttaacggagaagctctgatgtggaaaatctgagaagcaacataaagtttgcacccacaggcgacaagggctgtcctaacggtcagacctatgatttactcccacaagtttggagtcaagaaaagagaaaagaaagaaaaaaaatcaactgttcagctacttgaagcaagtatgttcttaacaaattgtggcttgttgtctaagatgttccaaaaatgaaatcttgtagacttatacttgatctgtaagaaaaatggtgtgtttttttccctttcattttaacattatttctgttgtaccatgatattcttctaaacattaagttaacttttagctctcttaaatttgtaacaagtacattcattttatgaactgaaaaagtggcataaatgtaattgtagtttcattctccactgttttatgtacaactttgtttatgtattacatattcagaagtcatgcttctgtcataagatcaaatatttctttctcactgaatacatacatacgaatctgcctccatctttgatttggtgcttctagacaaattgctctttggcatggtctgtctgttcttcagctacaagatctagtttagtgacattgtaatttgtattttgttcattttcttttgatgtgttcttagttcttaccccttcatgtaactgtttgttcaatgaaatgaaattaaattgttagtttatcccttgttaatattagtgtctagaattggttacagttttccctgaagctgaagctgacctaagaacatgtttagcagtaagctttattctgatgcctggcttttgattcatttgcctgtgaaaatcaagctgagctttgttttgttaaccactctctccaccaacccatgttgataaccatgtcaatatttctcttgcagacaaag

SEQ ID NO: 239201 - DNA, 2907 bp, Cannabis indica
ataactaatattatctttttttttttttctcaaaatatgtcattgaaaactgttttctagtttagtatatgttctagaaattttggttacatttcattttcaaaaatggtatacgtagataatattatatgttattttggaaaataagaatgtaaaattgatgaattttttcttttagaagggattcatccttgagataattacataagacactatttttttgtaaaaaaaattacatttttacgttcaaagaattcttttttatatttttacggtttttcatagaaacaacacgaaaacaacaacaaaactacataaaagtaatataaaaataatatctaaataacaacaaaaaataacacacagaaaacaaaaaatcaacagcaaattaacaagaaaataatataaaaatactgtattttctgtaaataaaattaaaaaaatcgtaaaaatatttaaaattccgtgaaattatctttttgtaatttttttgttatttttgtgtatttgtgaaataatcccttcatctttttcctcaccactaccacacaaatggagcccaagtttgaaacgttttgtgaaatgactcatgagatgggcctggaaagtgctaatagcccaatcatgtatatcagaactgaactgaagtatattattaagagctaatgctaaattcagtaccaccacaagtgtcataatctattaggtcaaattaagtatttaggaatattttatatatttttataaataataaatataatgaaatattatagaatactattaattatttgcactcacttagtgtggtgagaatgcctaattatttgattataacaattttttttttaaaaaaagaaatagctgattttatccaattttttaagaggagaattcaaagttattaatattattattttgataaattgttacactataaaaaaattgtataaatgtatttttcgagacagaactagtttctcatttaaatcaaaattttattttctcaattcatatataataataacacatttcacaccatttacaatacactatttttatagtgtaacattagtattagaatataaggactgcatatgaattaactggcgtggatggtatatttctatttaattttacaatgtctagaacgtgtctctaaaaggaatataaataattaaatataaccttgcaaatttaatcccactccacacagagattttcgtgaaacccatttacacacgcacacaactaataatgataaggtcgcaatctttcgttcttatagttatacttcttccattttggtctcactcacaacatttaagataataattaatgagtccaaacacaagacacaataattaataattattatgcaatacacaatataatgatagtagaaattatttatttaaactaattataactagtttaccaccccacagctcttcctaatttggccattggtcccagtcaaaggactaatattccccatcttcaccatggcactggcgaagtcattgaagaatctaaactgtttattactataggtcgtgactaatgagtcttgtgatccgccattaaagagttcctgatcagagtggagaagtccacgcttattgacgagttgtccaaagtagttgttatcgaatctattctgggtggcgtcgaagggagcaaggttggtatcgccaccggagaaagggcagttggcctggcgtgtggtggcgaaggttgcgtcaatgttggtgtcgttgtagatgtgtgttcgaaagttgaggcattgggacatgccaagggtgtgggcaccggaaagagcggtcatgtcagtggcactgaggcctttgttggcaaatcggctgatgagagtggccaggtccgagcttggactagggaggtctcggttggcgtcgctttggctggcggttgttgagtctcttcttcccaatggtaccggccataatggtccccccaactgtgcccaaaaattaataagtagaaaaattatagttttaagttttttgttttgtttttattataaagattatgctattatataaatcaaatacacattcatttacaataacagaaacaacagaaaatatggggaggagatattctccaaccattgataatctctatacaactctaaaccatgctaagcaaggctatgagtagccataatggccatccgccttacatgttaaatcttgagaagaagatctaacagatgatgcagaaactaggaaaagtctgtctcactgtctccacatgcgtgattggcagcttagttgagaaccaattaaaaccatgaaacagagtttttgcctccatttcgtgggaacattaattttattctaatttgtaaagtaaaataaaataaaaaaggaacttggtaatttattttaaagaataaaataaattttaattctaattatgagttttttcctttttaaataaataatatacatatatagataaaatttactatggggaatttgaaaagacccatagattggacatttaataccctttgcttattagtgaactgcatcataatattgtagtagttgtatggtaatccgtatataatgaacatcatgatagaattttctaaggtgaaaattttaaatatttcatttttttttcttacctctggtgagatttgggagagattatttgcacaatgggtgatctttccctacattggatgatttttgaaggagttttgtttattttacgatgagttagggatcattaatgaaggagtagttcagtttgtgtatatcaatttttgtagggagatcgaaaattgtaggtggagttggtgttgtggctttcgttgtgcttcagtggagtttgtagtgtgggtttcttcgtgcagaggtaattagagtaatcaatttg

SEQ ID NO: 239202 - DNA, 2455 bp, Cannabis indica
ttttattaatatgatatatattatttttaatatatctattttattttaattattgtagtatataattttattctaataaatatatctttgtatactatatatttaattgttacattagccattttgtaaacttaaaaatacatttaaaaaaaacatatttatttatccaattaatcttatgtatttctagctcatttaaaaattattccaaattataatggctaattactacctgtctttgtagtttatattacatcatcaatcaaatgaactgtttagaaagccaaaagaaaaactaaaagggaaaattcagcattgtattcgattaacaataagtccctcagtttcttccttccaaaactagcatatacattaaagcaacctgatttacttctaagaaataaaacatctatcatgctagaagacagtctctatctattatataaaacaagtaaacaagtttcatttctttgaaaaattcattccctaatttctcaccgcttgccctgcttgtactgttgctattacttgagctacaacaatggcgtattggacggctgtatgttgcgaggtataatggtctccaagcccgaaatcggcaaaatttggttctatatgcatgaagtgacctggtaatgatctttttgacacagcatcctgccatagatcgaggaaatcatccatcatctgcctagccttttcaattgaagagatagggaggtactccaactgcaataatattcaagcaactttcaattgcaacattcaattcaaaatcacaagatttagatattttaataaaaaaaagaagacttaaaatgagtaaaacccatttgcaggtaaatgaccaaggcttgacagtaaacttcaaaaagtctcgtctttaacatatgtatactgtcatatcctactgctgagaaagtagagagaaataatcttcatcaaaaaagaaaacagagataaaaaaaagctaaaagcctagaactccacttttcattttccaactccccttgttacttttccatttccaactcaaagcctatgaaagccaaattctcaacattttagctcaaagtagtagaaaacacacatgttagtggtacaagcacggcgcatggtatggttacaaggaaattatagtacataattgatcagaatcagggtttaggaatgacactcgacttgttggactgaaagacggcaccagaagttgacattaactaattaagatacctaagaaaccaacatcagaagttgacattaactacttctcccgtgcagggacaagcaattgctgagctgcatacttcccacaggttatttagtaccgcaattatatatagcattcggcagatttgatgaaaaagtgtcaaaatgaagaacaaaaaggttcattcaaaggttcattgaattcttgtgagctccttcaaatatgaaaataagcacagcaattaaattgattgtcttgtgaagatcatgtttactcagatctcaaacacaatttaatcacccaaatatgatatttcaaaacagaaaataaaaaagtattcaaaaaaatattaaaggccaaaacagattcaaaagaaatctagcaatgtacttcaaactaattgatgaataaaatacctccatcactattcctctcaaagcttcagaatgagcaggtgaaactttccccaccctcagttggaagtctccaagttggtactgattcccctgcaaaaacaagtgaaaaatacacacaaaaatatgaagtgaaaaagaaatccacaaccaaaaagtaaaatatacttaaatatcacccaaaataaaatcacattacaaaacctcaaaattaagagagaccctcgatttgtatgactgtaatttatccattattgtctgaattgttgaatcagcctcgagaactaaacgctgcccacgaattatgaaatagtacttgttgggttgctccggtagcgaaatccccataaaatctcgagggaactcaggaagtaaagactggtctaacccaaaaagaaaaaggtgttaattttaaagaatactcaccatttatatccaaatacacaagtataattcgatcagatcaataaaatatagaagttatacctcgaagcataggcttgtaaaaagtaagagtagctttccacctgccatctttgacgccattcatgctctcgacgcattgtgttacttcattcacgatttgaccactcgctgttgtccctacattgggttgccaatgcaaaaccctaaaagcaccaccaatccccggattgattaagtaaattttcaaattgaaacacaataacagattgtatgagaatgctaatcaagaaaaagaacgatgatttggaaaagcctttaccatttgataggcatcttcgtgtgaacaatggcgctaagactttgcactttgtatagtaacaaccaggaaccaagtcaagaattgcag

SEQ ID NO: 239203 - DNA, 6682 bp, Cannabis indica
ttttataacttagtgttatgttatttttattttatttaatattagtatttttgttattattttttttgtattttcaaatatgctagtgattttaatcacttatttttgtgataaattttaatttgtagactaaaatgtaagaataaatttgaaaataaaataaaataaaacttagaatgcaaaaaagaaatattttacacaaaattagtgtatattcaaaatccaatacaacaaatagcgtaaaattttgtgcataatttaatgtgtcattagagtgaaataatgtcaaaatttcacactaatttagtaaaatagtacactattagagatgctcttagtggagtattttcaaaaactaaatctaagtaagtatttgaattttaggctaaaaaaataagagcaacaattttattatattttctatattttcaaatcattcaatcaaaaaactctttaaatattctcaattgtcggtgagacctcacccaattttgggggttgacaaatggagacctcctcctttaggctatgtcaaagtgaacacagatgtgaccattgattcgattggcaaatgcagtggtatgtgcatggtcatccaaaatgaatgggggttgtttgagcttcagggagttggagattagaaggttgttttgaacctgaagtggcagaagctttggccattcgcaatgcgttgatccagtgtctttcatttgggtatgacaatattgttctcgaatcagattgtttgagcgtcgttctaaaaattcaaagtaaggtgtctattattacttcattgggctttgtcttagataaaattttagtttttacaataagttcaaagttgttagttttatccattgttatagattttgtaatatcgttgctcattctttggccaaactcgctctatttgctagtagtagtatgatttgggggccaagtaattctagttgtatcaatgatcctttgatagttgatgctatccttgaactatcctcgcctccacctttttagagtacttactgctcttggtgcttggtggttgagacttttgctcaaaaaaaaaaaaatcttttttccttaacacttttctcatattcttattttttttaatttgagattcccaaccaattacaaatttaatattttcaaactcaaaaatactaaataacattacaaccaattacatctttagaaacaatttttcacatacaaaattcaattttttgtttccaaatcacttttaaaaaacataatttttcaatcacaaaccaatcaactccaaactcttaaattttgttgtgaaattttaaaatgtgattgtttgttatgtcatttgaatttaaaaaataaattttgattagttggtaagcttaaaataaaataataggaaaatatttgaagagtttttaaaattttgtgtcatttttaagctttttaggttatttggattaagttttttaaaacagccaagcaatcaggccccactatttaagttttgaaaataataaaagttttcaaattgtataagattcagatttcgtttttcaaaactagagtccctgcctaaacttacaaatatttaaagactaaaaaatatggaaattactatgtagataatacctaggaggaactcaaatctcagattttgttcgaacaaatcacctaaccattttgagctacccctcttgaatttcagaatttttttaccataattttaactttttcctcttagcatctaggttaatttattgattttttaaattatttatacatttaaatttatatataaatatggtcttaaattaattaacaagtaactagctcatttccaatcttataaatgaactagtatctcattactttagtgtaaacaatggacaaaaaaatgtcaatatttcgtgcaaacttaagttttttgattgatcatttttgttagcaaattttgtgctgatgtagtcattttccatcaatggctgagaggggaaaacagaaaatgagtgcagaaatgttaactatggatatctttgtttggacctaaaaactatttagtggagaaaacgagcaccacttacaatacacatacatatgtgaacctaataatgcaataataattattatataattagctacaaaacaaggttaacattatttatattgtacttagcttaatgcttttcaaaactatatcatttcttttcccctttaacaaaatccatcaatgcaattaagggccaccaagtcactgacttggctctttctacaactcttccaaaaagctaaagttggaagccaccacaaaattgcacaataatgcccaataaaaaattcataagatgtttcttttaacaaactttatattggcttgtatacaacccaaaatgtgttttgcatctttgtttggtagctaattatctataaccatttcactaaaactaacctaactttgagattttaatataatgtaatgcctcttagcactaaaattcttatacaatgtgagaaaaaaccacttacttgcactttgagctacttataccagaattaccttaaaaatcaaaataataaagctgccctctcagttacctttgagaattaattcaaatccaaactcgaacgataatagtgaaaaacaaaatacccaaaaaggcataacaatgagtgagtgaactggaccacacagcctttgtctatatccaacctattaatatgctaaagaacaagctttgattagctttctgaaacatgataataacatacccactggtgaaaaacaatccaaccatgagatctgtcattggcccaatcattgtacaaaagcgataagatctagtgtactattaccattcattttaatataatagcaaaacccacctaatatataaaaaaaaaaaataaaaaagacattgtgagagataagagaagtaagaacttcaagagctcaatatttttgttgtttagttaggttcatagatctcactcactaagcaaacaaaatttagtctttaccaaaatctacctatatgatgttattaaaaggtaattaagccaatgaattaccaaaactcaagatctattagttcaattcacaaattcaaacctggtctgaaccacattactcaataagctaagggtaagggttctttcttaactgatacgggaaatagtcattatgttaaacactacatgtgaaatcttctttgacacaactcacaagtactagaaagaagctaccaacataactagtctactcgtaaagttccaaactactgacagtagtagtccccatttcctgtccctacctacagaatagtttatcatgtaaataaagcaccaaaagtttcttataaacaatcaacctatagggttcaaaacatagccagaaaaaagaacgaaactctcccggtcacattcatggtcgtcttagtcaatatattagtgaaacaaaatcaatcaagtccaaattaaaggacttaaaacacaacaagatctctgaagaatctaaataccctgaaaaacagaacagtgatacatcatctcccaaataaaactatcattgaacttagtctacaaattatcatctatataccgaaattgccaaacattacaggttattttgtcctcaaaaataatgtggacaccctataatctctcaagtttctaaattgaacttgtcttctcatatttatcaattaaaaccatccttaatttttcttttcataaatgttcccaaagacaatctgaaccaacatagcagcagaatataactgctccaaataagtaagaaagctaggttaggatggttttgaatcgaaaaacctcaaatcattagacacagaatctctaactaaaaaccaagatcaatatctatcggccaactgttacatgttcattacacttgccacacaattctaaaacccatcattactttacaagaaaattataacagacaaaaaggaaaacaaaagcataagaacttcaaatccaagcaaagtagtctccacagttttgtgcaataattgaaaatgcaacgaccgaaacaagtgtataatagctaacaaataaacattatgatgtaaaaaaggctattcaaaacctacctaattgtaaacaataaaaaaaaaaacaattgtgttaacatcataattaattactgttgagtgaattcgtacacaattgccccatgacatgtacaaaatcacatcttgatcttcccttacaaaatgaccaattaggtttatataaaattttggggaccacatcaaaacccttgtggaaaacaaatcaaattataatgcccactcaaaaagaaagactagaaacataagcaaaacgcattaaaccaattagcaaaataaatttggtgaagaatctatacattaatttacacctaaactaaagccagctaatcatctcaaattataccccatttatttatgggaaatatagtaaaacaattttgaaaaaaaaaaatctagaaaattaaataattcaaataccaacccggcattctcttcctccaccgaccagtttcccggtaccacttgttgaagaaaggccaaccccaacgtcctcacacaaaaccctaagcaacctcctcctcaatcgccaaccaccagtacggaacccaaccctagccaaaaccctaatgttgaaattcacaatcccacgacctctgtccgtagcaatgccgctaacaacggacttttccacgtacgaattaaaggccgagaaagtagcgttgacagaggtctgtgaccgtgtcccctgagtaaacggggagattcgtgtctccgccaaaaacgttgatctgtaaaaaacgacagagtcgatctcatcataagcgatgctcatctttttgttagggttgttaacagagaatccaatagcccagtttccagaaacagccggagaagaagaagagacattgaaattggtgagcgagacggagtcgactgatattttagggaggcggggacggagtacgagccagatgatgaagattatagaagcggaaacgataaaaaaagctaccatcaaagcaaagatacgacggatgaaggtagtgcgtgctggatcgtaacgatagggataaccgtagttggggttattaggcggcggttgctggtgatggtagggcggcgggtaaggataaccattgggattagcagcgttgggttgaggctggtgaggataggtggaagcagggtaacccgttacgggtcttgaggtatccgccattgaagaaaagcttggattttgagtgagagagtggagttggaattttagagagagagagagagagagagaatttgttagtgatgagagaaagctaataaaggaagtaaaatatgctaaggtcggctatgttgcaatcaattctctcactaatatttattcttttttcaaaaccgagtgtctcacgtgtactgcacgtgtttttcttttttaaatttagaaacacttgttgttgtaatcatcgtttttataaacattcgcggcagttcatactagaatgaaaggctacaaaaacaaatttctaactattacatagattttatcgtctaactcgtaataatattgagaaatttaataataatattgaatgtaccacttttattaggtgtatatggtataatttaagttaattaggatttttatctcctaaactttaacgtatactaaattatgtcctttgaacctgctaaaaatttttcctgaactattgagaatggcagattgaagtacttctatttttttgaaataaaatcatcatctttattaattgcaatccatagtgattacatgattaaaatctggagtaacatcactactcctggtaacatgatcagcaactaaataggatgctcgaactaaaaagtgaacaacactatttgcagaacgtctattaaaattgacaaaaacatctctcaaatcatttaacatcatcttacaatcagaaataacacttccaaagtatgaaaccataggaagagaactacgtaacgcttgcaccactgtaagactatcagtatcaatgacaaattgacaacctccttccaatcctttgccttaatccaacttagcgcctccttaacacccaaggcttccaccatttcgggttgcagcactcctgaacgacagcagctaaacgcctccaccaacgcaccagtttcgtctctaattacccccgcaaagctataagttcccttctctgaaaaaatgacagcatcaacattcatcttcaaggtattaacaactggtttgacccgtgtttcatcgccatatatatctgtaaggaaagtagcagtgggaatcatagttgtatcttgagcctgagtccaatctgtgaggagggctttagctaaatgaacaacgctctcaaccgtgggaattttcttagaccaaactaattcattatgatgcctccataccgcccaacacatcattgcagctagccttcttttttcctcatctacctgttgtaggaccgaagcaaaccagttggcaaaagaactaactgctgtcagattaacaccaacagccaactgttgccaacacgccttggcaaaagagcaatccaccaggttatggtagagtgtttcatcaatttctttgcacacagggcatacggcatcaaccagcacatgtctagagcgaagtctgtttttgtaggcaaaca

SEQ ID NO: 239204 - DNA, 3287 bp, Cannabis indica
tttacatatattcttaagagagacgttctaaacctttttatatatatatatattatgtgttatgaagttgttgttcagtgctcaaaagttcaaaaaatttctcccctcccaatcttattatgactttgtccccatgcataccctatattctacacacttgttagcatattcatatctttctaatttaaacttgtcataaaaaagtaatttttttaacaacatttaaaagtatattttttttggggggggcagacttagtgtggactttccttgtaggaagttggcagtcttttatttttggcatgtttgttatgggctttcaggcagcctcctatgcgttttgggagtgttctttggagttgttctttggtatttgtttatttgttttttgtattttagtttaattagtctttttggtgttgttcactttttattcgtggtagcgttagtcttaggctattttgtggtttatccctctaaatgctccagtgtgagccttgaattatccctctaaattggtgtggtgagtcgatatttgtgccatttccttatgagtttatgcggttcgtccgctgggcgtgtagggctttggcccctttcttaaaatgaagttctataaaaaaaaaaaaaaaagaaaaagtattttttttggtaaaaataatttactagaaatgaataagcaaatgaaggagagataaactccaaaaactcattgtgtagcccaaagaaaatgcaaagatttttttggaaatttagacaaaaaaaaacacagatagagcaacttttatcccgaaaaactaacagcctccaacaagaaaagtacacaatttaatatcaggcaaaaaaggaagaaaaaatagttacagccaaataaaaatcaatgaatggaggtatcttttcttctgtctagcttccgagtaaaaatcaaattaactacctaactctgacaaaccaatactagaatccttaccttccttcaatttcttcctcactttctccactcgttcaagaacacccttcacagcaatatcaaatgcatcttcaaatctctctaaacttgacttgggatttgcatatataattcttggtatcaactttataacatcctctctcattgcaaacacttgactttgtggaactctctgcaatgtttcagctatgctaactcttctctgcttcacatcactttctggtatcatcacagaatatcttgtttggttcccgggaaaatgcaacaaatactgcttgtaagctgaatttggattgaagaaaacaggaatacagcctgctagaatcgaatcaaaagttgatcttctagtgtaagagtctcctgaaggctgcaaacagaaaactgaactttcaaacactttcatcacattcaaaggctcatcacacaaattagtactagttggagccttattataacagcttagaagcttgcataatttccctgaagactggcattgcttgatgatctcaccccgaatcgagtcatccatattcggccttggagcaccaacaaaagagaaaagataaggccttgttgtggctctcattcttttctgccaatcaaacacttgattgctctttgaaggatggaagtaagtggggtatggtattgcaacatcattgttagaaaagctcgattcgattgttaacagagtcatgttcttcgattctggtaagaccataagcttagaaccccagtcagatttttcatcagtttgtcttctaaagtcccaagaaactctcccaccaacaaggaaatggtctcttccccacatgttctcccactctggcctttgtctaagccaattgactaggcttttagataaagaatctctcattgctgtgttggagtcccaaaggaagcgtccgagatcaagtccagcatagaatgggacaaagattgccgaggccaaagatgagtcataggtcaagcacttgtaatgcttcattttgttgtgaaatatcacttctaaagagaattggtttgtgttgaaccatccttgtttcgataaaactcttttccttttagctttcttctctgttactcttggaccaaatcccatgttggttaagtatggacagaaatcgaaccaatctgagagagaattacaattcttgagaagctcttcattgaatttggatggtagattatggacataaacgtatcgaccagagcaagaatccctttgattattatgatcatgatcatcatgaaatttggtgacatttgtggtgatgttaaccccaacaggaggtaaagtctctactttcgtcatattttttgaactgagtattttgtgaattggctcattctttctgctagtgacattttcttgtgtagagtgtaaggatactgaataggcagagccattattggcttgggttttagtgaaattttcagtgcttgtatcaaaacttgtatttggattttgggaagtggttgtaatattattagtgtcactcttagcaaagttaaaaaagaagaaggtgaacccagaaatatgatttcccgaactcgaaaatgtggagaaaccaacaaaaaagaaagggaaaataaagtatataaaccaaaagaaagataaagtgagaaagacaaaccagaggtttggaatactgtggcacctttttcttgctaatagtaacttctccattgcttgtatatcttttttatatattgttccctcaaactcaaattaacacatgttttatttcaatagaccaccattcatatatacatatatttctatgtgaagaaatagtatactcaaatccaagaaaagaaaatcacaaaaaaaaaatccttgtcttaattagtgaaactgaagttaaccatattcgagagagggcgagtgaaaaagggaaaatctggtttttttatttttttttttattttaaatgaattaagaatttaattaggtaataactacaagaaaggtaaacatataaggcaacttaaataatatcacatagaagatcatgtaataaatggaattccttattgggatacgaatatagctgtataaaatctgcaatgctaacttgaatgtgattcactatatgacattaatatctaggcaatataccaacggaaattgtgtttgcgggtggaggtagtgcggtttgtaattttattttttttttttaaattctaaattgcatatacggtttttctaatttctcaaatcgcaatcgcaccgcgtaatcttaaaacagcaaaatctatccatcaaaaatacggtatggtgcggtgcggtttgagcggtttacactatcattat

SEQ ID NO: 239205 - DNA, 2121 bp, Cannabis indica
atacttgaattttcggtagctttaagtttccatgtgcttttagtcattcaaaatgttttttttttttttgattcactggaggttttaatattatgggttatgattgtgttattattccagtttttcctttttcctttttcccttttttattttttttatttagtttagcttaatgaactaatacaattattacagtttttgcttaattagctaaatttcattttgggttttctttttcttaactattagaatttatgtttctcttgaggtccaataattatcgagtttagattatatgcccagatgacatttcttagtttttagtgttctcattattctcaatttcttcttaggtgtgaattcaatcaattgctttatgagacatttttaatttgcctttgccatttcctttgctttgtataaaatgtgttttctgtctgaactttcttgatgttaggacacaatgtaggattgctttttgttaattctcgagttcttgctctttgttgaactattttgtttttttttcctttaatggaagattcattgtactgtacatctacgaaaattggcagtgcagttcttgttttaaggtgttatctttaagttttctggggtaaaaggtttcagttatggctggtgaagctttgatcagtgttaatggcaatggcaacgacagtgtcaacggcaacgtgcagcttaatccacagaggacttaccaagttgttgtggcttcaactagagatatgggtatcggtaaggatgggaagctgccatggagattgccttctgatctcaagttctttaaggacatcacaacagccacctcagatcctgggaagaaaaatgctgttttaatgggtaggaaaacatgggagagtattcctcttgagcatcgtccactacccggtcgcctcaatgttgttctgactcgctctggtagttttgatatcgccactgctgagaatgtagttagctgtggaagcatgacatctgctttggagctgttagctgcttccccttactgtctgtccattgagaaggttttcgtcatagggggtggccaagtactaaggttcaagatttatacattgcttgctgtttttctcttccgctttaccattccttctgttttcaattgatcgaaattcctgttttcagggaagctcttaactcgtctagctgtgacgctatccacattacggatattgagacaaacattgagtgtgacacatttatccctgctattgattcttctgcatttcagccttggtactcatcatttcctgcggtggagaataacattcgttattcctttaccacttatgtccgtgtgagaagtcctgcagttgaatccttaaatgaaaatggtgacctgaccattgatggtaagccagatattaataagtttgaggttaagaagttctctttccttcccaagatgatttttgatagacatgaggagtatctctatctaagaatggtacaagatatcatctctgatggaaattctaaagatgatagaacaggtactggaactttttcgaaattcggttgccaggtaatgatcaatctcattagttatctggttatgtttatgtattgttttggaaacaacataccctatatttttcttgttctgtgtccctttagatgcggttcaacctccggaaaactttccctcttctaacaactaaggcatgtattatttcccttttgacagttcttttcagcagcagattgcaattattttgtgcataatgtttttctcttcatgtgtctctttctgtaaggttgtagttctgaaaaaacaataacgagatcaattatcatttacttaagagtaataggttgacatctgtgttaatcctttgctcctcagaaagtattctggcgaggggttgtggaagaacttctgtggtttataagtggctcaacaagtgccaaggtaatggtgttttattgaaaccctgatgatatgttgggatggatacttatcaataaatattacagtatatctttgattatgttcacaataatgctggcacaatgcatgatactatcaaaagatgatttataatgagcacattggatgatcaactatgagtttgttagaaatga

SEQ ID NO: 239206 - DNA, 2760 bp, Cannabis indica
tgctaatttattttaaacattttgcttaggtggtcatgagttacaagtacagttgcagtacaagtattcatttaatgaaggaagacatttagattgctaataggtaaaggccgaaaagtgtttacgaagaaaaccagcagcgaaactatattcttattcaaccaataactcacacacttcgagtttaactaacaagtaacacctgagcctaactaaaatgattgagaagacacaccatctagagctcttctcttccaatgtatcataaaccatcacagccagtaaactacctaccatctcatcacttagcaatcttaaatcaaatctcaaggttcttctcttattgcttatgcaaatctgaaattacaaataaagttccaaactttcgagagttatcaatctcccccaactagagtttctactctcctaaagtctaaacaaaaatttaaatttggataattgttaggcctctaggagtgaaagaagtttaccctattaaaaaaaacacttcatggtctaagaaaagtaagatttcgaactgcgtcataaggaaagtagagcataaaataggtaaagctgtaagaaaaataatcagagctgaaacataaaacaaaaagtcaaaatgtttacttttgaacctcttggcctactttataaaacaacagcagctcatctgatggaagtttgaatagaacaggattccacattggaacatcatgttcttcatcagctataacaggtggttcccaacagccattctagcaacaaatattttctcaagagttatgaactaacttaaaaactagagtagaatgccagccaaaaaagaaaatcaagtattgtccagctgaactaaaaggtgagtaattatacagagggcgtgtactcattcggtagtaacctgtatcttaaaatcgtacatttaatatcctgaactcaaatttgattaacaaaacttgatcaatacgatcaaactgtgttcaattatatgaattctatagtcaaattttagttttaattacatataactgctaatagtttgattaaactaataaaattttattaatcaaatttaatttagggtattaaatatgttcagtttcaaaatataaggtactaaatacgcattattgaaaatatttgacttatttttcgagacaatacaggataccaaatgagtagaatttaagtatagaaaccgaaaggtagcatgaaatcaacaattgggctaaatgtttaagaaacatcctccaatggtgtcttgccttaatatctataacacatattttgcttagtgaaccaaactattacctaagaaagcaaggcttgaaatgtgacatactgaagtgttataacttattcattagtgaaatgataactgagtcaaaatctaataattagaaacacacaacacaaacatattatatccttttcttgatatttatctgttcaccttgtatgtttgtacccagattttcacatcaggttccccctctttagtacccccaaaataggcaaccaaaaaatgatctttatcaacctacacaaacagcaaaaaagcatactcaatctctataatagaaacaaccaaccactactactagcagactataaagaaatatcatactgaaataggtaacctcaacaatggtggaagcatggcaattgttgaagggaacagaattttcaggaaatgtgtactcttccaccaaaggcctcccaaagttggaatctttagacaacatattcaaactcttcctctgagattttgaagttgtgttttctgtatgtgtactaaccaatttcctgcacaagtatatacattgaaaaagataaagaaaaacccttaaaagatcaaaagaaagaaccattttttgacttgaaaaattggaactttaaggtgtataaactcaaaatgcttcaaataaatcccaccccacaaaaaaaaaaggccaccttgttgaaggggcagagaaaggaagaagaaggggttgaaatgtgagagcactggaatgattgaacaagtgagatgaagtgaagaagggtctgcaaaatccagaaaatggatttgagattgaaaagagaaaggaagatagagaaatggcaagcacaagcagggtgcatctaattactagtgtccaccacatttatgattctgtaacatttcatattgaacttacttacacatataatcttaaaggattgagatgatgatctttgattttgactgaaaaagacagtgagaaagagaaagattaacagtttgtttactgtatggaagtaaatgcataattgattaaagcaactaactaatctgtcttcttgtttttctctataataattgtttgtccacgtgaccaagtcagacactctttatgtttataattggtttcaggctgtaatagagtaatagaataaggccaaatattaagcactaaaaatagtggaaaacaaattaaaagcaagaatataatgtttttttttttcatcctactaaaaaaagtttatgtaatgatagatgtgtaaaaatgtaatttattagggcggatcgcggtgcgaatggtgggggttctaatatttttttaaaattaaattacatatacgatttttgtaatttttcaaactgcaaccgcattatgagatcttagaatcgcaaaaactacattgcaaaaatacagtgtggtgcagcacagtttgaataatttacactattatcattatcaaactttataatgaaaatttaaaaatcaatctaataaa

SEQ ID NO: 239207 - DNA, 3679 bp, Cannabis indica
gggctaaatatctcagagtaatcaattcttggtgtttgatggtatcctttggctaccagccttgatttgcacctgttaagggttccatcagcatttagttttaccctatggacccatttgtggccaactatttgcatgcttgggtgatatagaacaagagtccatgtattattcttgagtaaggcttggtttttcatgctcatggttgcattccatttgggatcagcaagtgcctacttgagggattttggttcagtaggtaagagtgattcagggagagggacttgtagctatataggcttttggtttgtggattccatttttggatctagttttcataggatggtgattagtagcagtttgtatggatatagtaggaggtagttgggaagtagaaggtatgtcaagggtgggttgaggttgtgtgtgactacttggataggattgaggaggtggagatggtattggtggagtaggtgaagcctgggactagtcaatttgagtagtggatgaaatatttataacaggcacttggaatggagatacattaggatttggtgttgcagcaatcgagttatcaagtacagaacttggatgcctggtacaagttgatgttgcattaggatcaacatccctagttactggtgtaggcagtatttcagtagttggttccttagcaacagaagagggagaagcattagtttggtgtattatagctggtgtaggaaaacaaatggaagagaatgagttgtttgaagaagatgttacgtgagtagaagactgctaactaactggagggaagtcttcttcattgaactgaatattccttgggatgtaaattcttccagatgagtttcacacatgtagcctttgtgttgcatggaatagccaacaaagatgcattttttagatctcattgacatcttgtgagagttgtatggtctaagatatgggaaacatgcacaccaaaatgttatgagaaagccatagtttggttgtttgtgaaacaaacactaatgtggtctgtagttgtctatcactagtgatggaagcctgttgatgacatatgtagcatgctaaaaagcataccaccagtaggaaaggtccagaccaaattgagccaacaaagtcatgcctgtttcattaatatgcatgtgcttgcgctctgcatgcctattttgctcatgatcatggggacgggaatgttgaaattgaattccatcagcatcaagaaaattggcaaaggttttgtactaaccaccccaatcggattgaactttttttattgaaagggtgaattgtttttcaacaaggttcttaaactgcaagaattttgggaaggcttgggctttgaatgtcatagggaaaatccatgtaaatcgactaaaatcatcaacaaaatgtatgtagtacctaaatccctcctttgaaggaacatgagagggtccctacacatctgtgtgaaccaattttaaaggcataggtgccctgcttaaggacaaagagtagggtagttagtgcttttattctattttgcaggcattacagaattttaaatttttaaaggagcctttaaaattgatgttgtgtagaacttttgcaagagttttaggggcaggatgtcctagttttgaatgccaaatattgatatctttattaaaattagcatagcaagcttcattaaaggattcaggggattttttttaaaaaaaaacataatttttattaatgttatgacttgtattacaataggaagagactgttgaaacagtcttgttattacatgatgaagagactgttgaaacaatctcattagtacaatcagtattactaataggagaacaacatgaactggaatccttagttgttatgtggcactcaaactggaccggtgcaggtaagggtatggatttggtcagcacatagagcccatttttaaccctccctttgagcaagactttccctgtgatcttgtccttaaagcaagtagagtgaaattctaagaaaacttgattatctttagtaagttgagacacactaacaaggttattttttgttattttaggaacttcaatgacagaatttaattgaacatgagtggtattggagagtaaagaaagattgccaatgtgagtgatggagagtttcttgccatcaccaactgcaagggattcagggccatgataaggcatttcgaaatcaagatgctccattcctatggctacatgtttgttggcactagtgtcagcatactacttaggatcatgagcaaggtctgtgatcatttgggagggtatggagatggatcatcttcatcaagttcagtcaagaaggcatgtgactctccaatcttgggagtgacaaaggatttgtcaaatcgataatggcacactgctactgtgtgaccagtcttgaagcaaacttggcacaacagttttgaggtgggtgctccacggccagggtgtcttccagtagattgaggattttgacctttgccatatccacaaccatcatatctaaaggatcttgagaaagagtatgggtcagaaccagatctggaagagcttgtggatatgttggccatcaatttggaggagctatcactgtcagtatagtgtcattctaaacgactttcatgagttaatagcaacgattgaatcgattcaaaagagagatcatcaacaagacttgtaacatgaacaacaacagggtcatattctggtccaagaccattgaggagatgcatgatcaagtcactctcatccatagggtgcactgctgtagacaaagaatcgataataatctttactttatcatagtaatcggagatagaaagagtacatttctgaattgtggagagttgagatttgatttgcaagatccgtgccttagattgagatgcaaatctttgctctagggccttccatgccatgtaagatgtattgtactgagccaaggaacccaatacagttttagacatcgatgattggagccaactgagcaagagttgttcttttcttttccaggtgacagattttggagtaacatcacctgacgagttgagctggtagagcaactccagtgagtaagatatcgttgagaccatggccaataactgttggaatcccctgagatttttaggccaggaagttcgattgatcgagtttaacaataagagaagaactgagagagttctgaaaggaattccaagattgctgaggagcaatcggaggaggttgaggaacaattcgtggtgattgctcgcgagttagagcagctgtgcatggtggattttcaatgcttggatgatccatagatgactttcgtcaatagtttcgtgatatcacgtatgaacttatcaatgcaaactgaacaaagtaatgaatacaacaaactcactagtctacaaaagttgcagactaaagaaagagaggcctttatttatagatgagagattacaaggatacaagtgtaaataaagttaactaaaagctgtacaacaaaacagttaagaaaaatagaaacaactaactaacaaagattaacaattggtgacagtattagcgtgaagatgaaacccaaataattatatgtgatgtattacatgtatgtagattacatacaaatatgatttccagtgtattataaattttacatatatagaaatatacatatttac

SEQ ID NO: 239208 - DNA, 3360 bp, Cannabis indica
atgggagcatttaggtttgcaattcctttctctacgaagaattattttattttaggactatgaagtttgattattgacacgttgtattgctttcggatatggcattgcaatatgctggtgtgctcatattttcttttctggagtatgacagaatgatgtttgtgctaagtaattttgttgggttgtttttgcagttatggatccttttttggcccatcccaaccagttattgcttcaagagtaattcaagagagcaagtcattgttggaaaatcaacatttgacacctcaactttccaatgcccttcatcctgtatgtatcgcaattactatttgattttcacttaattggatgctgcactggatgatctttttcgttttactgaaagttcctgtattaattaactgagggttgttaccttttaatgatctgttttgtcttttgtgtagtaattttatgcttaccttggttatggttgttatgattatgccctttgtgtgttgcagctgaagcaaaacaataaaaattaaagttagaagctgaagcatacaaaaaataaaaattaggaataggagcttagttttcatactttgacacacacacacacacatttatttgatatattctctttagcttacataggactgccagaatgatattgcaatgctggatactgttccagttccttgcacaggttttaaacatctccatgtgaaatctcttttcataagcacggacttcgaagctttgtttttgtttttatcccccctcccctagtgtttaagattcttactgctgattttcttggcagagaaaaaagagcccaagttcatcctctgctcttgcaaaacccggagtacatagtctgaaaccgaaagttgtaaatgaggtatatttagcatacattatttcactggtccttgaacatacataatctttattttgcttaatttgacggatcttttggcgcatgcaggttaaaactaaagtccagaaactaaaagatacaagagactattcctttttaatggatgatgatgcagagattccagctcctgcaaaggtgcctcctcagagaaatgtctctgctccaaattctggtgtgttgctagatcttaacttgctcttggctatggggcttgaaaacttctatttttcattgaggaaacttatacaggttttttgctgatgttgaagatgcacgatctgctcaactgccgatgaaaagtaaacaagcattgggaaataacgcgagtcactcacagggcagtcatgcagaaaggaaatcagctcttatgaatgggcactctagtaaattacctttagcaagtaggcccagttcggctgcaatggattctagaagacagcatagtagcagtaatggaagtggatctggccggcatagtatcagcaatggaactgggcctggccggcctagtagcagcaatggaactgggtctggccggcctagtagcggcaatggaactgggcctggcaggcctagtagcggcaatggaactgggcctggccggcctagtagcggcaatggaactgggcctggccggcctagtagcagcaatgggacagggcggcctatagtgacaaaaaatttgccgttgaggagtccagctcctgttgtcagaaaagttgccacaccagctgcgaagagttccatcccaagttctaagagttcaattccaagtactaagagttccattcctcgtaccaatagctcatctatgccaagtatgcagaaacccttttcttcaaagttgcagccctctatttctaggcagcagcagttaggacagagaagggaattacaggctcctgctaatgctaaattgtcgtctaaacagtcaacaggattgtcaagacctcaggtttttattgttttcctatacttccattggtgtcaagtttttactttgctgctgcagtcttattgaattgtaaaataacaatatctatttttcataaaattggcagattaacaagccacaaagacaaagttcatcccaccttacatcacatgacaaccgccccaagaaaaagccgatgagacgatactctgatgatgagggtgatgagggtgaccaagccattagtatgatcagacaaatgttcgggtaaaaatacttgcttttttccccttctaatttctggtttaggtttatttactgccagagcctctatttgaaaatttcacttgctatcatggtagataagaccctttgaggcttagatgtcacctatcgctcattttactgcttttgtttatagtttttatattcatgtacaatattcctaataacaaaatctggaatcttttattccaggtataatcccaaaaaattcgccggtcgtgatgatgatgatgatagcgatatggaggccaactttgacgatattcagagagaagagaaaagaaggttgagtagcatgttccacttaatcctgttttaaatgattttatcctgttgttacattaaagagtttaaaagagaaaaatgaaggcccaatattgaattataaagtacttgaaatcaataatagcaaatttgggttttgatttctaatcaaattccaatagggacataatcaaaatgagtatatgaatttagctggttctttgttgttaatagaggaggtttttgtgttttttttttccttaatattttttgtattttgcagtgagataattgcaagaagagaagatgaagaagagcagcgtttgatagaggaagaagaaagaagagagagagaagctaagatgagaagattaaagaagcgaaagctggggcattagaagtattaatatttgatttgagtctttaggaaatgctcagtttctatttttatttaagttttgcccaagttgtacacaatcaatcaagtttcttgttaggtggaaaaatcttggtgttttctttttggggtggatggggtcaaatattgagttaattattcactagtttaggaagctgttggtggtgccaattgtacgtagagggtagtaataacatgaggtgatttttttgagtttcatcttgttattgccactcgcagccaagtaaactagttccacccacttaagtaaataatataatgtaaaaaagccagataacattctttttgtctatcccggacctcttacgtctaactaattttcataatccttccgtcaaataaaaactttaaagaccaattaaaaaaacgtgtaatcatagaaattaatgaaagtcaaaatgtatgtatatattaaaaaaataaagaaaaataattttaataaaataaagaatttccttcttttaacttgaaaataaatgaaaaatataaacttaaattgaaaaatttcta

SEQ ID NO: 239209 - DNA, 3077 bp, Cannabis indica
aaaagtgataaaaaaaaaagtgaacttacttaaagacttaaatattttttatataaacatatttttgatatagtgtaaaaagaagtattttttgatgttttccttaattaagtaactaattaagcataaaaattcaaatttctcggaccaaaggtatatatatacatatatatgaaaatttagtgtagaagtaaacttgattatatttttttttactttaagatgtcaagatcggaaagcaccttctaaaccacctcattcatccaaaagagaagggaaggagtctatgtatttgcatgcatatgacccctgcagattttattaccttatgtttatgaagacatggagaaatttgtttttatatcactaagagaaacccaagctcatggacttgttaatcttgaaacggctgaatgagaagaatatagatttctgcaaatatgcattaaaaataagttatataatgtaaacctttatatatggatgttttgatggactcctcttttgacaatgaaagagagttttttagtttatttttttttcatgagtgtgtacgttgtagttatttaaaattttatataaatttttaaaaataaataatttacaatgtcgacaatataaggtataaatatgttgttgcacgtgtaactgttttttttatacgagtagtaaataactgtttgaactttatttgttactgtaaattattcaaaaaaaaactttgaaaactaataggtgatcctaaactttatttttcttgaacattttatcccagctaacaaaagtttctgatttcgccgctacctttagataatactaaacagtaaacactactaattctttgtagtaattctctaaataataaatttaatgaggaaatgataaatcaatgatgcaattatacgtcgttgtagcttcgacgtggtaaatacgatggaatattaattggttcaacatgatgtgacgatacacaattgtgagacttgaattatttatgtacttgagattagctctgccactcatgtacacatcaaaaatcaataaatggagataacatatctatattgtttctgcctatatataaaggaagggaatagctaccaattcatcataaacaactaagttagaacaagtactatactatggctctttccttattagttatgatgcttttaaagcttaatgtattgtttcatattctcctactctttcatcatccttttggtaattctgtgcaaccttcttgccatgagaaagagaggaatgctttgatccatttcaatgaaagctatgaaatagattgtcggcttagacctgatcactatcaactccatccaacgacatcaacatggggatcaaatggtaccgattgttgtttatgggatggtgttgaatgtgacatggtgactggtcatgtcattggccttaacctcgatggtcttgtctctacggctctatcaactccaacagcactctctttcaccttgttcatctccaaaagcttgatcttggttataataacttcactttctctccaattccaactgccataggcacactttcaaagttgcaatttcttcacttgggttcttctttcttccaaggtgagattccttctgaaatttcacttttgtctaagttgactcatcttgacttgtcatataatgttggtggtaatggtccagtacttgtgtctcttttgaaaataaatcccaatgttagaagcctattccaaaacttaactgctttggattctcttttcctaacttctgtccacatcacctatgaattaagtgagtccttaacaaatttgacttctttgacacaccttggtctagggagttgtggattgtatgggcctcttccaccttcacttggtaaattaacccaactcaattggttaaacctcaaagagaatgatttcacaggttacatcccatcttctttccaaaatctcacaaaactttccttcataaaaatagcaggtaatcaaatttctgggccaatcccttcttggtttggaaatattagtgaattgacgtttatgggatttttttcaaacagtttgagtggtacagttccaccatcattgtccaaactcagtaatcttgagactctcgatctcggggaaaacattttaagtggtacattgcagctagattcttttcttaaactgagaaatctcactgagctttatctaggcttcaatatgatttccttactcattgatgaaacaaaaatagatcctaacaccacactttcaaaattttattctctagcgtttgctaattgcaacttaagcaagtttcccgaatttattggccatcaaactaatcttgtactgttggatctttcatataataatatagttggtcaaattccccaaactctgatgagtattcaaaccttggaagccatatatttatccaacaattggataacaggatttcataaccacacaatcaagctaccttggtctagtctacgtatgttagaaatgcaagataattcgttgcaaggacaactaccgattccaccatcatctatcaaacattacgatgtctctaacaataatctaagtggtgaaattcccatgtctatatgcaatttgacttcaattgcagtccttgatttgtcaagtaacaatttcagtggcgaatttccaccttgtttaggaagtatgatcaataatgactccctaattgctttgaatttgagaaataactcttttcatggcaccattccccttgaatgtcagcaggaaagcgagttgagaatggtggattttagtcacaatcattttcaaggaaaacttcgacgaccaatctcaacttgtgtgaatcttgaatatcttgatttctctttcaatcaaattagtgatgtcttccccacttggttggggagctttcctctattaaaagttgttttgctgagggcaaacaaatttcatggagttataagaaaacctcaaagcactactactgagtttccaaggctgcaaattattgatgtgtctcacaattatttcacaggggcattgccacatgaatatatgctcatttggaatgctatgaaag

SEQ ID NO: 239210 - DNA, 1850 bp, Cannabis indica
gctactcttctattattagttttgagatgaagactttacaattctaaaattagcatataacttagctttggtctgatcatgaattaaacaacatatatgtgcatcatgtatatatataggtgacaatggtgattcaagaagtgttacgcctatatccaccagcagctttcgtatcaagggaggcactagaagaaaccaaagtgggaaacattactgtcccaaaaggggtatgcctatggacactgatccctactctgcaccgagattctgatgtttgggggcccgatgccaacgagttcaagccggagaggtttgccgagggcgtggcccaagcttgcaggctgtccccgcaagcctatattccctttgggttgggtcctcggttgtgtttaggcaaaaacttcgcaatggtggagttaaaagtcattttgtcccttattatatcaaggttttctttctctttatctcctaagtaccgtcattctcccgcttatagaatgatcgtagagcccgggaatggagtacaaatttttatcaaaagaacatcttatcatcatcaatgattgacaatataatttattactcttatatagcttccatgcatatatatatgtataatgtaatattgtataattacatgtggttttgtttgtgataaataaaatgtgattctaggtgtggggtgatcaataattaatatttgattttatatatattagactttctgttgttatatatatgcttcaaattatgtgtgtactattttgttatcagtctcgtgtctctccaactaataaaaaaaatacaaccacttcactagcttgaattagtgatataaattttactctaggatgatataaatttgtcgtatatattcccatagttgaaaaaactctataccctgctagccctatatcttcggcatttataagtacttaattttatatttttgcaaataaattcctatatcaataaaaaagggtggcagtcgtcgagcttcccttattacactatatgaagtaaggtggaaagtaattaattaggatggaaggaaaaaaaattgagagaatggaaattttaagatggaagagaaagtttattttaattatagttttttttttagaagaccagatctaaaatacaaagaagaaataaaagagaccaagttacaagatctaaacgagatttgaaacacaattgtttcaaatatactcttcatttgttcctaatgcagcttgagcaagattgtgcaccaattggctgtgagttcttggggtgtgatggattgagagttgagacataaggaaaatatgacaaagagttgagaactgcccaaaccaaatctgaaagagctgagtaatcttttttccttttgagaattcttgaaactaggtccaagtagtctatgatcaccaagctaattggaaaatggacagctttacaccaaagcaaagctcgattaagagcctctgcttccgtgaaaataggagaaagacctgagggagcagatgaataaaaacatgctattattattcgatcgtgagagtcttgcacgatagcaccatacctgtgcttgttgcctcagcttccaactgatgcatccacactaagcttgtgagttcctgaagtaggcaataaaggtggagctcttgattgagtttcctcaagatctgggaactggttagaaggctgggaagagaggttgtcttgtgctgagatgtattcctgtaaaaaaagataagatatagggttctatagttatatgtacagtttcctcattagaaacaacagatttgtgtgaaagttccaaatgctcaagtgataccagaaaatagattttgtattttaat

SEQ ID NO: 239211 - DNA, 1934 bp, Cannabis indica
ttgtacgtgtccatttcttcatcctatgtgggctcatggaatattttgtcaccagtgttaacgataaactcaacaacaatgggtcaatcaacagtgtatgttctaaaaaatgtaatttattttttcccacttccttttccattgtatcattttcctgagaatcaaacagggaatgttgcaagatagacgaacctgaataactttgtctaatccctcttgcctagctgaggcgatcctaatattagcagaggtctcctttctcattctggtaatatttgtccctccttttcccatcaccgcaccaatctgagacttctcagcgagcaatctacaagaaaccactcgcatggaagcagaagccgaagtagtaacaccctcattctctacctccaaagtccagattctctccaaaaccctaagcatcgcatcctgagcgctcgacacgtcacactcctcagtactcaggacgatccttttattaggcaacctggaccccgatgaccaaaacaactctttcgtctgacccgggagctgaattctcgcagtggattttagtatcagtctctcgccggagctgagacacgacggcaccagaactcccgataaggcctccgatcatagactgggggcagaacaatcgcaaagccacctgtcccggtaagaccttgaatccctcaggtgaccgccgtcgaggtctcgacctccccgacctagtcaacgctcttcgcggtattttaccttcgatatccttgcgattgcacgccccgccgcgcgcgtggtggtgggggtagcgtgcggattcttgcgctgtgtaagtaccgggttctagcggcgatgatggccgtttggagaaattcaaatattccatagccaaatccttctctcctttctataaattgttaatgaaactttacagggaaccaaaaacaaaagaaatgaaaaatagagagaggtgtagaagcgtttccttctttgttaagtatataagttcggtgatccgtacgtgggttaactcaatacctgggaactgtaaaggcaaagcgcgcgaggcaatcaaatatgtatctttgagtctgagattaacgttgtcctacattggacaaccttttaaatatttatatattacaacaatcacattaaattatatattaaatttattccattttattattatttgtattgagttatttataattttattcttcttacaaaatttatatttatgataaagataaaaaaaaaattaaatttgggacattaatcacgagaagaaaaaaaaaaaatatatatatatttttggagaagatagaatttctagtttttttttttttttttttttttttttttgtaataactaaattctcactaaacaaaaattaaacatgtcactaagttgaccatattctaatcttactacagtagtatgacaatttgtatccaaattaatgaaattgtgggtaatttgtcaattcttatattatttattgaattaaagtatgaaattataataatgaaaaatatgatatctatttattgaattcttaatggctggttggagaagaaaaaataaaagttggtattggattggtgaagcatagaataaggcgtctctttcgaaataagcattggattgtatattaaataaacaagcatatgaaaattaatgaaaattaatgcaacacacagccaaactatttttgtcgtcgtttgtatccatcatatcttgacatgttttaaaaattttagaggatactaagtgaaatagacgcataatgtgataaaatatcaaaatgctatattattagaaagaaaacaaatgttattttaaaaatttacatgaatattgagttgtaacattgatactatttattttttttaataaaaaattgaagctaaaaattattgtagctaaaaattaggatatatattaaata

SEQ ID NO: 239212 - DNA, 4237 bp, Cannabis indica
atatgaagacaaaaactaataaacattatatttatttgaaataataaacaattgaaaattatatgtgatatagaaacaaaattaaaagttcattattaattattaatgaatatatatatagtggactagctctgcttaattaattgaggaattatgaaaaagaaataccagatagcaggctccacattctttgcctgatttatagagagatgggcttgttgcagtaatcatggacgagaatggactttgtgataccaacttcccgtacccacaagaccctcctgcacaattcataatatatatattatattaccattttattaagctctctatatatattactcaattatatttgtataacactaacagccaactataaaatatagccttatcaagcaaaaaaaaaaagaaactataaatatagcctttatgctaaagggtacctatcgagtttcatataatttaataaaataattttgagacaacatcgctagctagccaatcacaaggccgactcgtgctaggcaacattggtgtctaataaacttaattagtcaagaaacaactcaaccaatcccgtgtagacacataagattttaaatgttgggttgaatctgaacctacaataatactaatcttttctatagagagagacttaattaccatcactaccggcaccatcagggctgccgtaccaagttgcgccggcagtggaccaatgagcagtacggccatttaaggcagacatgttcaattgcttagggttaaaccctaaacaaacctcaaatttgtagcaagacattacaaccatcaatgccagaactaacgagtacttgataagagcggccatgatgaccagatcaggtagctatagcttgtagtgtatatgtatgaatatatataatatgtatgtgtatcatgtgctagttccaattacaaactttgcagctacctacgaatatttatagtggaaatatcatacaagggcgctacaagtatgcttggccacaagtacatggatatattttattaatgatgcgttgtcgttattgaccaaggattttttaatgtaattgtaactataaacatttgccttcccgtaattagattttttaacacatactataaaaaataatatttaaggaacttcgtttggtaggactacatgtatagttaaattagttaataattattagacaatatatatagttcaattattatgaaataatgccctgagaataacaacattgcccaatagtttcataatttataaacaacataactgtttttaaccaccaaattactgacaacacgataagacatattgctacgatacattattggcaagcaacatattaaataaatgagtcactgtattcaacttttatatatatacatattgtcacatgcatacaaatatgcatgtatttgttcccctgtctactactgagtacatgcataaatatgctaaggtttaaacttgttaatcatgacgaatatatactcttttaaaatggaccagaggcatataatgttttttaaaaagagcataaagagtttatctcctaattatataagtcttgtagaattttattttctgttttttcctctcaaattatggactttttcaatcttaccattatgtttctactacgtttaaacggtttgctaacatatgctcacacatgtgcgcgcacaatattagtgccacataagcaaatcctttaaaaatagatagaataccacaaaactacaagagtctagggcaaagttcaaaaaaggatttttgccacaataaaattcggaacatcaatactctataaaatggtcaatagatttatcctttaaaatataaatatataagcctatttatgtctcctaaagtaatctatcatgtgcttctataatataactcgcaaaaggggtatatcggtaaaattcttatttatttcgatatttagaagaattttttatttttattttttttatagtaatgtatattatagttatttaagacatttaacaaaattttaagaaatttaaaataatttacaatatataaagcagcattcacatagtctatttatttaaaataaaaaagtcatgcatggaacaaactgtttaatttttatttttggcgtgttcaattttttataattactaaaaattttgtaaaatatcttaaataattacaacgtactatgattataaaaaaaaaaaattaaactaaaaaattatcttaaatattgaaatagataagattgtatcaatgtaccacatttagagatgcattattatagaattttccaaatacattcatactctttatttgagagaaccacacatgtagcctccatgcaaacaataacactactattacaatcgtaagacgcccaataaaacctacactaacgataagggcgtcctaacgaacacatgctaaaaaactattattaatttcctttatttttgaccttattagacaacactcttgatttaatttttattctcaaaattggtctttctttataaatgttatcatgattatttataaccgacgaaaacaattcttaaatttaaatttgaccaagtagctactatttaattagtaaagaaaaagaaaaatagcattttatataatgtacttatagatacatacaaaaagagatcgatccacatatagcaaagcttaagaaaaatatttccaattattcatctacatatataaaagaaaaatattgtatatatcttttaaattgtgcaataattctcatactcataatttgaaatattaattactaatacatagtggatgcattaattaaaatactaattgatggtgtaactttgtctgtcaagtagggccacagtgatattttgttcgtgcaaaaaaaaaagttccttggattgagccgttgatgttggttatttggtcgttaaataatccctcgagagattctcacaatattttcaggtcattttttccacattattctagtgatcgatcatcgatgcttatcgctgattagcttaactatttcaaatgaggttgatataaatgacatggatttgattttttcagaccttctttattgtaatttctagattatgttttataaagtcgatcgaaattatatgtgtttggctcgacgtgagttttttttttttttttttggagttctttaatgacggaaagtatttgaaattagcaatttaaatgaacttgcacatgcattaacataaaataaatcattatgaaatggaaatctcaactgccgaatctataacgtgatagatatgtacaatataataatataaattattaagtatatatacatataataatttacactaatgcggggattgctcttccactcctatatatttttgaaaaaaaaaacaatcgtaaaaactcagtaaaataataaatatagtaattgcaaaattggtaatcgaaaataaatagttaattgcacgtaatttttttaaagcagttaagtgtgattattaatatgcatcaccgcagacattttcatgaaaactaaaatgtctcattactataatcaataaaaagcctaaaacatgaagttattttaattgtagtagttatgaacatatatatataatattggggcgggtatctattcccccgctcccgccccattttcgactcgagtatgaacatttaaactcatatccgccccgtccctaggggaggtacccgcaggtataattgccttatccttatagctagctgaagcaaaaatattacttcataaagtattaattgcataagcgataaaactctcaaaacagttcattattgtaacttcctatgcaaaatatttagagcaaaaccttcctacttttaagaatttgtaataatacacaattagttaaatcaaatattaattatcacaacttgaggttgtcacagataagggtgtacgtcggtcggtttatgcaatattttattcaacccattgtaaagatcgagttacaaaaattttagtgcaacccgcccaattaagaaaaaagaaaatagtaacccgtccaatgaaattggtcggtttgatcaggttaacccgtctaaaccaaccactaatatttttttttatttttacattcaatcattatattttagttaattgtaataatgagacaaatatatatagattgaattcaaaatttaaatcaaccaccataaaaaaatcaatattagtttcaactttatatt

SEQ ID NO: 239213 - DNA, 2477 bp, Cannabis indica
cccagtgctattgaccatcggatttggtttgtatgtctctttagtactttcaaatttttgccgattgtagagcctggttcattgttgtttatcctgataactttacttaatggtttgttgcaggttggctgttacagggtctgttctttgctgcactcgtcgacaggtctttttcccatcattttggatctcgatgcaggcagaggaggagtcttcatcggtacggaactccggccactcgtttctctaaagaactgtacctggtttcttgtattgaagcagctgtatactgccgtttctgccttcatccaaggcccgtatgctggaactgctgcaccttgaggagggtaagcataagcaatcggtctgaagcaagtcttcttatcgtttcccagatagccgcaattataacacagtttgggcagtttaaaatatcgaaactgaatccattctttccttcccctctttatatcaaggaaaaatccagaagttcattggtgtgcagtgtctatttcgatttgaaactttaggaaacctcttcggacgataactcgattgttggctagatcactttgaacaaatctccccgcctttgccgccagtgtacgagtgttgactcaattgaggtacggtgtgggtaatccagaaaccataacccagaatatcgccttcctcatgtccgcattgtaccaatcgccatcttctggccattctctgataatcaggagtttgccatttatcatccatggtttattacggaggaccgtcgcacaatcttcaggatgatcaagaaagatgcccccaacccctggcttcaaggtcttgaacttcgaatgtccttttagtttccaaatgtgattcaggatttctttaagttttgatctggacagacccttaccatcaagaaaactcgctagcacccctgtgttaacgacttctgcagtgagttcaaaatctggttccaagtccaaagtcatggaactccaaaaaactgttacgaagtgtctcgagctcttcatttgacttgtcaaggttgtcattggttgttggttcaactaacttcttctattatttcatctgcttccaaatcatttatgtccggaggatggggtagttggacaccatcattattagcaatacttcaggtgccccttgagaagagtccaaaccactttccagaggaacacgtgagtctcactagtgtcccccatcatcaatagtggagtgtagtgaatactaaatggaaatagcacgagacaaaagcagggaaatcacaaaagcaggggaaagcaacaaacaagggcttagagtaacgttcactgagaaaagcaaggaagaagacttataggactgattgtttatatttttttaaaaaaccaatcaaacagtgtaaaaaaaaccaatcaaacagtgtagaagctataggataaacactctaagatcagtaggataagaggagacatcctaagacaagacatgtcaagttggaattccaacactcacactcgagagagaaacaaaaaacacgattataagcacttgtgtggattgaattagattacgttgaaataattctcaatatgctgatttgtcccaactaatagttagttaaaacaaattttaaagcctaactggacttcgtcagttactcctaactaacttactcagctacgcaatcactataaatagaagaatactggaaccagatgacttacagcttcattacaactcctcaaattagaaaaatgaatattcagaaggttcagacctagtgagagttgctcttgtgttaaagaaaagagaagaagagtgttagagagagaaaaggaaggggattgtttcgatctagagagaaagaaaagtgagagatattcatacctatgatgaagaagatgagctactagactattaatgtgtcttagagctctgaaacttggtgtgattgctgatcttaatagtggattgtgattgagcttctctgaggcagctcaccaaggacttaaccccaaattttggcggtgaaccttgtaaaatctctttgtgtttgaatttctcttacccctgacatctttacttgatttattgtttatctttttgttgcatgatctctcatcaagctcaagaatagagctgttgttctcttgagtttctctcttgataattttaccctaatggtgtggtatagttcctctaaatgaaaaggtctttgcaaatgtcatttctaaaaagttgttcacttgcggatgccagtcccaaaaggagtcttgtagaatgatggttgtgcccgaaagggagttcccagactactatcttgtccactctgagatctgtcttcaaaaaagctagccctactccaaaagggagttcttgttggctaactgtctttccggcagttccaggtagtcgactccaataggctcaatcctatttggaagtgtcatcagcaagtatccttgattcgtgagtctggaagctta

SEQ ID NO: 239214 - DNA, 3085 bp, Cannabis indica
gatggtcctcttatcctcttgttatataacttgtcagtacttggtatagatccatgtttaggggatataaattctctaactgtcactttttttttttggttcaagctctgttagttctttttttggtataatatgaatatttatgtgcccaaacaaatgaatgactatgacattgaaacagagctttttagtgggtgtgaatgattttggtgaaaagggtttttcaaataaagatgatttggtctgtttttttatttcatgtgctggtaacatgcaatggaaaaagaaagaattgattgactacaccttttattataatcttcttttgttaatattattattatgattaatttttttaaaaaaaaaaaattgagagtgatattgttattttgtaaagtgctctctcatgttaatgacctgtggaatcttgtatagtgttaaaattagtcttttaacggaattatatccgttactttggaaagatttttcatgggtttttttttttctttttttcctacaaatggacaaaaaaagagttaattgtgattttcctggaaaatgacaacttttgaaagaaaataggaaagaggtagcagtagaccaccgacaccctcttaccaactatgaaatttcactcttaccaaaaatttgtagtgtaatatatcatagtaaatgtgaaaatttggttgacatttttctgtaatgacaataatgatgacaaagggtgaaaattttgggttttgtttcacagggaaattcacaacagtactgagaggagaaaacttggattcttctcatgtggaactgggaacccaattgatgactgttggcgttgtgaccccaattggcaaaagaacaggaagcgtttagctgattgtggtattggttttggaagaaacgctgttggtggtcgtgatggtcggttctatgtggtcaccgatcctaaagatgatgaccctgttaacccaagacccggaactcttcgccatgctgttatccaagaagagcctctttggattgtgttcaagagagacatggttatccaattaaagcaagaactcatcatgaacagtttcaaaactattgatggtcgtggtgtcaatgtccacattgctaatggagcttgtatcaccgttcaatttgttaccaacatcattattcatggtctccatatccatgactgtaaacccactggaaacgccatggttaggagctcaccctctcattttgggtggagaacaatgtctgatggtgatgccgtctcaatttttggatcaagccacatttgggttgatcacaactcactttctaactgtgctgatggtcttgttgatgctgtcatgggctcaacagccattaccatttccaacaaccacttcacccaccacaatgaggtgtgtgtgtttattatgcacaatttcacatcacacttgtttttttcttgacattgacattgacatttcttttgtgtgtgaaatggtaaataggttatgctattgggacacagtgattcatacacaaaagacaagatgatgcaagttaccattgcctacaaccattttggagaaggtcttatccaaagaatgccaaggtattaattaatcaattcccaaagaaagtttttcactgaagataattaatgttttcaatgttcttttgctaataaactgagttttcaaataatgacaacacagatgtagacatggatatttccatgtggtgaacaatgactacactcattgggagatgtatgccattggtggtagtgctaatcccaccattaatagccagggtaacagatatgctgctccaaccaatcgttttgcaaaagaggtaaaataaataaataaataaataaaaatacaaaatcccaatattctgtttctgtttcttcataataattaattatattctggacaggtaactaagagggtagagacatctgctggtgtctggaaaaactggaattggaggtcagagggtgatctcctattgaatggtgcctacttcaccccatctggtgcaggagcctcagcaagctatgctagagcctcaagtttgggagccaaatcttcttctatggttggaaccattacttccaatgctggtgcacttccttgccgtagaggtcatcaatgctagtagtagtagtaatagtataatgataatttgagtcttctccttcctattaaaatggccaaaaaaagaaaagggcatttttttctttctttctttctttttccttataatttttacaattatatacccccattctccatatctcttaccttttgaaacccaaaaaaagaaagcatttttatccatattttgacaaggtgtacattattatgtaacacatgtcaatatcatcaaaaaatattatatccccccatttgtattgccagtttgtgtatctgtgtactactactactactgctactacctccccaacctcggcctacttcaacccgaaaaaattacaaccccgaatttaggagtaggcgcggaagcgttgttccctttgttttttctttctttctttctttcttcctaagttcaaaacctacaaaaacttgtgtgtccatttctatcccaattcaaaaacccatctctctttttttactttacttttctggttttataggatttgaatgattttgtgatatcttttttttgggtcttgtttgtccaagtcatacaagcaatagtatgaatgtcaaagttgagtcgtacaagcttttgttacagaatgatgcatagcaatagcaagtgttttttttttttttttactaaagacttttattttctttggcaatgaatgaaaagttaatattttttttgttataacctttttatgattactctcatttgtcaatgtttgttgtcccaagcacatgtcatcaattcatttactcattttaacttacttaacaacaacaccatcattatcataccaaagttgtgtgtctactaattgacttttgggttcttggttaatgagatcattagtaaaaaaaataaagagaaaagggtggaaatggtctcataattagagcatgagaaaaaaaagagggctatggcagag

SEQ ID NO: 239215 - DNA, 3728 bp, Cannabis indica
tataattcacagaaacacaattcttaactctacctaagcaaaaatttcagaatgaagttattttcaaaagctcgaagctgaatcgctattcaacaatgcctgcatttctttccttcacaaataagctaattatctccacttgttagtcaaatactctgaatcccactcacaagtctcaacaaataactaacttttcttatcttgaaaaatttctccatattaaaacatgttttttttacattcttcactttactaatttgtatccctcattctctcgtagtaataaaaaaagtggagttctcaccatagtgttataaggagacatggggcatacaactttacttattgacctcctcaacctggaatttagttcctcctagggttgatagcaaaaaacatcctcaattaacagaataaattttcatggcctgctgcattactttctagagtccaaattacaatgtatatgattcataacatctcagtcgcttcattttatcttggctcatcgactactaaactagtgtattgatcaatcacagatgtcattatacttttactcacgtttttattttccatattttttaaacctcacatgtttctggaataaattgtttcattttcacagtgaatgaagtaatatttgcaactaattaaataaaaacaatgtaatacatcaattccaaacaagaagagaagagactaaccggatattgatcataaatgcaatcccttcggccttttccaggcgtcaaaggatgagtatgctccttaacaaatttcgtcacaacccactttccagaagttactttcctcaccaaaatcattgccctgcagccaacccttgtctctgccctttgcctaacaatcttttcacgcttgtcaggcattctatacccctctttgttacaaacaagtgcacggccaattgcagttccatctcgccttgacctagaaagtttactcacacggatgataaaaccaatgcgcgtggcatatgcattgtaaaatgcatgggcagctgcttcagaatcaaactcctgccccacaaaaggctcatcggctggaaccagtgatgtagtaggaactcctacaggtatcatatccccatcaggagaatcttggttcatcttttcatcatgatcatgttggaatgccccttcaacagaactcccaccagtttcattttcatcccctcccctactattatcaacctcgacagaattccgcaaaatctctccattgacatctccatcgaccccaaactccactgcagtaataacaaactctctcctatgaacttcggatgcccatatattcaaacactactgcctaacttctattcaaataattattggaacaaaatgggttcaaattaacaaagaaaaaaatttggaattaaatgattagtatggtcattaaaaaaatattgaccaatatggttggcagcataattttattccatattagcatgattttttttttttcctcaaatgagccaaaaagacttttttctttggccccggattgattacatcaaattattgcttttaaagaaatatttgtttaaagaaaaaaaaaaaaaaaaaacaactcgatcaaaccagaaatgcaattttcatatccaatttgaaaatttctataaaaataaaaactccattgaaccaaagctctaccttcattttgaaattaaatcaaacaaacctaaaaacaaaatcgatatctcccaatattcaaagtatacaattggaaacaaagaattaagttgaattatgaaaagaattggtcccaaaatacagccggaagaaggaaaaagaaaaacctaattaattatcataattagacgtcaaaaaaaatattaaaatggtttaaaacaaataaaagatacatataataaactaacttactgaaattacgaccgatcctggtttagatgatcgggaagaacatgagaaggcgttgcttaggtttcgaaggtccagagacagagacagagagaggcgcagcgcaagggttcaggatgtaaatatggggcctcaatggttgctgacgtgtaaacatttgattggtgactatgtaaagtaaaagtcaactttcaaataccagtgactcatttctcgacacgtggtcaacgaggtaaaccatttctcggaggatcacctctcgcttgcttactcaagtacacatattcgggtcgacccggttctgtctctggccgttactcccttttctgttatctttctttctcgcgctctctgaaaattacagagaaaatggaggttcttggctcgttagcttctatgtagctcactctacttcatttgcagaatacaaatatgtttcaggaaaatttgacacactctagtatgacgatatacatcaatcggtttaaacggtttataacatattttaaccaactcaaatgtggatatcaaattgtaaacattttttctttttgtaaataagatgtaacattttatttttatttatttaatggggagatgtaacattttatttacttaaatcgtctaccaataatggcttgtaataaaattgatactgaaagtaaataacccatagagagtatgtcttctactattctctctcaaggtccaaccttttttcttttcctactttttcgtttctttgtgtctttctctggtccccttgcttttgacctgtgagattctgtcggtcttgtttgtctctcgttgtttctagttggggggttggtgtcattttgacttttgtttccttggtggtatttgcttactgttcttgttgggaaggggtcaacagttttttagttgattggggggttggttgtttgttggtgggattcgtggggtgttgagtatttatgactatggaagaggttgttggttcggctagtagtaagcagggtaggtgcctctccttaaatgaggtttccatttcccttgcccctagcgtggtgactacaaatgtgctatctaagctttgccttattggcaaaattctctcctcaagagcctttaatgcaaaggaggttgagcaaacttgctcaaacctgtggaaaacacgggttaaggtggaacctactgatggtgctaatgctggctccaacacgttccttttttctttgacaatggctcggctagcaaacggattttggagcaaggtccttggtgcgtcaaaggcgatatgctggtgctcctatcgtggtcgactgggttcagagtcaaggaattgtcctttaactcgatccgcttttgggtccaaatccactttctgcctcaagattactactcgagacttaatgctaatgttttgggagccttggcgggtagagttttattcattaatcttgatgaagccaagcctctcacttggaaacaatggattcaggttcaagttgagttggacgttaacaggcccctgtgtagtggttgtttcttcaaaactacaaatggtgagaataagtggatacaactcaaatatgagaagctggatatattctgttacttgtgtgggatgttgggtcaccaacgctgtgagtgtagccttacgtctccggtcacggtgatcaacgacaaaggcagtccctatcctctgttcggattgtggcttactacacgctcgacctatgcctcttgcttttctggcaagggtggtagttcgtcttggttggcagagaaacatgtaggcgattctgagaatggtaaaggagtggttggaggagagatgat

SEQ ID NO: 239216 - DNA, 1426 bp, Cannabis indica
ttatggtttcacattgagactcttaacatccaagtctgattacgcttctgattcttaattctatttgcaggctaggcatttagtggcaactattatagcctcaaaagctcttggaggcatcctatttatattcggaagctcctttggagcttatatcctggttagaatttctatggattgcttttggatacaaaggtgtgacaagtggagcttaatgttctgatattattgtttcttgctgtagattttctacttagccttggtcactccaattctttacgatttctacaactacagtcctgagaagttccagtttggtgtacttttgaacgacttcctccaggtttgtgtaactgtaaatacatgtatgtatatttgagtcttgggacctatataccttattgagtttgctattctttttggtgtgctttgacagaatgttgcactattcggtgcactgctgttcttccttggtgtaaagaactcacttccaaagaggcaaaccaagaagaagtctcccaaatcgaagacggtttaggtagatgatgcaggaaagaaccaaccgacagagattactggaattattttaaagggtgtttttttcttttttttctttttcttttttgaaatttttaggtcagaagaagtggctgctcctgcagcatcaaaaaccttactgctggatgttaatcactcgtctgttttgtaattctttttaggattttttttttcaattgcttgctccctgttatgggatgcaacaatcgaacgcattaatgcatgtgtttcttcagttccattatttagattaaggaaaaatgaagaagcattcttttttttctaattatataaattatgtggagcttattctgcactactcgtattgccttttctttgctcttgatggttatatgttttggttcaataaaatgtgcttgtattgtaataaaaattttttagtttgtttttgttgttgttaacgttgaaaatgtcatgcagttttgagtttgtctaaacaggtcgtatcatatgttaagcttttggttcatttgaatgtgcatgcattttttctagtttttcgtcgaacctgatgacattcaaatatactatttcctcagtttttgctcaaagcaaaaccgtttgtttgaaatgacttgtctttatctatatacatttggacttgattttgtctcattttctttttcttgtttaaaaaaaaaaagaaaaaaaggatgttacttgttccaatgtctttcgggtcctatattttttcccaaaaaaaaaaaatatatatatatatataaatccataagcgctatagggcaaaacatatgtgctgagttgttaagatttattataatgataataataatgttgtaatatagtttataataatcactaagtatgtaaaaacttattttatata

SEQ ID NO: 239217 - DNA, 2620 bp, Cannabis indica
aacttagtgtacataattaatcctaacatgtacctggattaagaagtactgattaataactaaaatatcatattttttgtatgtagaaactgagaaaaaaaaatacagcattgaaagtaattcttatgatataccagtctattaagaccatgagaagtagaattgagcacaaaaatgacatcgctttgtttttggcaagcataaaaatgctcacccaggaaactgcattgcatctaccaacaaccaatacatgttttcgcgaaaaagacaatttccacataatctcatatcaatcaacaaaacagtaatctaaccaacaagattatgaaattattcagattctacgataaaacttagctactgcttgttcaatatctccaaaattgcaaggaaagtcacaatacctgatacagttccttgacgaatcttagctttgagattgtacaaatgccttggggttgactgcagctccggattactttgtttgagagccttaagtacttgacgaggtttaacaccagcttcagtcattactttaatttgcctcacctcttcctcagtaaaacggcgactataaggatgctctgacatgtcctttagagcttcgtgattgtgctccccattttttaccgcaagcacccataaatcatcttcttttttaccaatggcttcaaaaggacaatttataaggcgtgaacttgctttccttttacgtttactttcatcaatttttcgcctattacgatatacaccccctctatcacaaccaaggatgactcttctatctttcctagacttctttatagtcacgacatatccctgactagcaccaaaatcacgtacatatttgatgaggtcctcacgatcttcaaatgttccgggttgtggaggaagcatctcactaagctttttctgactttgagtttctactgatgatggtataaacaaaaaagttaaaagaagaaaaaaaaatggaaatacttaacaaacaccagacacaatacataatagaaaatggtacagcgaactacaaagatagaaagagataaaaacagtgtgaactttacaccttcagaaatataaatggagctcatatgatgaaaaatcaaaaaaagaaggcacaaacaaagtcaagactttctttcttttacaaccatatcagaaacacgattcaatgcaacttatgtaactcttagcaatgaaggaaaaaaaccctcaaaaaaagttaatgaaactggtttgatgataacgatatctaacccatctcactgttaattattcactcaatttcattgacaatatataagtgtaacaagccaaatttaaaataatcaaacgacattccaaattagaagtaaaacatcaatggagggggaaaaaatacaataatacaaagctgattaaccatacacatgaatacagctggccagtctggtcatctgcaccccaaaattcaaatacaacgctttctaaatgataatataaatcctaactacgcagaaatcccagtataacattactacaattccgaactttcttactggttttgcactgatcataactgaaagatcctaactttcaccctcagcgaaacaaaacaataatagaaattacccacatataatctaatttcataatttccaaaaaataataaaaaattagaaagaaaaaaaaaaaacaaacaaagaagataaaattgaaccaaacagatcaagattttgataagaaataaaattgaataaaagatgaaatacctcgagcgagagagttgggtgaaaacttggagatttagaaaaaggatcgggcaacccagacccaataccggcttggggacacaggcctcgtcttctcgttattattcaattcaaagacagtgatgcccagaggccagtgcccagccgcagtttatgtctttacattcccaaacgatattagtacacgcgctgtgagaacgcgtgcgaataatgttccactgaatcggttttaagttagtacaagaattgagatgacgagacgattgctgttccgggttccaacgagagtaactagcattttcgttatgaacatggtatttattaaatattaaacaaatattttatgtttggtatagggataaggttattcttagttgggtttggtgtgtattttagggttgaatatccaccactatataaaccattttactgtgtacatttattattactcaagataataaatcacattttacttatatggtatcagatatttccctttaggagatcagatccccttttttcgggcatgtacctctttttatggatctggctggttcttcaaacggcttagtggaacttcaacagctcaccttcttccatggcacgaactcgccggttctctgctcctcattgcgatcttccgtctgctgctgcttccattgccggcaacgttctcgccggttccaccactactcccgtggtgtcctccgttgaagctctgatcattcaagaaacgattcctccgtcagccgaagctccgatcgagccacctgttgtggctcccaatcttcaacacgtcatcccgtctcctcctcaaaatgctcgtccttcctccgccgatcttcttctggtcggagtcgcttcca

SEQ ID NO: 239218 - DNA, 4627 bp, Cannabis indica
atatatgttatgtcaagatccttaatattacttggaacaccgtcttttttttataattgttcgccttttttttttatttatagagagccatgttgatcatgatttgtgcatattgttgtttcataacctaatctctatgtcatcataggtaaaccaggtgtgcactcaagtgtagataaaagaccgagaatttgtataggaaattaatgaaatttgagcctccggtattctagtggttatcaggcgcgactgctcagtttatgatgttattttctatgattgatactgaaaactaggggtctagaaaacagtatgatatgtacaaatagcttgtctcttgtgattacttgtgatctcactattttttttaatacgtgatgatgatgatgataagattctttaattttaaaagctaagcatgcataaatttttatcaataaattattggtcctttgatattaaatatttttctagtgggcattataagctcgcaccctatatttctccttttaagaactcaatttggtacttgtaaatgagagaaaatcgttgataaaaaatgatgtgattagcttagtctaattttgttattaattaactattcttttaaagtttgatctcgcatctaaattagaatggatggtcaacgaggaatgatggatgctaagtatttattttcgtgttttacaatttattaaattaatcatttgatgatagcataaccatgaacatactattgtttatatacatatatactgatatagtcttacatttattataattattttttatttattataatagttattctattattttaaatatgcattctataaaattttgtagtctaaattaaaagataatttgtaagcattatatactaacaagggttaaattgtgaactttgaccactaaaatcatggatattatatatttgtcacaatttaggattcaaagcgtgaaaccttaaagtgttcttggataggctaatgaacgatcagctagctgtagtataacaattgtaggtttaattaacttctccaagttgtagcctcttaaatattgacaagggcataaggttgatactggcccccagatcacataatgcatgaatgtttctgagcctcccaatagtgcaagatatggtaaaactcctaggatcgttcaacttaggagagagtttcttctgaagaatcgcactacactcctctgttagagctactgtctcaaattcttccatctttttcaatctccttcatgaatttgacatagcttggtatttgttccagaccttctgcaaagggaatgttgatacgtagctttttaaatactttaagaaatttactgaactgcttattcatgttatttttgcgcagcctctgaggataaggaatttttgtgtgatgatcaatactaataggaggagaagtttctttttgctaaagagcgttagtagtcttcttcttttcttgtgtaggtgctggttgatcatcatcttcatcctctgatttatcttggcttggcccaacatagttcttaccacttctcaaagtaattgccttacagtacttctcttttggattaacttcgtgctaggaaagttacactgagccctgttagtgtttttagaagccaactgccccacctaagttccaagaccttaatggaagatttaatctctgtcataaattgcaatagcgagtctatttgagaattagaccctccactagagcctttttgttgctgttgattttgttggcttagctgagattaatttttctgtgggtagaacccttgttgttgctggttgggaaactgcttttgaaagttccactgatgacccccttggttgaaagcataattgttgttctgatagtttccaatggcttgggcttgctccatttgcaaactgtctacatctatagggcaggtgtcagaagtgtgaggtcctccacacaattcacacacaacttgagcttgttttgcttatgcagtcaccaacttcgttaaggcccctgggttgtcaacttgattatagcaacaacttcatgcataccaacaacctttttagattggactctctctgttgaccactattggttagtcatggccatctctcttcaagtaattcaaaggcctcactagcacgtttcctcataaaagtcccaccaactgcagcatctatgagtgtgcaggcattcctaaccaattcattgtagaagttgtgcacttgcagccacttttcaaccccatggttggggcacttcctcaataagtccttcaatctctcctaggctacataaagagattcgttgtcatgctgggtgaagttgttaattttagctctagtttggcgatcttagcaagacgaaagaacttagaaaggaatttcagggccaattcctcccaagtgctgatagaattgggtggcaaagataccaaccaagtcttggttcgctcccttagtgagaatgggaatagccttagcctgatggcatcgttgctaactccattcaccttaaatgtctgacagagttcttcaaagttagcgagatgcacgtttgggtcttttgttggcagcccctcaaactagactgaagattggaccatctacagtatggtcggcttgatctcaaaattattggcgtcaacggcacgtggtcttatacaagatctggcccctgtcaaatttggtagcaaatagtccctcaagctatggtcattgttgcgaccagtagccttgtcttctacaacacctctattgttaccattgttgccattgttgacgttatctaccatgactacgttgtactcaatctctattgcagccttttctagtcttttccttagtctattctgtctggaagtcttctcaatttcaagatcaacaggcaatctggcagttgcaccttgacatctcatactgaacttgagaatttgaaaccaacatgattagtactaaaattgaaaagaaaaaaccaaataaaaacaaaatttaatatttaataatattaactaacaatttctggcagcggcgccaaaaacttggtgattgcaatacgcaagtatacgtattgttttaacaagtattactaacaaagagtgagatcgatcccacgaattgtagttaagtacgttaaaattaaactcttacttctatttggctgaataaaatttgagataaaattaaactagaaaacaataagaacaataaaaaccaggatgcaagtaaattgataggcaaattaacaatgtagaaaagttacggttttcgattataattgtatcaactgattatggcctaatatgattattttcctatcacaaatttttatgcaatagcaggtttactaagataatttatagtcttctcacatatataaatctatattacatgcaaattttttactttcgtgataaattaaacatgtaatatgcattaaacacacaaaccctataagctatctaaattatataggtacactcgtcttatattgaaattttgttatcttgcatcaaaatcataaaacaattaactgatggtcacgcaattaaaagtaattaagtacgaataaaataaaatacatagaaattgagggaaaattaaatcatattagaactattaatcaatatcaaacaatctgcatctagaccctaattaactgtttagctattcatgttcgttgtagcgaattcacacatattaatttaagaaaagagaagaaaataaagaagaagagaatgctgaaaaccctctgagaaatgcctccagtactaaattcaatctttgaaatttgtacttccttgaatgtctctgatttccttccgaatttcttaccgaaatcaactgaagttcacttcttatatacatagccaatgagggaataaaaaaatagaaaagatagcacatgttgaaaatcctattcagctttgaattagataggaaataagcccacattgaaaaacttatatttatcttcgaactagtgggcgggccgcggcatgctcctcctgcaccgcggtccgtgtatgaaatttctcacatgctgcacgcttctcaggaacacgggtcgcgtcatgcttctacacatgtcgcggcatggcccatctgcacacttatccttgtatgcgatcttttgtcctttttctcatctttttcttttgatattttctaatcttcttctatattaaatctgcaaaaataaaagataaaaagtataaaattactccaaacacgagtaaaataaaatttaaattacactaaaattaatttaaaaataatactaaaaacaacctaacagcagccaagagtaatgtacctgtgtataagagtcataagactgtgggagaaggtccaatgaagacttgaggcgaggatgttacattgcttgttaatagaaggaaaatttctacaagtgatcactataggttttatgattttgtttgtaatatgtaagtgttattaatgtgatatgtgttggttgttgtagcaattgttgagttttattaataaatttcattttaataataataataataagagtaatttgcggcataaatacttactcctagttgcaaataaatacttaagtttaatttttgacggcaataatatacctaagttata

SEQ ID NO: 239219 - DNA, 3043 bp, Cannabis indica
ggtttttgtttaagattatttaactttgagccattttgagagaagagaagataatattgtaaataatgtttgattggctgaaattgtttgtagtttttattcaagtttatatttttttatagttttttttttacttgtagtgaataaggtgagtattccttattggttcatagttttttaaagttggaaatgttagaagacattgaatggaagttaagacattatatttggagagtaaggatagctgctactaggatgaatagtatggtaagaagcatgggattgtatcgcaaaaccaattagtgatgagtgtagtaattcatttttataaatggttaaatttgttcttgagaagaaactccgtcgagattgggaatttggtggccatctgaagaagagtaataaggaagtgcatcgaaaaactttgtagggtagtgccttcattaagcatttggggttgaaagaactgtttattttgcacatgttatgttggaaaatgtgttttttcttttagctagcctccttgtctaaccctgcaaattttgaggaacataaaactatagcaattgttatgtaagtttgtaagagggagttgaacctcagatcttgtgtggcctttgagcttgttcccttgggtgatttgacattgcataacttgagaatatattcctagaattctactctgatcgaacaacagatgtacttcttattccttttgtcattttggtataagtatcaaatttaatgatgttgagtattaagccatttacaatatcttggtttttcttttatctgcagctctgctttcttaacttaacttttggttcttcaatggataatgggaatgttctaaatcttaagtttgatttcttgtcatgtttattttctcatgataaatttctgttgcaaatttgtattattatttatttaaatctactccacaattccatctttgaattgtaaagatatctttgttcctttaataatgtctaacctcatgattgataggataaatttcgaaacagtacagaggacactaaggagaaaactgataccaagaagcatgactcatttggagaagacgatgccattgttgagtctgatgttgaattggatgattctgatgttgtggagcccgataatgagcccccgcaaaaggtgaacaacagaaatattagttatcttcttcttcttcttcatttcgagaacttgctttatttactatttaactgcagatgggcgatctaactgttgaggttacggaagagatgcaagatgcggcacaagatgcaaaatcaaaggctatgaatgctatttctgaaggcatgccatccactttatatgattagaattatcattttctgttttttgtttcttaaataattgttttccctttcaggcaagttggatgaagccattgatcacataacacaagcaataacattgaatccgaaatctgcaatattttatgcaactagaggtaattttgttataaacccggaatatatttcttctttcctttgtgttgaagtttaaccattttcttaagagccttattatcttcttgttttcagcaagtatctttgtcaaactaaagaaaccgaacgcagctattcgggatgctaatgcagctttagaggttggttatgtcttctgtttgtatgtgttttggagaagaataaatttagttaactatgatgcataagttatatgctttgttatatagatcaacccagactctgctaaaggatataaaataagaggtatggcaagggcattgttgggtcattgggaagaagctgctagagatttgcatgtagcatccaatattgatttggatgaggagattgattttgcacttaaaaaggtaattttgctcttttgaagatgaaatctttgccgaaagctgttacttgattgtgtagttaaactttccagatcgaacctaatgctcggaaaattgaagagcataggagaaaatacgaacgtttgaggaaagcaaaggaggcgagaaaagccgagcgtgagaagcagagacaatttgaagcccaagtgagtagatttaaaattttaaatgggtgtttgatcgtactagctaatctgtttcattttaatatttgctgaaaaaaaggttaaaaacttggaatgttaagtcaaggtcatagagggaaatcttgttatcctgaaaatccaaagctgctgatttttgatcctttgttttgacattgcatagttctgaattatgttcttgtacactagaataagagtgttaatatctattctaatgttattgctgtattttatacaggctcaagaagcgttgtctgctctcaaggacggtatgatgttcgatctctctctctctcttcggtttttttcgtaattcttttgtggtgaatgataccctcgaaacgccattgttacaacagtagcagagttcgaggaaacaccatcaaactaaaaccaatcacaagaattaaactaaacttaattagaaactaagcaagaataaaacttagctcgagaatgaatgaatcgtgaatctttattgataagaatagttagtagtatacaattgaacacctctaaaaattatacctcaaaagattgaggttcaaacctcaattacattcaatctcacactgaagaacacttgatcaaatacaagtgacatataacaatctctctctagacttagctctgaattctgaattatgagcattggagatgcctgagagagttcagacatacctatttataggtgttggtgaggttctgcttaagttggtgtcaaagccaattgttataactaacaacagcttttttctattttaactgataagtgtcgagatgaaattactgacttgacaaggattaagtgagtttaatctcaacatgtttttatattgtttctgtctgaggtttcttttcgtatagtaattttcaagttccgattatcatgtcccgtctgttatgctatgactgttactaaagttccaacttttcttggcatgactgtaatggtgactagatatagttcatg

SEQ ID NO: 239220 - DNA, 1504 bp, Cannabis indica
tacccagaatgcatctcccatgcgaagcatctcttggtgtattgttttaaaaatcagaaatgaaactttgcaattaggcatattataaattctgtcttgaaaccaaatagtccaaattaaattcgcaaccaaaacggcaaatatttgaactaaactaagtcaaggaaatttgagcaccaacatccaaaccaaaaccaaatcaaaaacacaaaaagaaaaattggtcactgaaaagtatcccatactaaccaaaagtgaaaccaagagtactaatgagggccttgttgcaaatcacaattgaaacggaagacaccaccgacaaactcaaagccccaatagtgcccaactggaacttctggctctcacccatgttcactcttgatttaataattccttccaaaacctctatctggatcaatcaacaccaatcacagtcatcacaatatcaacaacatcttcaacaatcaccgattaaagaaaaaaaaactacatacctcattaagacaaagaaagattatattctcgagcgtggtaaattacacaacacagcagcaggcaaggcagggtccaaactaaaacaatgaacaaacacaaaaacgccatgtgatcaaaaattgaactacaatttccacgaatccatggttcttaaaaccctagatctgctgccatcaaataatatcaaaaaccaaaaacacgcacacacatataaatatatagatatagatacagagagagagagagagagactgactgagaatgtgtgtgtgggaaaaagagagctgaaacacagaaaagaatggcggggaagaagaaggaaatcaatgagagaagggtggcattgataatgatgagcagtggttcttgtccattaagaaaatggaaatgggcaatgattttatttttttgggactttatgacttctcttctcagattcagagagagacccctccttcttccttactaaaataataattaaaaaaaaaaaatacatatgctattggaaaattattcagcatccgaatgaattttttgaatttttattttttttatattcttctatatatatatttaaagaaattaatgaaaatttaatacctcaaaacagatttaaagtgtaagtatgactttttttttttaatggaaaatgttaattttattaaccaacaaactcagtcatcaaacaaggtaacaaattaataggattagaaaagtacgatcaggatacaaaatggaggccctaacaaagttataagctgctacattagtagatcgtttaataaaaataaccttaacggtacacaattcagcaagcaaaattttacagctttgaataggagtgttcgcggtgcaggtggtgcaggtggtgcggttttgactattttttcaaactaacccgtacatacggtttttccaatttcccaaactgcacccgcaccgcgaaactaagaacccgcaaaaaccgtaccgcaaaaaatagtgcagtgcggtttttgtgatttatgcg

SEQ ID NO: 239221 - DNA, 2751 bp, Cannabis indica
atttttaacgatcaaaaaagttcggaggatataatttgatacacgtctaagttcaggagacaaaaatctaaattaacctaatagataatactcgtggtacacccaataatatcatgagatgttatacaattataaatgtaattaaacattaggttgtgtacattttaatttaataatattatcactaagcattagcaataacaatctttctaatgaggttttagtaaaataatattggttaaaagcaaggagtttgaatgagtatgttgttgccctatttcagtgagctccaccaacttagccatggtccaatttttaggggggtccattgtttagtgggcttggctcagcatatcagaattttggaatggcttggccttgtacggtattttaatcattattacacacaacactattcaaatttttgaactttgcattccaataaagaaaaccctagtacttcaacaaaagctttctttgtcctaaatttaatgatatttatggcacaatagcttttacatcattatccaaacttctcattcaattttgaaaataaatattaagacgtgtttccatctagaaaacataattatggaacacacttgagtgaaacacacacacatacacaagtaggctatatagaaataaattattatgtgacccctataattgtattagtattgtacattagtactatttaataatgagatagttatatggtgttcgattctatctttagccttattttacttagagcatctttgaatagatagctttccaaaatagtcttttaattatgatactaagtgaaataaaaattgacttttagtggctagctaacaacctatttagtaaaatatagcaataatcagcataaatcattaacataaataaataaaaataaattttccttcttcaaaaggaaatttcaataaaaactttaacagaggtaacaacccaaacttttcttcaaatagctctttctactctaatgatcgtgctcttggtattttcttgagaggcggacttggattttcaagaggacaaggtttagttcacctaccaatagacctcaatgctaaatctgcttcagatctggtcacactacttaagactgctattatagatttggcaagagcttctccaacttccgtgcctcgagctcaacttcatcagcacaatctgcatcagctgaagctaatctcactgctgcaaatcaagcctctgataacaattggtaccctgacgcaggtgcaaccaaccattgcacaccagatgctcaaaatgtcatgaacaacagtgattacatagaacctgaacgtatgtatgttggtgatggtacaagtctggtcattaaacacattgacaacactttcatttcacaaacttcttgtcactctcactatttacttcttaaaaatatcttacatgtgcctactattactaaaaatttagttagtgtgtctaagtttgctgcatattgtggagtctattttcaatttcaccttaaccaatgtcttgtgaaagatcaggtgacacattttgttcttctcatggggagacacaagagtggcatgtattcttttgattttgatgatctgcaactccactcatctcctcaatccccaactcaattgctttagtctagtgtcccacaatatcatatcaactcacttgtggtgtcatctcaacctagttcaagtcaacctactcctaccaataattgtacaagttgtcctaaacttaaagttctcccttttgctcatattcccttacattcctcacaacctctaccaatatatcctactgcacatgtttagaatgcacctcactcaggtcacttttaaggtccacttttctcaacttcccatgctaacaaaattattgatttgtagcatactacttcagatcaagttcttagaggtgcttagcctacttccacaatgccaactcttacctcaacatcgaatgctggtcaactagaagctcaggcccctactgcattaagtcgtgttacccctgctaatgttcttcctgcaaacaacacccaagttcctccacaacaatctagacaccaaatgcaaaccaggtccaagtcaggtatctataaacctaagacattcattgtctcaaaaatttttgagtcaatttagtaagctctactatatggtcactgaaacaatgccatgttagaagagatgtttgcactcaagaaaaataaaacttgaattcttgtgagactttctacatggagacaagcaatagggtgcaattgggtgtatataataaagaaaatgcaaatggttgtcaggatagttagttaactgtctactataacagttagtgagttgtgggattcgagttaggagttagttagattggtggtaagatttgtttgctttattgagcttgtatataaactgtaattgtgctctttactaatggttaagactattatttcaggatatatctttctttctctttctctcttctttctttaccttactctgtctttcttgttctttctttgtcctgttctaatgctactcaataatggtgagaaggaatcacaatatcaataatggttcagtcaataaataaaaagcttggttggttgccaaagactttaactaagaaactagttttgacttcactgagacattgagtctgttaaactagttacaataagagttgtgttgactcttgcattaagaaaaggaatggtatgttagacaactagatgttaataat

SEQ ID NO: 239222 - DNA, 1156 bp, Cannabis indica
aatgtgttttatttagggcataaaacccaacatagatgtgatttgtttaatgtttaagaactatgagtttaggcttgtggctgtgatattgttgttggtaggagtacaatgttctgaatatcttctttaatagctttaagaattactagaagtcaaatttctttgttgcactgttctgaatccttatggttctggatagtatgtaagctttttcttttcttttattcttgtgttcttgattctactacctggaaaaaatgcccctaaaggttttgttggatagagaatctgatggggacctctccaagcaattatgggggaggattaattcccctgtgcccttactatcttagcttgtctaagtagctaattgcttggtattttttcagcttccacaatgtctaagagtgctcaacaaagagtaatggaagtgaacaaagaagatgtagtgatggagcgatcccctgctctaaaattagtattaaattaatctccataggagattgatcaatacaaaaacattcaaacttatgacaacttccagaagtatgaaacgatgggagaacttgaaagtgttctaggactattttagaacagcttgtctgtcctaggagaaaaactaagcaagtgtgctgaaggaggttttagtgtctagagttcgggctactcaaaacttgttgtaagtactagtcattatattaatatactctgctattcataaatactctctcaaacagataaagtaaattcatacaaaaatagagttaaatactgctggctaccacataattttagtattttataataaatatattggaagtaaattatcttttacagaacaaaaataaataatagactacctaaagtataaacaatatgtgcaaaacacacattaaaattaaagcaatcacttacaaagacaaaatattttaatttcgtatcccaatgcaaagaggtctcctcagacaggattggatctactcatccacattaagtgtatgattttgttaaaacttaaaagtaaagggaactttgtggttttgtaaacataatcaaataaaaaaatttaccaaatatgaagcaatggagactatgcgggagaaactcatagataaggaacctttcttttcctctcaagcagaaaccaatgagccta

SEQ ID NO: 239223 - DNA, 3875 bp, Cannabis indica
gcttacaaacataaaattttaagtacttatcccactacttatccttataattattattattatatgacaacatatatttcaattatagtatgcattttacaggttttcaacaaatttcaaataatctgtagtgcgagaaatatgattcgaaaaaatcaatcgcacattgtacgtatacttatttctcatatacgtatgtcactaattattgtgaacgtctctattattaataccataaattttattttattagagttttgatgcaaaagaaaaattcatgcatgcatgggaccctaaaaagctcctttaaccgtgtataaacgctaaatcttaatatatattggaaaaattgttaagttcatatatatcatacaattaggagcgataaaatgagtcacacacaataaaaattccgcttaaataaactatgccagagcattgttggatactagtggtcattttcataaatatgtttgggtcacattctcattgacactaagcattgttattggacaccaatgatggtcaatagtacattctataaatagcattttatgattagttagttttagaatcagctttggattagttagttagggtagttttgttagttagatatggttattacagttgtactctttctgttacaaattggttagttttaaccaacaaattcttgatgcaagccgagctatgtaagctctctcttccaattgtaaaataaattgagtatcaataataccagaagctctaattttcctctgtttctttctctcttttctcatatggtatcagacgaactctgggccacagcttccatgcccaggccctcgactcgttctcaagatggcactacaccatcggcgatggacaatcacgcagtagaggtcacttccgacccaatccctgctccaaattcctcagctattccccctcaaattccaccagtgcgacttcaatttcagactgcagatcccattctccaggaccactccaccatcgttgatgaactccggcattcaacttgtgattggttgctgacgatcattccagcccattctttctcaacaccggttatcacctcggtctcgtgctcgtgcccactgtcctcaacaacaacaattatcaaccatggaaacgagggatcacgatggccttgaatgccaagaacaagatcccatttatcagcggatctctccctcgtccagaacctggtaatcctactctcaactcttggttaaggtgcaacaacataataatgtcttggttgattaattctgtttcatctgagattgcacaaagcataatgtactatgaattagctactaaaacgtggaacgatcttcctgagcgtttcaatgaaggcaatggcccttggattttccaattgcagactcaactcactcggcttcagcagggtgattattctgtttctgcatattttacaaagatgaaatccctatgggatgagttgaaagaatttcaaccaataacaacttgcacttgtggtgcaatgaaaattttcttggattatttcaaccaaaatcaagtacttcaattcttgactggtttgaatgaatcctatgcatcagttcgtgctcaaattttgcttaatgaaccaatacccaatctgtcccgtgtgtttgccatgattgttcaaggagaacatcaaagatccctcggatcttctaatgcaagccccctggctgtggcttcaagttccaccaatcctccaagagcctagaaaccctggccatcatgttcaaactgtggaaaactaggtcatttaattgacaaatgttatttccttcaggggtttgctccacaatctgtcaatgctgatctttcttctgaatgccagcatttaatctcacttctcagtcagcaactcagccacaatagccatgctgaacccactgccatgaatcctgctgcctaaaaatctgacaggtaataattctgcttcttatgcaacatcttcgatagtcgatagtggtgctacacaccacatgtgttccaactttgcttgcttctcttcatttactaatgttccatttcctaagtatgtcaccttaccaaatggacaagaaatacctgtccaaaatgttggcactatcaagattaactctaaaattactctgcacaatgtgctatacataccacagttcaggattaacctcttttcgatatctgattttatgcttaacactcctaattcaatcttgtttcatcataattcttgtgtaattcaggatcctactctgaatgtggtgattgggacagctgaaagatgtggcaaattgtacttgcttcaacaagacaactcctctactacagctgctactacatctcttttttctttcaataaaaccaatgtaaaccaacggcacaatcgccttggatatccctcgatgtgtatttccaatttcttcaataaagaaaacaatatttcacatcacaattttaatctacattgtcatatatgccatttggctaagcaaaaacgtttaccctttatttccaatcacaatttttcaaagaatgtatttgatttggttcacatgcatatttggggtcccttaaacataacaagtgtggaaggtaacaaatacttcctcactatagttgatgacaaatctagattcactttgctttacttgctcaagaacagaatgtccaacatgtaatccctacattctttaacatgatttgcactcaattcttaacatctcttaaaacaatcagatcagataatgaaaaagaaatttataatcttttttgcttctaaaggcatcatcaaataccattcttgtgtggaaagaccacaacaaaatttggttgttaaaagaaaataccaccacatactaatgtagctcgtgcactaggattccaatcaaacttaccattggtttattggtcatacctagtccaaactgctacttatctcataaatagaaccccctccaagttgttcaaaggtatgactctaggaatgtcaatctgggctattttcgcgggccgagccgggcccccggcccccgacccgaagggccgactgtggcctgaattatttgggctcttatcgggcttctggatcggcccgacccgattttaaatattaaacaaaattctaaacccaaatctcagtttcgacttctctctctccgacgacagagcccaagctgcctaacccaacccagtcatcgctctctttcttggcctcccacgctggtctagttcgtgctcggtggaagggaggagtgttgtgttgggttctcatattgggtctagaaagactctggcttatatgttgcctcttgttgaggtaccttcttttcattactttctatgcaattctgtagtttggttgttaatactttccatgtttgttaatggaattttggaattgggtgtcatttaacatctaggcttattttgtgtttgagtttagagtatgatttgactatattatgtggtcttcaagcactgcctcttcgtccaattgtctaaatttgcttaagattatgtcagctgacttattttaaatagttgaatattatatatataaccctactgacttatgactataagcaaatcacatgaagcttttttctagtaatcactacaagaataaatcacagcacatcttcttcagctttagattatatattaattaattttggctataattagtagcgggcatgtgtttctgacttgagattttttatctttcagttagatccctatcataattattcaattatccaatcactatattatgtgtttgtgtttgttaattcttttccttttttcgtttttattggtagcatagacaatagaataacatgtgtgtcttctaattaatttcattggct

SEQ ID NO: 239224 - DNA, 1366 bp, Cannabis indica
ttattcgtagaattaagtatcgaatctcatataatttaagaaaataatttttaaaaattatcgttaactaattgtaacacgttgcttaaaaaaatagtgagtacctctaatacttaattttaagcacatgtggtaaaatttctcaatattatttttatatgtgaaaatataggagactgtgattttgtttattattttatataaattttgaaagaaggtgttatctttgacttttatataatagaacaaatttcttttaatgcattaccacaaatagtcttctcctctcatcgttgactggttgacttgactccagcaaagcaagcagcatcttctcctcttctttctttcttttgtatttactcaattttttcttctaattttgataatatcattttcctactcatttcccaaatcaattttttctcatcctttctctctctacaataattcataagtgattagaattcctaatgacatgactacaaattcacaccacaacaaatctgaatttttagcctcaaacaaattttgtgtctgacattcttacattattattaattcttacattatattaaaaagtagtaacaaaaaactaatactcacaaaaatgatatgttaggactaaaattaaattagtaataatttatatttaaatattatatttttttattgtaaaattactttaaatttacttctatttgtaaatttggagtagcagttaaattttagggtaaatatcattttagactttgtgttttgtaaaagttaccaattgaaccatctgttttgttaaataccaaaatagaccctgtattttccaaaattgtacaaataggaccctaaaacaattttttatcaatctaaaacttaataaaaatctgatttagagatgttatgacaaaactggttacattttctgtatctgttcgtattaaaaattgtcttaaagttagttatattaaaaaatataattgttgaaaattgagcttagggtcctatttttaccattttaaaaaatatagggtccattttgtcatttaacaaaacagaatatccaattgataatttttacaaaacacagggtctaaaatagtatttaccctaaattttatcgttaaatttatcagtttacatatattttttcggtagcaaatcaatcttaaattctattgtgaattataattaggattgccacgatgtacacatatagcatgtatttattggtccaaataatttaaactatttaaataatataaaaattatttttcaaaaaaaaaataaaataaaatcatgaaaaagaatttaaaaataaataaaagatttaagcaataaacttaatgaaaaaaaaaacccctaaatctct

SEQ ID NO: 239225 - DNA, 3511 bp, Cannabis indica
tagttttatggcttttgtgggtccgcctatacatgtaggaaattcaacacccatataaaatttgtaaaacgtatattatgtgaaaaaaaagttgactctttgtcgatcacgacgagtacattcgattgactagcacataatttgtactcataaatctaacttggtttaacatgaatgacagatacaaacctcgcttgtaacgacttttatatatggaatgattttttcaaacaaacataataataatgatacaccaaattttatttgacgagttaaatgacaaaatataccaccgcttaagctgaacaagttcataagtaagtttgataatggcccaaaataatggcattgtcttaaaaaatcaaaatagaaataagtggccagtggacaatcttaattagtagtagaaaatatgtaacaacacatcaatatcaaacctagctagcaccaagaatatcacttggtgacgataataaaatttcacatatttcgccgccaaagaaattagcatcggatgagcaagaatgtcatatgattggatgagaatattgtgatatgaaatctcatatcttaaagtctaaaacacccatttaaaaaaagaaagaaaagtaaaacaaacaaaaagtctaaaacaaagtccacccaaatttattgtgaagttagcagaaaacataagtctttattgaggggaaatacttatcattatgggttggttcagtattccatattgtattatattataattaaatttgttaagtatttttttactaatttagttgttaaaattttatttaatttattgtaaattaaatatgattttcttgtgttatttgtgtgtgtatggttgcttttttctttttagtaaacttttgttaatagctgtacattttttattttaagaaacttattatataagagaagaaattctctatatagaaagttttcttaactttagaaaaattgacttttatcttttattagttgttaattttaattttactatgtatataactaatcatatattctttatatgacagaaattaaagtggaaatcaagatcttagatttatttagaaaattttgcaatttgacattgatctgtcactgcagagtacaattttgtcgttgtatattagggtattttttaggaaaagttttgtacaactgtgtaaacgtatttgtggttgcctctaggatttttatgttctaaaaatagaacgtagagagcagccaaatatttctcatctcttttagttcatattttcatatcttagttttatgggaagagtgtttcttttgggaaatcctagatcattcaactaggttttagtttttctgtaatgatcgaactcttactgttcatagaataagttgaagagaaacttggaacaagtgtagatcttcaggagaagacttttctaagtttcatttcgggaggaagtgagcacacttcagtaattgaagggagttcactacttggtgtatatcagagattatattagcgaggtagattacaaagggttgtaacaaatcattagagagagtctaattttttttagtcaattgcttttgtaatgtttgatattttactaattgattttattctctagaacatggccttatggactagtagtgtttgaaagaatactgataccttcagtcaatctttaaattctacacattttatttttgtttctattctattatagtaagttcatgtttagcagtaacaaatttccaatttgcttgtacagatctttacggttgcatttttctttacttttattaaaaaaaattattggcaaatgcaaaaatacgatttttcaaaattatattttgtaaaatttttatataaaactacatatggtattgatttttttttttttttcgatgaattagtgattttgtattgctctaaaccaatttgtacaacctataggcacctcaatagaggcccaaaaacgatggctaattacatctttttacaaactttggaaccatattctatcttctctctttgttttcttaggcatgaacataggaactcttagtttgatacattgctttataccctcaacaattctatttactatactcccctcctttctccaaataaccaagttccttgttgtccaaacattataaaccaaagcagcacacgctgttgccagcagaagttttttaaacttattggtttttgccctgccaatccaccgaatgagctggggaaggctgttactcacaatagtccagccgagccaccctttaatctcctgcaagcattctcgagcaaatggacattggaaaaataagtgctcacttgactctttctctttattacataaacagcaaacctcctcaatttgtaattcgaatttgaggaatctatcctttgttttcaacctattgtgcattgccaaccacaaaatataacaatatttaggagtgttcaatcgagcccatacctcattactccaattggttttgatgccatccgaggtgaataacttgtatccattagctatagagtactgctggctggtgaattgttggatgctagtgagatctttcagctggtttttcagagccacaagctttttccaatgccaacttgcatgaattgaagccgtgtgactccactattcatctttcctaaggtacacactatggacccatttcatccatagactttcttgtctatttgcaattgcccaaacatacttggacatggcagctttgttccattcctcaatcttttttatccctaaaccccctactgattagggggtgcaaactttgctccattcaattgagccaccatagtttgctaggcctttccacaaaaaaaatctgcatattggttcaatcctcctatatactttctttggtaagatgcaaatttggctccaataagcttggatggctatcaagacagagtttatcaacacagttctagctgcaaatgacaagtttcttgtgctccaactacgtattcttactgtcattttctctgtaaggatctcacactccgccccaaaaattttctttacattgattgggattcccaagtaggtaaagggcagcacccctcttgtgaaacccgaggctcagataatctagtcaatgtcttcagcctccatgttactacaataaagagcatttttattagcattcgggtataggccagatgttgttgagaaaagtttcatggcttgtatcatgtacatcacactctttgtctctcccttacaaaatagtaatacatcatctgcaaaacccagatgattaatcttcaattctccacacctgtcatgaaaaaagaaatcctctttttctccaatcttccccatgagcctagataagtattccatgcctattacaaagagtagaggcgatatcagatcaccttaccgttagtaccccctcctacgtttctaaagaatccgatgaagtgtaccattaaacatcaactgaacgtctaggagttaatatgcattgcatgattagcttc

SEQ ID NO: 239226 - DNA, 3381 bp, Cannabis indica
tgcatgcgagttgatcacaggactgagctggtcgaatgtccattgatgactctatccggacatcctgctatgtatgtacaatttagaccttcatatcaatccttgtgagttgctaagactaaaactatctgcccagattgagaaatgcaagacacgtgtcattcaactatatgccacatcatagtgtaaaaaataagataacaagcattaacaacattccttccaatttttctcacctctccactagttctaacccaaaaagcaagattgagaaattagagtttcaagaaagaaaggatgaagaaggagaaaaggacaaaaaaaaaattatggttgtggtggagtaatgggagagatcgaaagtgagagagaggagatggtaaaatagatttggggtttgtttgtttgttaaatctggattgtttaaattttgttttattttggtttaaccttttctttgtgatttgactatgaaaaataggctgcgaagatggtgggtaatggtggttttgtcgcaatggatggttatgatggtgtcgcgcaatggatgattatgaaaaataggatttgagatttagatagagagggtgagaaaaaagagaaaggaaaaatatggaaaaagaaataattaaatttattttatttattttttattttttagaatgaattattttttattttaagtaaatttattttattatatattttttaaaatatttaattatgtgagccaataatattgtgacatgtgtacaccgtgtccatgtggataatatcctatgtacacatagacactcaacttaacaattaattactaaaaatagatagaaaggaataagtgttaacaataacttgaatttagagattttatcgtcaaaaaataatttttaagaattaattactagtgagatgaccctataagtagttatgccacaattaactcatatatttaaatattttcactcaaaactagttctagaagtggccttttatgctaataacataatcaatttggctgctaaaattctgaataataagcgccactgccaaagcccttgatgatggccttatgtggttcacaaaatttggtagtttggaatgtgaataaaccataaggattctcattacatgtattccatccacatacccccataaacaagccacaactagtggatctaccttaatttcaactctcacaacatggttatggaaccacaagatccggaagttcagtttttttaccctttttgaaaaattaattaatttatttttttcaaaaaaataatttaaatttaaattgcaattttatcatgaagaacggctgtctttcaacttggttgtatgcattgtttctcgtaagcactctaatcactttaaattattcctttcggtttgacccatattagatatttaattcccaattaaattcttgctaaactcctttgatattctctggtaagggcttttatttgaagtgtggtttgttccaatggtggggttgtgtagcttatacactaattcacagttatttaggatccctttgtcagtgactctctataatacatgataatactatactaattaatcggtgaccctctttttctttatgcatggcctttttagcctatattccactaatggccgcggctcttgtgctgacgtacttgtgaagtaatgaagatgctttgttctttcggaataactcaagagacatttctttgaacttatctcattctttctttttttgggtgggttgaattattaaaatatataaaaactaaaccaaaccaaacaaaaccaatacaatgctctagttgactttaacataaagtcaatccaacttaagaggtcaaattcataaaaataaacaaaacacggaatgatgaattttcaatgtgaacacagcgagactttgagtttacgaggcaagtgggaaaggtcaactaacttgtaatttacttttttctttcaagtctttttctttcatgccatttgaaggttgatttaagactattgagcaaaccaaagtaccaaacacgtgacaggcctatatatatacgctttagtaatctaaagtttaaagacaccaaaaaacccccaaaaaagagagaatagactttcaaacactcccaattctcagtttcttctcttattgatcttatggaatggacaagaggagacatgattggccggggctccaccgccgctgtatacctcgccgccggagtatcttccggtgacatattcgcagtcaaatccaccgagctttctttctccaaactcttgcaaaaagagcaatctttcctctcaaacctaaactctcctcacctcgttaagtacatgggctttgatatcacaaacgagaacgactgccttttctacaatcttttcatggagtatctcccacgtggcactctaagagacgaaatccggaggcaaggagggaagctagacgagaccaagatcagaaggtacacatgggagattctccatggtttggagtatcttcactcgaatggtttggtccattgcgatatcaagagctcgaatatcttgatgggaagtaagaacgtcaagatttccgatctgggctgtgctacaacggtcgggaaagttaccggcgatggagattcgggcttgggtaagttttccggtacaccagttttcatggcaccggaagtagtcaggggagaagaacagggttttgaagctgatatttgggctcttggctgcacagtcattgaaatggccactggagagaatccttggccggaggtagatgaccccttatcggctctttaccgaatcggtttctccgatgacttaccagtgtttccgagctggttttccgagaaagctaagcactttttggaaatttgctttaaaaaagatccgaaacagagaatggcagctgctgagcttctgaaacatccattttttgaggagatgaaatctgagacagagcaagtgaaggagcttgtagcctcttcttcttcttcttcttcttcttcttcttctccaaagagtgtttttgatcacaatgtttgggactcgtttgatgaagagaaccatgaaatttcttctttgagctctgcttctgaaagaatagaaagattggttggtggtgactctgtctttacaatttcgaattggtcttcggaccaagattggatcacagttaggagtaatgtcgttgaagaaagcgatgagttttgtgatataaacgacactttagagatgtcgtttatgggagttcaattggaagagcttcctagctcaatgtttgattatgtaaatactattagtagtagttctgttaaagttggtagaaaaagaggtttctagtggcatttgagaatgtcgaaattgatatgtacctgc

SEQ ID NO: 239227 - DNA, 3023 bp, Cannabis indica
aaaaaaaagggaatgttgattacattaatggtaataaagaaaagatttggacatccacataattaatactatttataacaaaaacaacaattttcataatattttttttaaattaaataaataaaataagaaaagaattgaaaagtaccatagatattatgtgattttcttttaattaacagataaaattttgcgaaatttatttgtggtttatattgattttgatatgaggtggaacacgtggagatcagttattgttcggtcgtttcgttttcagtatttttctatttaatttttttttttcgtttggagaagatatcattttcctggaaggagaagaaagaaagtaaatatacgcattaattaatttactctgaaaattcaaaacctgtccctactactcccagtactgcaccattataattattgttattattttttgtataaatgagatatttctttttatttcagtctaataagtaagaaactaataaataaataaataaaaaaaagactttgaaagaagctaaactaaataaaaaagactcgatttatttatgtatataatttgtggcagtggtccccaaatactacgtacgattacgaagtagtattttttatgttttccactcttgatgattttatattaggctcttcttaaatgtttttaaacagcgggaataaataatttgcatgaaacacgttttggtcgctgacacatgtagtatataaattagtgtgagttgacgagtttatttggagagtttatagtgagagaagaaaaactagagatagagagagagagagaaagagaagttaattaaaatggttcgaacaccatgttgtgaccagaatggaatgaagaagggtacatggacacctgaagaggataggaaacttgtggcttatgtcactaggtatggttgctggaactggcgccaacttcccaagtttgcaggtacaaaatcaccactttttcactatttatacacacacatgtatgtatggatcttatctattattattattaacttacaaaattaattgggttttgtgaatcttttgttgatgatcaggtctgaaaagatgtgggaagagttgccggttgcgttggatgaattatctgaggccaaatgtgaagagaggaaactatacacatgaagaagaggaaaccattaccaggctacatgcctctcttgggaacaagtcagttctactatttatttataataataatagaaattttattaaaatatgattaatactaaattatttaacttcgaagataataattggtctcacataccatagcaagactttttaaaataaatatatgcttaatttgtcctaccttctaattattaagaagtaataatttaattgtaatatatttattatattttccagatggtctgcaatagctgccgaattacccggaagaactgacaatgaggttaagaactattggcatactaatctgaagaagcgccaaaagcaaaactcttcatcggtcgaaataagtcaattagagaaatcatcatcaaatagcacagccagtataattactacagataattgtttgagtcctaataatgtggatgattattatagttccgaaatccaagaagtgttaatggagccaaataacaacaacagcaacaacaacaacaataataatagcaatgaggcgatgaggatgattatgagtagtaatagtactagtagaagtagtcagttggaaacagttgtcaataaaaacaatattaataacgtacactcgccattgtcacctcaaccgtcctcatcgggcagtgaaatctcaactacgacaaccgacactagtactagtacaagcagagctagtactgataataataataataatgccactactgaaaccaccacaaattatagtactaattacttcgttggggacttatcttataattataatgacctctttgaagatgatcaagcctttcaacacgagttgttcagtgatagcttttggacggagccatttttggctgaccataattcttacatcccaactactactactcatgatcatgattatcttattactaatgctaattccttaatggatagcgatgatcttttgtctcctaccttggatagcatcctcttgtttacctctaattctagtactagtacagctggttatttttacgaagaaaatctagtaggattattgtgattttttacgaatattgtttatataaatatgattatgtatccatgcatcttttgtaagatatatgcatagaaacttagctaaattaatataatacaggatttaattagttacttagcattcagtttccgaacattatttttttgttttgctaaatcatgaattatattgcaacaaaacttcttttacaacttattatcgatcagcaacattttcatggctatatcttctatacaattctcctaaaaccattcgatatcctttactttcattttcttaggcaatattatagacattctacttttgatatatcttcctttgctacaatgtatgcttacgggtattgtacactacaagaaaattatatctcgacggtctagagagcccccgtaatagaactatctcgacggttattgaacgctgaggaactgaccgtcgagatagggtgtgtcatcttcacatgagtttgagcaatttcgacacctggaactgccgagatagatactaaactcgacactttgaaaccaccgaaatattaggtcaattagggggagaaaatataatttttttaataaaaatttgtccctgcgcgcattgatagtattgattatttgcatctataataaatagtaagtatatacatatacaattagttttaaatatataaatctatataactaagattataattgctatatgtaaaaaaaactagaaaactaatgctggtaaatactcattacagtagttgattcattttttactatacatacatagtcatgttagtctcattcattgtatagtcttacca

SEQ ID NO: 239228 - DNA, 2144 bp, Cannabis indica
tcgtttattgctattccaaagatttggtggaattttagggcttccaattatgataattaatatcttcagtaaaaaataaatatatatatattaaataacaacaccaagtttaatgagaatttttatttttatatttttaaggtataagtttaaaagaaatatataatttttaaaaaatatatattttttcttcataaaataataattttttaaaaagaaatttatatatgagatggtttgaatatgtaataattgtgtgacgtgtacagtacacgtatgtacacgtcacagtgctagttgaattattatgatgttaaagtcttttaacttattttagtgatattttgttttggaaaattttatttgtactttgataaaatgatagtacacttattattaaaaaaataaatttaaataatattatttttttctcatattattttatatttattttgattttatttttataattttttactaaatcatgtatatatttagccaattttttaaaatttatcatatatataatgtatttgttattttttttttcatttttaaatgaaaaagccccaacgtttaaccataatagaaatttgataaaataattgattctttcatttctcttaaaaaaagtgtaatttacggcataaatatttaagtggcatgaccgtttatctctctattggcgtagcagccactactttggggtgacactcccgaactcattccgtaggaggtgatagttgccacctcaaggagtacctccgagaccccttccacttgatatttgacgttgtgtagtcttgacgatatgaagatgcattatataccaatcatgttttatgtggatagaatgtgttgcttggaccatgagaagtgtggggatttaagggtgtacacccctagactaatcccatcaccttttgagtgaattgttatatttgaggtagatgtagtagtatatagtatatactcttagactggtttgacttttttaagtgtgtgatgatcatttatctcacatgtgagggtgctatagtccaacttcccctgagaatagtcacctttacttaaattaggaggaaaggtaaccgttagacttctttttcaccggttatgactttacacatactttatcatttttgcctagtgtcatcatttttgccacattaccattgtcaaaatttaagtaaatacagtgtataaaaaaattagtcatgcgtgaaataaaatatttatactttatttttgtcatttacaaataatcatatataattataatgtatacgattataaaaaaaaaattaaattaaaacactcttaaatactaaaataaataaaagatgtatggaaacaacctataattatagagatcgatacgataattatatatttatatactataatattactaatagttattgaataaattaatgaattaatggtgcaattgatctctcgttaattttataattagtgtgttattattactttgctctcatggcattattatttgtcgggtgaattttatcaccccataatttttttgatgataaacaacattgtcaaaaatcatcattacataaattttgtcaaaaatggatcattatttacacaaaattctttgttaaaaatgaattggctggattgtgacgaaagccatttgcaatattatttagtagttttaaaaggaaaatttgataaaatatacttaaaaatttacactatttttttaatataccacctttaaataaatactctaaatattcttcaaacaccctaaaactccaaaattacccttacaatttcaaaaactctcttctcccactttctttttctaactttccccccctctctctctctctctgttattcccatccagccccaaacctttcaagcccttgttcacgagctccgaccgaccaagacgacccacgaccgagaagacccatgacgactcacgacgacccacgagaagcacccaagacagcccacgaccaccgcattttttttttctggtttctgacccatctagctcttgttttctgcaattttttctggtttttaactatgtcacgaaacatcgctagatgtcgcgaaaatcttgcaacatttctaaatgtctccaattcacaacaatgctt

SEQ ID NO: 239229 - DNA, 2866 bp, Cannabis indica
ttccgtgaaagtacatcacgggacaaaatcatatcgctataattttataatatactttatatgaaagagctgcttttgtttttgtatattttggtttatattagtattacaccttaattaacaattttaaagataataatacgccttaaccatgctaattagggttggaaattgggtgtgggtaataaatccaaccctattcctgttttctattattatctttgtttaattcctatttatactcctattctcgcccatgccctacttaatcctcgatgggctcgagagaagagaattctcgaactcattggatgccattaagattaaaataatataataataaaaaaacaatgtaatgtaattaaaaatgaaaataaaaaaacaagatattgacttcaaataaataaacattaatctacctattaaaaattacacagtaaattaaaaaaaatcgatagtcaactttgtaatataaccaataactttaatgtgtaataattagaaaactatatatctgtgttgaatatggggtgggtagtatcacccccgatcccaccccaaacctgcttcaagtatataaaattacacaccccactctcgccctattacccattaaggcgagtaattcgtgccccatttggagatcccctcgatcaggtcaaatttctatcactaatgctaactctatttttttttttaattatagtcaatgaccacttgatagcttttgattggtctatgtcattaaatttttattttttatttaaaaattatattatattcactaataaaaaaaaacacgtagttaatgacttcacacttaaggattaggtacctacggaagtttctgaaatatgatttaagtattattaccataaaaatttaaaattagatatttatctgcaagggagagttaaacttaagtatttatgccataaattactctataatatattaccaaaatactttttttataagttgttccgtgtatttttctataaagatttcttggtataccccctatttgtttaaatatttagggaaaaaaatagtccctattttttttttttcatgatcacacacgttgtagctatttaggatcacctgtaaattttttagaaaattctaaatagtttaccgtgccggatataaagttcaataggtatgtacttaccagttaccacgggtataaaaaaaaacagtgacgcttacaacacaatatttaaacaaaccctaaatcattcaaatttttttaaaaacttacatataattataaataactataacctagtatatcataaaaaaattaaacaaaaaaactcgactaaaaaatcttctaaatattcaaaatatctaccaaactcatatatatattttttttaatagaaattcatatgtattttttttttttttggaaatgaaattcatatgtatttgaaataatgatagaatacgtatacgatttaatttgcatgtatctttgactagaaagacttatagtaaattgatttttcttttttattactattattttattgtttgtatgtaagtcactgcaaaaggaacaattggaggctgacgacagccctcacttttccgacgtcatctctcatagtaactctttttttcttttttaccatctgccatacaaactttaccactcttaatttaagtgaaaaaaaaatatatgctcattgtttttattttcttttatcaaaacaaaataccctcatctccattttctattttattttttctctaaactttgacatgtaccaaatcctgcctcttgaacttttttagccgttaaaaattcccctcgaactattgagattgttaaattttaataccaaggtgtgttgttttgattattgatttgttgacatattcaagtgattagaattgcctttttatgttgagctttaatctgttgatgacgcctaacaaattctttcaatcttaagatctcttcagtaacatgatagtcttatttagcattgcattaagtggttacacggttaagagcgagtatcagaatgctatatggttactaggtagaggtcagttgcttcctctaagggactctctaactagtggaataatctctaacgccaaaggtaaaggtttttgtttagaaagcttgtttagagattcccgttaaaagaaatctggtaaaacatggtgttcctacttctgtggtttttgtctagtgtgtggtttagagacggagacctcatatcatgttgtatgggggtgttcaagccttctccaaattacaatagttgtgtcttttattgatatatcgtcttcagtgaagaaagtcggtgaacctagctggaaaaaattggcaactttcaataattataaatgtaagaacgaaaaacctatttattctttcaacttatatatatcataaaacaaaaattcatataattaaatttaaggacactaaaagcaatttgagaaaaaaatcatgcatataataaaatattttaggtataaatgcaactaaagagtactaattcttctggggtgactgactgtgacccaaatggtgaggaagtgaatgacaccgccggtaacggtgacggtgaaggtggtggtcaacatttgactctgttggcattgttagtggctcttataagaaaatctttgtttggttttaagtttggagataaaaaaggagagcagcaacaacagcaaatttgctcaatggaaattggtttgcctactaacgtgcgccatgttgcgcatgttacctttgataggtttaatggtttcttgggtttgcctgttgaatttcagcctttggttcctagtagagcccctagtgcaaggtacattatcatcatcatcatcaccatca

SEQ ID NO: 239230 - DNA, 3222 bp, Cannabis indica
atacccttacattttaaaaaaacttctttctcttactctcaagcattaaccccgacccagaacccttaccgtcttacacagatctagaaccctggtcacaaggcctcgccatcatcttctctcacgccctctctcattttttatatttctttcttttggtttaccatttgttttacgatattttacaatgtttatcgatatatttgtaatgatagaacaaatttgaggttagggatgaaatttatcgatgatttgtgatatttagcaatatttagcgatgatattaacgacgtattttgcaatgttgtgaattggagacatttagcgatgtttcatgatttcatgatggttcgcaacatttatcgatatttcgcgacatcatcaaaaaccaaaaaaaaaatgcagcaaagaagcgagttgagaactaatagattttggggcttagggtttcacaatttctctttgtagtttcgcgatatcctcctcagttttgtcctacgtttcatcttcggagtgggttttgccagaggtggtgcggtggtcgtgggttcggtctgggtctggttcggtctggttttgtgttcgtgggtatcagttgggtttggtgagagttagagagagagggagagaaggctaagagaaagagggaaggtatgaggagggtattttgcgatttaattaattttagagcattaaattcttatagattttaatgtggcatactaaaagaccatggacaatttttaagcatgaactttcaaatttcccaaagattaataatatatatgtataggacaattcttctataggggcttggaaaagaccccatgaataggagtgtgtcagacctaataggacattgacacgtcatttaatgaaattttgttttgcttgtgtgagatacattatgggaaaataaaaaaaaaactttaagaaacaaaggttggactagaaatatttttctagtcgaaaattgttggactaaaaatgtttgtttttctagtccaataatgtttgtctagagaaacaccccttttatgtcccaggctattatgtccaacacaaaagggactcgaaaaatttatctagtccaatattgatggacataaaaggaggtttttctagtagtctatgaaaaataataaaatcaaaaccactcaatatgtttaaaaataaaacaagatcgaaaattctcaatcatattctaatctataagaaaaatctccagcaactgagctttttataattttaacatcccaaattttaaaatcacacaaataataataattattataaaattagatgagataatataaatatttactcttcgagctataactacaataaaatctttcctaaaaataactaatctttctacaggaaaaaaagcaagtaatctttgaaaaatcgatagcataactaggattgatactttatcgccactgtcccaatttcagtcgtcatcgcccagattctctcacaacgttgttgcttcccagatttgttagcaagtcgtcgccatcaactcacccaaatctccccctcatctattgcgatgtcattgccatcaagccgataccaagatttccatatctagatgattcttgcatctcaaatctgacaaaaattagaagagagagtagagaaagaggcttgctattataaatttgcaataaaaagaaaaaataaataaaagaagaagattagagatataaacatgcccaacaacatttttagccaatgagaaagtcgaatcctattttcaaatcctatataataatatggacaccaatctaatattaaatcccatcaaaaataagtaaacaaacgtaatcatcatgtgtagcactaaagatccgtttggttggaggtaattaaaataatggaataggaataggaataagaataggaatggtaatggaatggaataagaatagtaataggattaggttgtttggttagagttatggaatcaataattgaatacatattcttatgtttggttgactatataatgcaatggaatggaataaattaattttaaacaaaaataccattatttttcaaaacatgattaagaaattagattaaatatattcaacttatatattgttaaaaaaaaaattgatacatatttaaaaaaaaattagatatgtattaaaaaaattaatatttatttaaaaaatttgatatatataaatttatttttattgaatttactataaaatattacttcttaaaaaaaaccaaaaaaaaattttttaaaaaaaacctatataatcacatgaaaattttaattccaaaaaaaactaatataatcataattttttaaaaaagtaaaacctagagatcaaacattaatccatacataaaataatcactacaaaaagtaataaggaattcatgtccaatacccatatacattacactagatccaaaagattactgaatgtcaaaggcaatatatattgtcctgcaaattattttagatcaaagtgaataaacatgatctttctaactctttcccgagctgtgtactaaagagagccatcaatcagaagtctcgcccattcatccttctcatcatctgggacactgaaaaagtaagaaaccagagcattatcttgcataatcatgcgagctaccttatgacgttgagttgtagtaagtgtagtggtcctttctaactctttcccgagctgcatatgcttttcattcaagtcttcaccaatagctttactcaaacgaattgaagctttttcaattacctctgcgagaatagaagctgattgtgtaagtgcatttgaaagttcttcatgatttgcagctttccttttcttctttgaagacccatctgattgagtgtgagattgagcacctcttgttgcatctgaaacagacatagattccacttcatccacattattagcattgctaaaatcatcttctccaagtgtagtgttttccttttcagcttcaagttcttcaacaacatctgttacagtctctgcatgttttccagttgcacgatctttgccaaaaactgcacacaagtcgtcataccaagggaatgacttgatcttgaatggggctgcttccttatgactctgcatgtatacaaaataaaaaccaataaatcacactgcataacctatcttttacttcacatatctctaaagtatacataccaaagtattctataagaagttccaaacattatgc

SEQ ID NO: 239231 - DNA, 5353 bp, Cannabis indica
tctctctctctctctcttagctactgcatcgtttacagtctctttccaaaaaagcctttcttatatgggtgcagagtgtggccatgcggcctgctggtgtgggttcaacttcttatcttgagctatgtatgcattcaccaagatttaactcgaccctttgttttcaaacgttcaacaaagtttaaagatgcttacacaactcaataattgtacttgacacttttttttttggttaaaaaaacaagaataatgtgaaatatctttcctgttcttttaggttgctctccccctattttggcctaatgattacgatcacacacttcaaagcttaccaacaggagcttggagcaagaatgagacattaagagctctggaaatgaaaagcacaagaattttaattaataaattcatgaacaatggcaccaggcgctgccaacttcttcgaaacagtaaaatttaatttgtcataacaaatagaagcaaaattctgtaacaaggcatcaacaccatgtataattttctgttattaataataataacaataataataaatcacatctcttaactattttgaaagccaatagatgataagaaaaagggtacaagccgcaattactgcagacagaataagagtgtctcttgatcgtcgtcttctgattgaacctacaaaagaaatgttaatgaactatttcagtaaaacataaatcattaatcatatcactcaatcgaaatggtggttttgaagttgttgcttcataataagtaccaagtacgccacggataacaggaaacttgtcactcagaagtttcactttcccttgaacatctccaaataaagccctttgagagcccaagactgcccttgttgtttgagcctgactaatcacatcatcaatctgcattgaagagagcccaaaagattaatatatctctgtacgaaccaaaatatagtacaaagtgcgtaccaagtaaaaattagcagataaaattgagaatgttagctaactgagtaggttaaacacttaattactaaccaaaataacgaatgattgcaatgataaagattttgaactactaaaagttgtaatgacgggtgtaaaatttaatatttctcttgaaaatatctcttatatgtttctgacaaagctgctagtgattttaaaatgtactcagcacttcaccaagccttatcttgctccataaccacttataactctcactacgcatgagattgctccatatcttgtcattttattctacagctcaagctttcataatcattcctcatgctctgttagcttttgtattccgcataattaattcgtcctgcagtatctgccatttctaaagttgaagcatccatgataactacgctcaaaataatattgaaactttactccaaggttgaaaaggttccctgagaacaactactagttccttccttttctttccaattgatcaactatctgaacttgttcctgatactccagcataaagccaagtgaaatttcttcctaaactttcttaagagttagttgaacttaaaatgactggcttctgattaatctatttggtagagagtcttggatcttaagtatgagatctaccaaataaattaatctttggattaatctatttggtagatctcatacttaagatccaagcctctctctgctaataaaggagagaacttgaaatcattaatcttcttatcctagtcgttacttcaccaagcatgtcttatcttgttccataaccatttatacttttcattatactcacactatcgtttcatatgtttccattcattctattgctaaacccacaattcctcctcaagctctccagcctgttatttatctctattccccagaatgtattcctgcttcagtatctgtaactcgaaccataatcaactaaaataaaatataaggttataaattcaaataatttaaggaaaattttaaggtttaatcccatctaaggcaaaggataacggccataggttcttcaggagaaaaaaattccttcagaggtcttccaaaatgttgctaagaattacttaaataagtatcctcggatcaatctattcagtcaatctgagacttataacttaagatccaagtgtctctggttatgaaggatgtatcttgaaatcaaacaatctgctaagagtttatagaatcttaagtacggcccatcaggtgaaagcggacaactctgtaaaagaatttggccaatcaggtgaaatccaggaagctcttttagtaagcgacacttctggtgaaaacagtaaacccttatttctggtaaaaacctaggatagtcgtcatgacacatgatatttggcccttcagatgaaaacttgaaaaactctttccattgttagttcttcaggtacacccttcagcctagacattacccaccacaccagcaaaaaaaaatacagaaagagttttgacttttacataagggtgttgggcatgctttaagaagattttcttttaacaaacataattcatgtttaagatgcatagcatatgggaaattgcaagcacagaacaatttattaaggcaacaatatagcattttagcttacatgagatatacttccatggatggcagatctctcccttaataactgcatccttggtgacatactcccagatgcctgtgtgaaggcacatcaaaagagtttgaattagtgaatgacaaaaagacgcgaatgacaactagaatctatgtaactatagagtattcagagatctcccaccttaaactcactgatgtcctccctgactgaggtcagaagctctgcatgttccctcaatgagtttatgttccccttgattcgtctaaattcctaaagaaacatgcatgtaaatgagcatattccacaggtcatatatcttagaagtaaaattgtggcttattatagcaacaatcagataaagatccattgggcaaaaattggaatgtgtccatctcgggcatttcttgttcatttactaataaaaatttcagggaaaacagaaaaatagaaaatggtaactgagaaaatttgagagcatagtccctggaagtacaacaatagcaccaaagtgattactataggaaatcaaataaccaccgtgctggctctcttatttcaatagttatcctattttaaataaaaagtggtttccatttatcaaaagtattactagcaaactcgaagtagtaactcaagcatcaacacctcgttattttataatgaaaggattgagttaaaagacatagggagagtctactgttttagtaagtaaaactaataacaattgtaacttgtccgaaaagtacagttggactagtagattattttgatcagaacaataaattgagaaatcaatatataccattaggaatttccaaaagtgcaccagtggaaataaactgtgaattataaattctctactttacgtgagatttcacttagacatttttttcagcagaatacagtcgtcaaatgtgtaaatcaaaagaagaattgaaaatcatatctaaacagagaaaaaagaacctgggtaaactcatgaagtatgtctctgtgccttgctagtttttgagttacagaagtagctggtgcagcagaaacagcacatcgactcattgaatcatttatatccaacagcttctcaagaagagattgaatctccatttccatagacttccatgacctgctagacccaacagttggtgatccagtatccacataacctgattccaaaacgcctcttataagatcatctatgattcatttgttcccaacagacacagcataattctaaataaacccataaaaagctacgccaataatggaaatagtcatacactgcgttataactatgaaacatacccactcctcgttttaacaattaaaacagaagaaatatctctctactactggagggctggttttcatcattttcaagatatcatttaaacctctctcacacacaaaatgcaaagcagatcactacaattatgtcgttctctgtggaaaactcactactatgacagtatgccaattcaattaagtgtttgtatcttatttatttttttcttcacaatttcgcagctacgtcatttcaattttccaaatccaggaaacataaacaacgaaacaaagccacactggagcattttcgcaatggaaactataaccaatcaattctatccccattgctaacaatttatagattttacagagaaatgcaagtcagggaaacgaaataaataaaaacagagaatgaaaaatgggaacctccttggttgaacctagcaccgagttttccgtacgaagataacttgacgtcgagatccccttcgatcttccgggcctcctttctcagctcctcccagccagattcctgcaactccagaatctgatccgtcatctggacctccgagaattcgactccggatccaatctgtgctccctttatattgtgatccaacggttcttgtttgttcagttatttacagttgacgcttgattcaaactgtgttcattcactggtttgggtcttcttcttcttcttcactctgctttcacttatggtggagttgcttgataccagtggttcaatctggtccgatcatcagccaagactggatttgatcgatggttttgattttgatgatggtgttttcatctatacgacatgtcgtgtgctcgataaaattgtcgtgtcgtttaccgttgttcagaacatatttgcagtagggtccctcctttaaagatttttccatttaagtcctatttcctattttaaatttctagttaagaagggaagaaaaaggaaaagaaaaaagataattttttaatttttttgttttgattttaatttttttaaatattttttaattattaatataaagtttgtgtatacaatggcactccactttgacacttaagagactaaagtgtactaaaacaatagaaaaaaaaacaattttgtagattggagagttcagcccctaaaattacagtctaaggactaattgtgccaagctttaaaatttaagaagtttgaccgtaaattactctcaatttaactatgaatttaaaataaggtttttctaaatttttttaaacaaataaaagtacagtgtgtttttgatttatttatttattttttgaataaatcatgtaattttattaatagcaataggttaaaataatagcttgcaattcaatcaggacattttttctgttggagacataatcagtaccaaaattagaaaaacaagctaaataatcagtcacataattctaagatcgtttgcaaaaaaaaaaaaaaaaaaaaaaaac

SEQ ID NO: 239232 - DNA, 2130 bp, Cannabis indica
tagtttaagtaggattataatcctactctaatacccacttaatcacatatttaataaaatatgtccaattaaaatatcaatatatttttcgggatattacaaaaagtgtcatagcaaagtcgatatataaattgcttaactttggagggaatgttctgcatgcagagcgacttccaccaagtattgaggagatcagagtttgaggcagaaggcttgaaaatattagccatggatttggctagatggtaccctgttttgacagtgtagtggctagagttggtgtgctgccagaaaagagtatcagggtgattagtgtcaggagggggaagagataggatatcatgaacaatatcattaggaaagtggttgtttaaaagggtaatgttacagtcaccatcagagagaagcaagtcaaagacgtggataaggtggttaggtagggatatagggaaaaagtggcaattcgggatccatttttcatttaggattcaggtggtggcaccattccgtattttccaatgtagtcctactttaaggagagattttccccaatgtagacttttccagacatacgagagagagtgtctaaggggagcatctagaaaggatgacctggggaagtatttagatttaaaaagtgtggctagaagagaggtttggttttttggattctccaagcctatttggcaagcatggcctgattgtaaagggcccgccatttcttccagtggattttcagttcaccattattcgatcccaccagaatttggccatttttctttcaacaaaattacaaaagaagttggaagtttgaagacagacatgacataggtaggaatagtctggatgaatactttaagcataatctctttgcctcctttggaaagaaattttccttgccatttagaaagataagaccgaattctatccttgatgtgattgaaagagtgtttttttgattggccaaagcattagggcaatctatggtacttgtcaaggtgattagtggagggaatttgcctgcaatcctggatgagattttggtaggtaaggccggtattgggggagaataggatggaagatttattgaagttcaccaactgacccgagatactctcatacttgacaagagcctctttgatagcattacaagcctggatgttagaccaacaaaatagtatgctatcattagcaaaaagaagatgtgagatttttggagcagtacatgcaatatccaaaatttgttttagtgttttcaaattgcttaagaatagtagagagaccttttgaacaaaggagaaagaggtatggtgagagaggatccccttggcaaagtcctctagagggaatgacattcccaaggtcatggccgttgatgttgaatttaaaggaagcagttgacaggaaagtcatgattaaagagacaaacttagatgggaaaccgaatttcagcatgatcttattaaggaaactccattcaactctgtcaaaagccttggccatgtccaacttgactgccatccagccaatcttgcctttttttcctacatttgatcgaatggagtatttcttgggccatgagaatattatcagaaatgagtcagcccttaagaaaggtactttggttgggagaaataagagggtttaagactaacttgatcctattagccaggacttttgaaataattttataaacagtagtgcgcaggctaatagggcgatagtctttaagggtagagggatccttgattttggggatgagggtaataagagtggtattgaagtgtgttatatcagattggttatttagaaaattgagacttagaaaaaatttctcccgaagacccacgctttttcaaagcttctcttcaacctattctatgaatagtatgagatcataataagaaaactaaaacctagttgaataccctaggtttcttacaatggaaacactcttctcataaagaaagatatgaaagtatgagaatagaagagataaaatcgtttgactgctctttaggtcctatttatagaacataacaaccctagagacaaccacaaaaacatttttccagctgtacaaagctttcttaaaaaaattcttgatttgtagcatcagaatcgggctct

SEQ ID NO: 239233 - DNA, 3141 bp, Cannabis indica
aaatttatcattattttttttggtagcgtgaagtgtaatccttggggaactcactaatacctggatgtgtgtttcgtgtggtatacttctctgagaatatcttcactcagttattcattttctgaggtgatatggagaggagcagcaagcttaaattaagcatctcaacattaacaagagaatgctcctgaatgccttaacaagcttaacaccttcagttgggtatttagttcccaaggtgtctaccctcaatgcattttaattatcttaaacccaatcatgcctatgacagtttaccctgataagatatatactgagtggccttcatattttgaggaggttatgatgtcttcatcttcttgctgaacgaatattattattaattaattaactagacgttcttattcattgctcaaaaaataagtataacaataatatttactacttttttcttttatagatatagaaatttagtttttgaataatgttttaagttaaaagtaaaaatggctgccaaaaaaggcaaaaatatttcaaaatttagaacactagttactaatttctaatccagctacaattaagaaaagtttagatccacaatattcttttttgtttttccatagcaaaattttcagttattgttcagtgcatacatttattctctacacaaagatcatattattcaattgtgtgaagtaacaagctagcccatttcctgatatacaaactagcaaccaataacaaaagctttcaagaaataacattagttgaattgtagactaaattggtcattcacattatctaaaacctggcctagcttctcttgattttaggcttcttcacagtcataacggaacatttagcatgctgagcacaatagtcactgaccccacgccaaaacaacctgtatagcagtaatcaaaatctcatgttcaataagataaaactatatcaatttttaactattaggcaccagtgtagtatctaacatcatttagagctgacactttatatttctggtcttataaggtatattataaggcatattattggtttctgtgtaatttaaactaaatcagtataactataatatatgagaataatattcatttacacaacaccgttagcatttttaatgtcctattattagcaaaacgttattcacaattgaaaaagaaaacaaattcttgttgttaaatatgtggtttgtcataagtacaagtcaacatgacaagactgagtattggtaattaccgctttattgctccatagccatagccattattgcccacaaccaacatagatgcatgatgcttctctacagtttgacagagaacattatgggcttctccttcaataacctccaccacaacatctttcacctataacacacaacccagaataagatgcaaaataatacaatccaatcaagtacaaatttcataatgtgaatcgttaaatatgtcaatctatgatataacattcaacaattaatcaaggcaagcatcttaattaacagtccgtactataaatactattaatcttcagcttttaatgaggacaaaattgataaatatataccgatttagtgacgaaaatttgttgagtcttgtcaagaactcgctctgcgctcatctcaaatgccctttcctttgccacggctaatgtttggccaatcaatacatcgatatcaaaatcaggcaaaacaaaacatatatagaaatttcagaaaagaggaaattattaagcgatgctactaccagggcctaattgcttgataaatgggtgggaaatatgaatggcatggacgatgacgagttgaaagggaaaatctgggagcaaaaggaacgaagaagtggtcgagagtccactccagagcgtaatcgctctgttctccatggtcgaaaccaagaaccatgactggtttctcagcggtagccattgttggattggaccttcttcttcttaattactgttccttagtactgttcttgtattgtatgagtgattttcttcacatcaagaaacaggctcatctatatgtatatatatacagtgggagtgctgatgtaattaccagttaaaaaacacagttttatgtaagagatgtaagtagttacgattctgttaaagattctcaacattttgagggttggatctttttgatatttaatttagtctcttcttcttcttggatgtgtcattttgtcatgtcaccaacaacaaacgactcatatatatagtttggtttttttttctctttctcttgttttgaggatcaatatttcattcatgtataatattatatataaattatgaataaactacttcttttattatcatttagttataagatagtactctccatgtacgttaatcacaccttactaaattctaacatggtattaaagttatacgattcacatctaataattagtccaaaaagacgagccaaaaaaaaacaatcttgtgacttactatgaaatcaaattatcacccatctaaaaagatgaaccataagatccgttgtcaaccaatattattacttgtgatcgagctgtcaaaaattagtaagcaaaaactatctaccatctattgtcaattaattttgaaatagacacctacaccttatcaaattctaactagataaattggaacaagagttaccttatttgtattataaaaatattatattcctattattaattaattttaattttgttcactttaattaattttgaatcttttctttacctttattttaattttaatgatttcataaagaaaatattgtatattttatatttttcaaatattcatatatatattaaatttttttaccaaatatctacaacatatcttatttatatatttttttaatgtgcaaaaagaaaatgcgagcacaattgcacaaacattggcagactggacactttccctccattttttttaaataaaatattatgtaatcttttattttagtccatatagtattcctattgttattctcccattaattttattcatttgttatttatttttattttataactttatgtaataattatgtacaatttaagttaagtatgtatccaacattactcataaataaaatgtattttaaaatctgacaacatatat

SEQ ID NO: 239234 - DNA, 1248 bp, Cannabis indica
aagacgacgaccttcagcctataaatacaaatttgaagaagacagttaaatttagacaaaactatcaatataaagaggaaaattgcagtaaactgctcaaaggacatttcgagtaccaaatcaacaaaacatgcaattcgttgaggtgagaaagaattgcttgtatctatgtatataacacgatgtcccatctgcttttttgctacatttgaggcagcttgtagacaaacctgagagttggtaagaattgggtacacacattttcatatgccataaaaattacttgtgttgtggataagtagtttaaaacatatcaacagaacatatagaacattttatatacttaggtactcaaattcaactataaaactttaggaggcaagaaaaatctaaaatatttctaggctcaccactcccatgcgaaatcaaattcatccttgaaagagcaaagaccgcactcccttatggacaaacactggccatacattttgctaaaataagacataaggagaacttgaaatccaaatcacacttcaataagacactaggtattctatctcacaatgacacggaatttcattgaatttcctctgtattcactagtattaggcctagtattacaccaaaactcaaaacagtaaaacagtacatgaagttgagttaatttgaaactctcccctctccaaaacaaattttctctgtcatactttctacaagctatatcatcctatctaatttcatcaaggcttttatgaaaaagaaagggaagagaaaaagttatacttgggttttgccagaacacgatggaccaacaagttcagttaattgtccttcgcgtaatccaccttcaagcaataagtcaatcctaaacaaaacacatccagaaaggcattgaatcaagaattttcagtgaaagccccaaaagtagagaagaacaaactgatcatttaggcaagaaatttaatacccatcacacccagttgataatacaagtttattacgaagagcatcatccaaaacctccataccattcaacaatggctgacgttggccatcaataatagaaaaaaatctctctaatgccctacattcccataatattacacattactatatgctataagcagagttgtgaattaagtagataattgataatggagaaacctgctttattctctcagaattgggttgtcgttcggctattgctgcgaattcatagtgatcgttgagtagaaaatcttcaactgc

SEQ ID NO: 239235 - DNA, 1546 bp, Cannabis indica
tctctttgagacatttttttaaaaatatatatttgtaatgggtacttgatgggaatcatcccctgtcgggtaattcccgcctcgttcccgctttaatttgaatgggtattggagcaggtatggagtgaatttaggaagtgggtatggaggtagggaagtaatccccgtacccgtcccgccccgtttacattcctaattcgatcccataaatccccacctcccttccccatacgcactttcaatatcttttatgaccacttgagctagtataaatattaactaaattaggtcggttattttaattcagttattttttaatattaaattatctagtaatttaataaaatatatttttctacacatttcctaaatattggttaagggtagtttaccttggagttgggaggagagggaaataagggccttgtcttactcttattggagattgagtgtgtgtaggatttcattcaaatatgttggcctgcctttttcaatgtttctataagttatgatgttgaactttgaactctctctctccctctctccctctaaaaatgaatgttacacacaacaatctaccttttcttactcaaattgtttggtccatttcttttctttatcggcacaaataattaaaatataaatataaataaccaatttaatcctcacacctgtaactttataaatgtagctatatcatgatatatgtttagttatttgttttctttctatttatttatataattatgacgtacggcactccttttttcattcttcttgttcattatttagtatgttgattattatatgcacattgtttgagccaaaataaataatggaatgaacattacattagtgtgtgtttaagaagatttgcatcttatgattggacttgattttataattgtgatttatttagagaaatttgataatttgcttaaaaattgtgcataatcttttagtatgccacattaaaatacataaaaatttaatactttaaaattaattaaatctcaaaatactctcctcattccttttctctttctttcagccctctctccctttctctctaactctcaccaaacccaacagatacccacgaccacgtaaccagaccgaactagacccagaccaaacccacgaccaccgcaccacctccgacaaaacccactctaaaaacaaaacgtaggacaaaatcgaggaggatatcgcaaaaccacagagaaatcgtgaaacccaaacctttaaatctatgagctcaaccaccccgaaacccccaaaactcctgaaaccctacccatcgttagagttctcgattcacttgttttctatattttttttctagtttttaacaatgtcgcaaaacatcgcttaatgtcgatatatcgcaaaacatcactgaatgtctctaattcacaacattgcgaaacacatcgctaaatgtcgcgaaatcttactcaagttttcacgatgattagcgatgtgttgtgcattttttagtctcatatcataaatatatcactaatatcatcgctaaacattgcta

SEQ ID NO: 239236 - DNA, 3215 bp, Cannabis indica
cgagcatagaaagctgatttgtttggagaatgtgtttctagtttttccaataaccaactcatatggcccttgaacagtaatgtatgttttactcataatttaataatgcctgctaccctattttgcaaaacaatttactacatagacaaattataatgacaacacttttcagaaaatattattgtacagtaaactgattacatacattacatctctcgttctctcctctactcgctatagtttctaataggggagaaacaagagctctacaatctaaactaagtatgcattgatctgaaaccttctgtaagaggaaccacttttgctgaaactttcgactgcaactttgatacagcctgtcgaatgtcctgcaattgaaaggaagaaccaatctacaaattaacacggtaaatagaaaatgaagaaaaagaaaacaaaatgagaaaagggtcttaaaagtttagcttcattgaatggcttacttcaccttttctggtaaagttgaagctgaaaacaattgtcaaccagtgtaaaattaaagatgagaggtgaacttgttcatagaagagataaattacctctaaatggtaacgtgaagagaaatgtgtcagcagaattgacttattccgaatccactcagcatttctcataatctatctcattttgaaggaggttacaaaataaaacaaataagtatgagaagagacagcgtagttacaagttaaaaaatttggttacaaaagcccaatgttaattaaaatgaccctatatatcatgataaattgtatctattacaaccaccccaacagaaatcctggaaagattcatgcccatgaacgatcacaggagtaacaattaccatttctcacatcatctatgctggtaagcttttaaatgttttgttccctctcatcttatcatgtccccacccccttaatcttataaaaaaaaattcaaaaaattaaaaattaaaagcaatgttgacagtaaatgagcctaacctatagcctaagtgtcaacatacctcaaatatatgagtgtgtccatgttggcgtgcatgatcaatgctgtagttttcatccaggaaagttgcctgtgagcaattttcacactttcagaatgaattttcaccaaacaggttgatataatacatacaaaaaaacatgtaaaagacttgtttgagtgttgtgcggtgaaagtatgcatacccagtaactatttatatatgtatatatataaatatataattagataaataactctttatttagatagtgtagccatctggcccatctccctttgttacttgtgtcaggtaattctcccaattaaagtcagaaaactttcctttgcaaggactcaaggaataaactcttttttcttcatataaatatcagataatgaccaataaatccaacacaaagccttttcaagaacactaaattatattacctcagttataagtatctttgccctcaaagcatcagcattgagtggatcacgcatatattctgatgttgtatctcctgtaaatgccacctcaggagacagtatagtatcggtaatctgaaacagaagctagaatgtgaaaaagatatcacttggcattggcaaaggaagtaaggaaaatcatctgaaagatattacaaacctcaacaccagacttctttattttctcaatttgtttgcctttaagatgaatgtactgctttttcaacttttttctaactgaatagattacataaccctgcacattacagattaacttacatatgaatggcctacatacacagctaagttgcaagacaatgcacttaagtatacaacattcatttacaatcaagtcccaaagttcacaggtttcataagtaaccattgtcctaacttatgcatttttcagaccatttttcagctgcctaaaactttaagccttcagatacatatttccatctccccaagatgaaacttgtatgcagaaaagtgattcatagcattataatctctttctaatgcccgaaaccagtaactaccaccgaagtaggaaatcttttaagtggaagctaagtttactacttatagcagtctgatagccaatcctttatttaatttcataaatgctcgaacaaaataattcaatgaagccaacctggctaggtatcacgtgttgagttttgaaaggccggacaacaaggttgctccgcatttcaaatgtttcacctaaatgcaaacacgttaattccagaccaaagatttgcaacacaacaagctaactaaagctgcataccaatatccagtggaaccaaatcaaagttcagctccacttggcccatggacctgtggatgtcaaataatttctccacgtcctctttgatacaaggaggcacaactattgtcggaggtttcaagctgtacaaaccacggcttgcaacatacatgggtagcccaccctgaaagaataaacatgcaataaccatataagcttacacttccagattacaattacattgcaaactgaagaaaatggctgcataacaagaaaatctcaaattacacatgcaaggtcaagatcataaatttggtcctacagctaggaactttgattatactttgaactcgatgctctactatattatttaattctcaacaatgtggttcactagagttctttcaactgtttaactcaaaccaatttttgcaaggtacattaaaaaatcccagtgggtatcatcatagtttgttagagagtctcatattggtgagttaaaaaacgagcaaagagtcgcttgtgattcggtgatagtgagccaaaagtgctgattgtgatcgaccgtccaaaattggtgaacaaaagatagctatcggggacgttagagagtcccatattggtaatgtgtaaaaaaaactaatactatatataagatgcatgggcgaaaattatgtgcaaaaaatagtcaccgtcttaccatacacaccagaaaaaatgcacttttaaatgagtcaaacatgtcaaatcgaacgaattggcaagaaccacaagacaacttacacaaactgacaatagtaacatttttttttctattcataaattagaaattgaaagttgggtagtccatataagaaaataataaggagctcacaatatgatcgagatgagcatgagtgatgaaaacaaaaattctggtgaatagccctggtgggacgacgccccaatatcg

SEQ ID NO: 239237 - DNA, 3462 bp, Cannabis indica
aaagattatctcccagatctattcataactgaaaggatctacagataatgttcgaaaaaaaattatagcagcaaaggatttcaacttggaggttagttttttaacaaacattaagcaacagccaggagaaagccttaagaagtatatttagcatatgatggatgttgctataaagacaaaggttactgatgatatgaagatggtggctctaacatcaggaataaccactagatatttactacagggataacttcaacggaaaagagtagattctttatctaactttttatacagagcccagggattcatcaatttagaagacacttatgcttaagcttatggtttacttccatcaccagccaccaacattacaacaactcaaaatctgtagttttttgcacccattattcatcctttgaatagtatgttcacaactccagtagtatacgaatcaggtgcttctggaaaactagctacacaaactagttttttcaactttggagtggcacaaactgaaaacagtgttgctgtcagacaaataaactaaaagtggaagttctaaaatcgaacgtgaggcattcctggaggaagagagtgtccaaagctctaagtcaaaataaatcttcaaagaaagggaaaactcaagaatccagatactctgagtatactagcttggtcgatactcgggagaatgtgtacaaagctatttgtaatatggtccactacagaaagcctctgccaatgtacaagggtggaagacacaaaagggacctgaataaaagatgtgtataccatgatgatattagacatacaacaaattagtgtgattacttgaaagatgaaatcaaaagattagtctggaatgacaatctatctaattgggtaaggagaccaattatctaccccaaacaaggagtagcacatggaccggtttttattcctagacaacgcgaagccataaatcctcctcagggagtaggttatctgcaagctcctataatataagatccatctatacaagtccctcagagggtacaaaataccccaacgacaagacctgtttttgctcccaaacctagaaacccatatacacctagaatttctccaccaccactagatgaccacatggcaatagtacttggaggcccacatattgctggaagcaccgaaaacacacaaaaatgatacctaaatgaaatggaataagatgaaacatgtaatcttgtacaaacatctactcaacatcctctgatgttaaatcttccaataactttcacagaggatgattctaagcatgtgtatttttcacataatgacccattggtgataaaagctcaaattgcaaataagagagtgtccagaattctcgtagataataggagtactgtcaacattctcttcaaagcttcttttgaagccataggtctggtggaaacaaaattaacatcatgtccagttcaacttcaaggcttcaacggagatacattgattctaataggaaaaatacaacttccaattacactaaatggagacatttttggaagtaacatagtatcaaccttcaaatactatacatttgtggtagtggaatgtcccactgcctacaatgttatcctaggactgtcctagtagactttggaagtgtaacttttattcgccatttgtgtatgaagttcccaagtgatactggaagcattacaacaatcaagggtaattagaaaagtgtgagaaactgctataatgtcttaaccaaaactgttctcgtagtccaagaagagaatccagttgaacccaaagcacccgcttagctagcactaggggtagtttgggaagaagatgtactagatcaacacatgggggtggagagaatcattgaactaatggaagaggtagaagaagtgtgcaacaaatcatatcaaccatgaagaagaacagtggtatgttggcatggagccattttgatatgactagaatcagtcctcatgtaatctgccatgctttcaacgtaaacccaaaggcagatccaattcatcaaaagagaaggttgtttgatccagtttgagtggaagtagtaaaagcagaagtagacaagctaaccaatatagattttctctgggaagccttacccagtctggctagacaatctagtactggtcccaaagactaatggaacctgaagaatgtgcaatgatttcacatattcaaacaaagcttgtccaaaagattgttttccactttcccgaatagattagatgattgacgccacatctggatatgagcttctcagttttatggatgcatactctatttacaaccaaattaagatgcgcgtggtagatcaagaccatactagcttccaggtagataagggcatttattgttatacagtcatgcctttgggattgaaaaatgccagagccatgtatcaacatttggtcgataaaatgttcacggatgttttgggaaagaacatgaaaggttatgttgattactgctgataaagtaaaaaacctccatggagcatagcgaagatctagaataagctttttccatcacccaaagtatggaatgaaattgaattctaagaaatgcactgtgacaaccagtagtcccgtgatctgtaaaggaaaataccgggtaagctgtgcaatcctacaccacttggggaaggttaaatgggatgattctaagattgtataggtatgggactacactgttggataggacttaaatgaattgatggtactacctatatcaacaaggtgcatcttattttttgatagcccatcacaaaagaactccccagttaatcgtgcttgacctggggtaatttcaagatgggtgacctcctgtgaagttttctcaggaagcgtgcgagtgaggacaaagcatgctggaaatactcgtgttggtttgtagggtcagtcgtcattccaggaagcagctagagtgacgtactcgtgtataacagccatcattccgtgggtgtaaggacccaatggaggcttgaagcaggggcgttacaaatggtatcaaagccttgacccagccgaaattgtggttgacgaggacgtcagaccccataagagggggtgattgtgacagtcagtagtcctgtaattcgtaaagggaaataccaggtaagctgtgcaatctcacactacctgaggaaggtcaagtgtgattatttccatcatgcccttgtgtcacctcatcacttgaatcaatttcttttacactccctatcaaactcgtctttacccatcgtcgctagagatggtgatggggagatcaagagtttggcctagcttggttgatcaacttactagaaagggaatggtgaggaagatgagacgaaatgcgttatggcttttttttcacatttttatttttgttttttatttaattaaataattttttttgttaattaatattgtcttattattttaaatatttatttag

SEQ ID NO: 239238 - DNA, 1785 bp, Cannabis indica
ctctctctctctctctctctctctctctctctctctctctctctctctctcctgatcctttacccccctctgttcttgctgtgcgacactggagttagattaggagcaccgagctcctgtcacctatcttagttagagctaatgtacccaaccccagaaccgtgagacccccatctccgacccttctcgcctatctctctcgctcttcctctctcaattcacgttgaagccatgatagggcctcaactgccactcaattaacgttgattttttatttgagaaagatagatatagtgagacaataaaaaaaaaagaagagaatgaaatgaaagatagttttgggggaaaaattccaccatttaaaaaaaattattactgacgactttcgtcattgatatttttatcaatgacgataatgtcgtcagtaatagataatgttgttattaatatgtaattttcaaaaaaaaaagttttttatcaccaaaaacaccaatgacacttaaatgttgttggtgatactctcactttcaatgaagactttttgccgtcaatgatagtgacaatggttatagttataattcttgtagtgatagactaaataataaatcttatgtgttctatataacatcactcattatatatctttagtttgatgatttcatttttcgttaatagatctacgaagattgtagaaaaaagaatgaacgaggacttaagattatttaatcaaccttgttaaaagtaattaacagaaaataaaaacactcgagattttatagtgattcacctttcctttcgacattaataagatagtctagtacttatgctttattaattctcatgttcaagctttgttcttaagtgaatacaattcccttcttagggtttgaaagagcgaaagtcaaaagtccttttatttgtatggtatgatcataagttttttgtactcatacaagatcatatatactcttatatgaattgattttttgatatttattaattatttaaacaataatttatatattcatttataatatatgtgtatttcatacattcaataatatattatctattaataatttgattttagggcataaaccctaacaatctcttacttgcacttaaagcaagtgcaacatattctataactcttataaatgcttgtcttatgaacatattaaactgtttgttctgttattttgttagttatttcggttaggtcggttagttagttgagatcttgtttagttcattttgttgtctatataaaacagcagcttctctcttgtattcattcaacacaattcaataaagaaatactttcaatttctctgtttctttattctaatatagtatcagaaaaaactaattccccaagctttctccaagctttccaactctcacaatggcgaggatgagagccactttctcttctacacccactgatcgcgtggatgatgctcctgctcaaatcgatccttccccatctcatacttccgctgaaatcaacaacaatccagctcctccacctcaacagcaacctcaaatcgatcgacctgcatatgaggatattcgcagcccatattacctgagtaatgctgatcatccaggcatggttcttgccactccaatcctcaccgattgaaactttcaaccttggtgccgtgacttcatgatttcaattggagcccgtaacaagacaccatttcttaaaggtacaattcctaaaccttcttctaatgatcctctttatggttcttggattaaatgtaaccaaatggttat

SEQ ID NO: 239239 - DNA, 1487 bp, Cannabis indica
atttttttttattagaaaattaatatagtaataaaaaatatattttttagtgttgtgattagagtgaaaatatttttttaacaccaaatttaatgtgtatttagagacgctctaagattactaacccacttaagcccatagtcgcgggacccacaagtcccattacatatgtacatatataatatttaattgaaagaaaaaactcagatgtataaaggtagatcaacatcacgtgtacaactagagtggtttattcttattggtccaataaccttcccgatactataagaaagaattaaaaagtcctacattagattttccctataaatataaatatttttttttaaaaaaaacaaacgttatattaaacgaacgaactagttagaccgtaaagtcattacaaattaggttcaaaggaatgtcattagcattcagataatcataacgattttgtgtaaaagcacacttcgctacattatgggcacaaacattacaagaacgagctacattagagaaattacaacccacaaataacgaagaaatacttaaatattgccgactgtaattcgcgatatcccaccaagactccactcccaaaagagagttaatcaccacccgagagtcactctcaacaataacaaaattacatctcttctccgtcgccatcaataaagccaagcaacaggcagcagcctcaccacaaagagggtctgaaaaatcaagtctggcagtggcggcctgttagtgttggaagctttgctcaccattgctgcagtgtaagaaggaacaaagaaacagagagaaatagaaggaagagaagaagacagaaagaaacagagaaagagaatgaaaggaaagaatgattctcattacaatattgagctgaacagcactatatatacaaggctcaaagagccaaagatgaaccaacagaccaaatagaaaagtaacagaattggacaacagccactaacaactaactaactctctaactgtctttacactcccctcaaacttggaattggtgcagggaccaatgccaagtttggttctgaaaaaatcaaatcgaggtgttgaagtggcttcagtgaaaccgtctgtaatttggtctgctgcaggaacatgctggattcgcaccagtttctgagaaagcttttcacgaacaaagtacaaattcagctcaatatgcttagtcctagaatgtagaacagggtttgcagtaaggagaattgtgctcaaattgtcacaccaaataacaggagatctagggagctgaacatgaatctctgtaaacaatgagtgcatccaagtgatctcagaaacaacttgagctaaactcctatactcaacttttgtgcttgatctagagacagtgtgttgcttcttgcattgccaagcaacaagattagaaccaaagaaaatagaaaagccagatgttgaccttctatcatcagggtcagtggcccaatctgttggaaattatttta

SEQ ID NO: 239240 - DNA, 1449 bp, Cannabis indica
tattttttcttttttggttccgattccaatttcggctggctgacacgtggagacttttcattggtttagtttcaggagattccaacataggacttgtttttcaggttgagaagatacagcttaatttggcgctaaactcaactcttcccggtaattatcgaccggtcttgaattattctattattttatttatgggatatttttattgatgaaaaaaatgcttatattactcatttttagttaaatcaaattcaatttgtacttgaaaataaaaaatccaacaaaatacatggatgaattcttcaaagtttgcagtgaaagccaaatatttgcattttgtgattcattggtgtttggcaattagattgcttgtaattgataggtttggatctgcttcttttgatttctcatgtgtgatgtcacacttttaactcattatgttctctttctatgtttagtaaaaaaaatgtaaggcatgtacattttaagtgtatctctagcattataatcattataatagtatataattaatcctaaaccataaagtaaaagtgatgcagtgacaaaaaaaaggtgatgtaattccttgaaattgagtgcaatttaatgttgatctagcattattttattgtcatttattccaataggaagtaatgatttggctcatttgatagccgaagaaaaggtgtcaagattaggcggtgagtttgtttttttgatggaacaagtagtgactttgtttaaattggtactttactattttgtcttgtaaagtgacttttgtacaaacttgcttaaacatgtgaagtctctaaaaataaaaattaactacaaatgaatgtaaaaatgataatgataaataatgagtacaacaataaatatggtgaataggtaaataacacactaattccgcctgaagattaggaataatttacatctacattgacaccattattgaatgataacttatacccaaatcaagaaggattaaatctaagcacgagttcatcttgcaccgctgaagggggccttctccttctaatttttcgtcctcgtggtcaaactctactggcccactatctaggtttggttggggttcgatcgagagggtttgctgttgttcgagtgagaagattgattagtgatgtttggctggtctggtcgtggttcctctttatcttcaatgggtggtttgtgtaatctgttttggtagcttcttcctcgctttcaacgagattcaatctgtgtcatttagtggttcggtggtcgctagtctctcccactcaattcagtggtccctttggatctccaaatcccatttatcgaatctggtggaatggtttggggtcgttttgcgcaactaagatatcaagatcacttttggctttggatgcacatgtggattcgaggttggtctcgtgcccttttgacacgatattttctaactca

SEQ ID NO: 239241 - DNA, 2300 bp, Cannabis indica
ttattatttattctgtactagagcatttatatattctcattttaatgtaaagcacatataaataacttagtatattatatactatatctatctatgtcaactgaaaatgagatgtatatttattgtgaatcactcacttgaaaatgaggtcagttatatttgagttgttaccaaatactaactggtctgtttgtggttttttgtggatggaccagttttgaagtttgcaacacatgttatctctcctaactaagtctcattattgtttgttcttttgttagtactttgaccccacaccttcattcatttcacatttccatttttggatgagaatatcaattataataaatatatcactacacatatactaagagccaataagtctttttaaggaaattgtatcatcttctcatgaaattcttaatgaatcctttttgtttaataatattaagactatctaaaattaatattatattattatttttgagttattagcttgttcaccaaagtttttacaaaaaaatatcttgtttaattattgtgcattatttttttttttctttagccatctttatatagtgaaatttcaaaacaaaacaaattttatgtacttattatcttcattaattacaataattaaataatattttttttacttttgtttttgaatgaatatttttaaattcctaatgaatcctttttttttaataatattaagactatctaaaattagttttatataattatttttgggttattgactagttgacaaaagtttttacaaaagatatcttgtctaattactgtgcattatttttttttgccatccttgcatagtgaaatttcgaaacaaaacaaattttatatacttattatcctcattaattacaatattaaataatatatatatttttttacttttatttttgaatgaacattttttcttacttctaattctttctcatcaattgttacatttaaagtttagttatctataatatttaagtgaattacttcatatattattttttaatattttttttaaatttacagtttgagttgtttcggtagtttctccgataatttctatgtgagttgctatatagattttggttgcgatttaggttgctccgttatttactataggagtttttgtgtagaattccgtaaaaataccaaaaaaaactgttttgaattgtaaaaatagaaaaaaaaaataccactaatatttattataacaatttattattctcattcctttttttttagaaaaagaaaaaaaataatatgttaaataatgctcatacattaatacttaaaaagtaattaatataaaattaatttttgcttaactaaattctatgtatcatagacaaaaaaaaaaagcaaaactaatttttcatattttatatttaattaggtgttcattaatatagtgagaattaatattacaaagaatcaaattataattaatgatctaatttattaataaaaatatcctttaaattcattctatttatttatttatttttttaaggaaattggttttatttttaattaaagaaaagagtttatgttataaattgaatagacagaaaaaaaaaatggaaacaaaaacaattactggtgtacttactcgttttaagcaaactttaaattttaataacggtttagaagtttctcgtgtgggtatgaaaggggactgatgttgttatggcatgataatattttgatgtaactctcttgtctatgaatacaaattattttgacagttatatatcttttgataatggtccgcgatggtatttttctactctttatggtttcccggaagcttcaaataaaaaacatacttgggaattaattaaaagattggatgatgtaactccacttgatccatggctgatcataggtgattttaatgagattttttcataagaacgcaaaagttatggccctcttcgaagtgataaccaaatgcaaggctttcgaactatcatcgatcgatgcttcttgactgaaatgactcatgatggacctgattttacttggacaaaaaataggaaaaatccaaatgcattatgtgaacgacttgactgatgctttactaacaatatttttaatgatactttggctctccctaaagtttcacacttggattactacggtttagaccacagagccattcttgcggatataatttttgactcaaactctaatcctgaacaccgacactctcgatttcgtttagaaaagttatggctgaaggaacaagactgtgctgacattatttcaagttg

SEQ ID NO: 239242 - DNA, 1413 bp, Cannabis indica
atatatatatatatttaaacatgttgggttatagtatagtgtaatataattttatattattatttaatcattttgtaatgattttttaaccttaatttcagtagaaagataattctcacttttatcttaccttccttgtaatttgaatcaatgaagctacgaagtttttaaggcgaatgaaggactggactatttatcattggttcaattttctttttctttgggtagtgttaatatataatattttgtggcgcacgttgattggagccgtatagctcgtgagaaattgataaatacatgaatgagaatttgtccaaaatatggaaggtcacacgtattaatttggacatggcaactttgaatttgtcaagtgaaagcatatttaataaattaaaaagaaaagtcaagaagacgcgacaagtaattcaattgaccaaattaaacaataaaaagtgtgaagtattagatgtcatccctacgtaattactaataagattggtcaaacggaaaaaaaaaaattaatggtagggttgctatagtaactgttgttgattataatatattgttttgttgtgcaggttaagtttgttacatttgttaatttcttatatatagtgattagtgatcactctctctctctctctctatatatatatattgactgatttttattttctaagttttgttagtgtactaatgattaactctgtttttattttatatttttggaggagagaaagttattgtgcatgtttttctttaatggtatgttttgtaaataaacaaggaagagggtataatgatcgggagtagtgggatgctgtatatattatatcaatactcacccacaccaattcacatcccctaaaatggttgaacttacggatcacggtaagagtaactaaattacatgtatatataattaattaactgaattattattataaaatcaagtttatttagttgagttttaatagcttgattttaatttaagaccaacaagtttcgtccataaggtgattattatagccagaaatgccatcttcttttgttgtgaacattgtcccacataaaataaatggtaaagaattgagccatataaaagaacatatgggtttttgccaattgatttgagatggaaccccataattctcaacatggtatcagagttatattccttttgtactgttatataattatcatcatttttagtgttaaatacttatgtgttaattaatagagaaattatattcaattattattacctgataatgatgatgagatccctctgtgtggcaacatggaatggaagacgtaactctcttgaggagatctataaaaaatctttctttggccgcaaaactaattttcaaaaggcctacctaccttagatgcatcatctgattgtgtcca

SEQ ID NO: 239243 - DNA, 2962 bp, Cannabis indica
ttttggaaggaaaaagagttttgactaattaattactaatgtacaatatattgaaaattatttataaaatttattataactattaaaaactttttgtgttaaatattttttttgagagattctattaaatattaagtattatataatataatttttttatatatatataattactaattattttactaaacaatacaataaaaattcatatctaattatcatttttacatataaatacactatttatttaaaatataatataattattagaccgtttaattatgaaattaatatcatagtaattatacaattatatctaaacttgtccttattaataatttttgtgatgtgcaattctataaaaatattttcttcaaaatacaaaattttaataattggcctccctaagtatttcgttctggctcgaccccggtgtgatgtgaaccctagtcttttaatgtctaccaaatattgttgtgaggtggcattagacaattgaataacaaggaatctatacaaataatttaatgggacagattggtagttttatcataattaaacctattgcatcaccatgcttgcatcatcatgcaacctaagtaatataacaccaataaataggtttactctactttttgcctcattttctatatattattggttaaattaaaatgtaaaactcgatattgaattgtactaatagctcgtaatatatctaagatttaaagtaataaatgatataatttttttttcttttctataagatatgggacaaaaataaacttaaaaattaaaataaaaatggtcttggtgagattttaacccctatcttatatgttatctaccttaattataatacaaaaattaatgttatgtttatcaatattatcttttattacaaatatatattgtaactaattactaaaatgtatatacattttcttgttcgatttttttaagagatggctatcccgtcttgtttctatatgggtctgcctttactaatattagtatacacttattatggtatttggcaccttaaagtaccttttatcatttctcatattaatttataaagacaaatataacttcgaaattaatccacatgtatagttataataggatctacttaattagatgaagttatttatagttaaaattaaatttattagccttaaatatacaaaaatattaaaactaaactactaataatacagagtacaatattttgaattttttttattagaccctatatgtctaaaaactcaaatcttaccacatcatattaacggtacatcaatatataaaagaagggtacatacaaaaattggagaaaaattctacaaaagtaaaataataataataaattaggaaaaagctttaactacttatcctattttttagtaaaatattaataataattagctttaagaaagttatgtcataattttgtggaccataactaaacttaaaataataataccaataattaagtttgtcattataaaaagagtgttggtattaaatattagtggtgtctaacactatttataggtggcatcttgcgattggttattaatattttctaaaaattattaaattaaagtatatagaactaaatacttaattacatcaatatcgatatgacacctaagaatcataggatcataggtgctaggcagtagggggataagttgataaacatgtttttattaaactttagccaaaaataattgcaaaatacatttaattaaaatataccctcttttacaattgaactacttaatatacccttagttatgttaacagattttattttgctaaaaatttatgttaccagattgattgagtcttgcacaaactagtcactgctgtagttgcgcaagggagtcggaaatggtgaggtgcgacaacagaaatggtccgacgaatgtgtggttgcgaagcttttaacctcaggacatacaactttgattgttgttgatgactgtgaatcttcgagagagaattaaagcgtatagctccgacaaaggagatggctaggaagttatagggagatttgtttcttgctgaaagtttcaggcaaagaaatgttaattcatatgttgaattagagaagagattcgtgtgaaaagggacagggttataattggaaggatgaaggaaaaagagggtattaattaaagaattttgaacaagaggtaaatatgagagacactgacttaaaaggggtatacaatctaggcatagacaggctaggccctgtgcctagggcccacacttttcaggggcccaaaataaaaaacaaaaagcctcattagtcttttattcaagtaaaattataagtattgtaaacaacaaatattcataacttggttggttgaagtgtatgacacattacataatagtgtaggatcccaaaatttaaagaggaaattacaaaatttatggtttttaataatttgtgtacaaaaatgtagcttctctattcttttcaaaaatgttattttatcgtaaaattgaagaaaaagtaaagaaatataggaaaatcgagtaagagtaactaggtatgcttatggtaaccagatgagtaaccaattaccataagagggtaactaggtaccttatactgtatttttttttcttcgtattttttttttctaaaattttcccttaaaataactttcgtaagaaaaaaatcatatttttacaaacttatacattaaaaaccataaaaataaaaatttcctaaatttaaatgacgaaattgtataaccactttattttacatgttttaatttttacttttattgtcatattttttaaaatttacctacttttatagatgaagtctctattgtaccccttaagttaatgtaaattatgtgttagacttaaacaaagatgatagtatattaggtagcccacccacaaaaattgatatattttaatgaaatataat

SEQ ID NO: 239244 - DNA, 2751 bp, Cannabis indica
ggagaggagctagtgaaagatgcatttagagcaacaacacatgatcaagaagttaacatgagtgaggaagcgcaaacgattcttctattttttgttaagaatgataataagttgtaaaagatgaggagattgtttggcttagcaggagcacttaagtacttttattttcctttttttattgacttgttattgtttataagaaaagtgttataaatgatatgacaagtatttttttccatattgataataaattataagcacaagactcattcatgagtcttgacttaaatagatgatcataacatttctatacagaataatgactcagacacccccaaattacacactatttttacacacaattaaccacacaattaaccacacaataaaaagtgatgtggtccctataaatgactaatatctcttcacatcattgtatgtaatatgttgtgtagtttgggtgtgtatctagcattactcttctatagaacaactaacttttctccaaattgactgactcataatttctccttctgaatactaccaattattttgtgatatttttctaagaaaatgaaagctttacatatacaactaagctttattagtagtggttagtagctttaataaatggttttactcttcatttattttgcaccaattaagacaagcaattcttttgaatattattcaagtctttacatgaaaattaacaatcctaacaacgagaacttttattacaaattggatcaaaagcttaattaggaggtttcatttttattgaaaggccttctcttaattaacaattccttttaagcagaagtaaaagtaaacaccaatcataatgccaaatttccattctttacaactaaaatcttagatagcaaaaatgttagtagacaaatgagttttctacaataatctagagatttgtcactaaatatagtactaaacttacaagaatctaaaaattaatacttttgaactgtagaataaatttggagatattgctataatgttgaggcaaaaggtgtcaagaaaatggttcttatcttatttcgggaatcccatgaactctaatccgctggcctttggtgtcaaaccaaactgagacaaatattcagcattgtaaaacttgctcaaatgcctcatcccattgtcacataatatggttacaatagtgtgaccaggaccaatagactttgccactttaacagctccgacgcagttcatggccgaagaactccccaagaaaaggccatcattcttcaacaggaacctgatcaaagttcaagagaacgttcattatcaatggaaaagattggtacttttacatgagaaaatatcaatgacaagtatggactttaccttgacatctcaacagcttccatatcggtgccacgaaaagccccatcaagtttcgccatcataaaattcttagttattctattgattccaatgccttcagttactgtatcgaatggattctttagcctttttccttcagcctcttctttagtgtacatcactccccgagttaccttgttgaacaaaccagaaccaggtggatctaccagaaagcacttcacatttggattcttttcctgttgaaaaaatcatatgattcacatatcaaacttcaccaaaacacgtctcaatatcaataaagctacgattcttatacctggagaaacttggaaactccagccacagtgccacccgttccagctgcagccacaaacgcgtctaagtttccttctgtctgctcccaaatttcaggtccagtaccttcgtagtgagcacgaaagtttgccaaattctcaaattgatccgcaaaaaaacctcctttagaattcatcgacagaaatgaactcttgttctctccatcaatttcttctgattttgtaagcttcaacgctcgttcattagcttcggaagctcgtcgtcttgcaatattaacataatggtctcggtgagtaatcgacactggccttactctttccacagtggctcccaatgcttcaataatttgagactataaagatattaacacataaaggaaagttccacaacaatgtaaagtgaggagttaattaaagttgttatatgaaataccttctcaatagcagcatcatctggaataaccacatggcatttacaaccataagcaggagcaaccgtagcaagactgatggcggtgcttccggcactcccctcagttactacccccccaggagcaagctttccagtttctaaagcctacacattccaaaatgcccaaaagatatgatacacactcatgcacaatgcagtttttgaaaagaactatgaaaagcaagaacagatacaaaatcccaagttatatgaggaacttgttaaactctctgagtaatattttactctaaataactcatacaaaattcaccaccctccaacaagacttaactctcagaatttatacgctagactaacaaataatcctaactagccaaccaaaaacagtcttaagtatcagacacaaacttaaaaacattgaacacagccactaaggacttgacaactcagcctccataaaatctaatgagttatactagtaagactaataagaagtaacaagatatgatctcaaatataccaaaaccaacatagttaaaggtcatctctttaaattcaagtttgaaatcagtaattgcatatgtcatttagattctatggaacaaagctatggaagaaacactaaaaaggtcacca

SEQ ID NO: 239245 - DNA, 2284 bp, Cannabis indica
attggtccgtttgagattctggaaaggtcaggtagcttatcagctagccttaccccttacttaatttggagttcacaatgtgttccacatctcgatgcttcagaagtatgtatctgatacgacacatatcctaagctatgaggatattgaacttcaaaaaaaattgtcgtacgaagaacaactagttgagattctggataagaaggaaaaagtattacgaaaaaagactattcctctagtcaaagtgttgtggaggaacatcaagattgaagaggcgacatgggagttagcgtcgcaaatgcaagaatagtatcccaagttattcaggtaaattttgaggaaaaaatttctatgaggaggggatagttgtaatattctgaaaaatataattataattaattaggcatattttattaaatatgtgattatacagatattggagtaagattataatcttacttaagctaattgtgagttaattaatgtaaatatagtaaatgaataaataaagcataatttattaattacgaagattttatcagattatgggggtattgtaaatactatttttgaaataaaataatttcaagttcggtggctatggaaactcgacggagtggtcagaaatgtcacgatgataaagttaagatgtattggaattaaccagactagtttataaagttgagttgttagtttattcgatgaaattagaaatgaccaaaatactcctaggtctgattttaggctttagtgttcaaggaggggcaaaatagtcttttcattaagttgaggttttgtcttttgtaagatcgttttatgttgaaataggaattatattaggttatttgtaatttaagtgattatttagaaaattaaagataaatcctaaactaagaataacacaaacattctatctctctctctccttctttcggctcaagggaacccagaagaaaccaagtgactctcctcaattctttggccaattctagcagatttcactttcaagctcaatctagaaccttgaggtaagctctctctatgttttttttaggatttcttaagtttcaagttaggttttgactagggtttgattgattttgggttgtggagttatttaaggttcagagttttttctagggttaaattaggagttgtttaagtttgaattgaatgaatttaatggttgttatgttataatttggtgtaatgggttcatgaactcaattttattcaactatggtgatttgattattttaagttgtttctaagttttgaatgtttaaatgctttgattttatgttattggagtgttttgggaagttgagcaggattggaggagctcgggattggtttcggggtgtaaaaccagaatctccccaacctaccagaatcggtcgaccggttctacaagttactagtaaattggtcaaccggttggccagtagaggggaattctaaggtttctcttcgaatctgatttttggctcgggatgctttccagaatctagtttaaggtatttgagtgatgtttaacctatttctaagtcagtaggggattagggattgtccatttgcaaaattagggtttattccagaattcaattaagttatttatcaaattttgttgtcgtgacataagacccaggatcatcaagctttgttccactcaggttgacgcgcaagcctgattactgaactgaggtaagaaagctagttgcactgctaagcatgttaagtgagaaatgattatcatcgtttgtgactcgataatggtcgaggtaaagatacggtcattaccatttattgaatgagtaattactcgcttgaaaccacatacaggtttcttacttatcgtttgctttatcgggcaacgataatgacatatatagctcgtgaatgacgagtggtaaggatgctttatgaggcatcaagaacagtttgtcttattagacgaatagttgactcaaatgtttgattatgaatggtataaacgctaggtgtgtatgatgaaattgtatactatgcatagttatactatctcgtgttatttactatttgtgattacttgctttcttgatgagtctttgtgactcacgggtgcttcgtggtgcaggtaaaggaaagagaaaagtatatgttaatgtaatggtcggtttattcagttagcagttagggaagttagttagttattgttagttagctttcctatttcctaggcaagctatatatactgtacaaacacatttcagtatgtaacctgtattcattcattgatatagtg

SEQ ID NO: 239246 - DNA, 2131 bp, Cannabis indica
cgcaagcttggatttctatctgcaccaaaacccagatggtgtttcgctgttggactggagccggcgtctcaggatagccgccggtgcggctaaggggctcgagtacttgcacgaaggggtggcgccgaacatagttcatggctgtgttaaagcttcgaacattcttatcgatgtgaatttctgtgcccgaatttgtgattatggactaagctttttgggccccagagagagaagaggcatagtaggacacgtggatgatgagtattgggcgagtgctggaggaggaggagcttgcaaagagagtgatgtgtttggattcggcgtcgttttgttagagcttttgactgggagacaatgtgaacaaggtttattggttaaatggtgtttgcctttgatcaaagaaatgaggtttaacgagttgttagatcccaggcttgtgtttccttctgatgttaagccttttgttcggttaggtaaagttgctttggcttgtgttggtaattccaggaagaacaggccttcaattggtcaagtggcagttatcttgagtaacttggagattccctagtaagattatatttatatatattcattactttattttagtttttttaaataattgattaatgtagtgacaaattttggacaaaattatactaatgtatataaattacaatatgcttaagagtgatgataatattgggagacacaagaatgatgattttagagagaagagataactaggacacatcgaagtgtttcacttttgacaaaatttacatagaagaagctacattttcataatagttatgccaaaattattaccaagtaacatgacatgattagtataattaattatagtttcttataaatttgaatttaataatattaaaaaataatcgttccttattttgtggttgtattagatattattggtgttatattaatatatgtagttttgattaacaaattagtatatgagattatacttttttttttgataagtatgagaatatatatacttggtggtggagtggaggttggagaacgttgaataattgagaggtatgagtgtgacggtgcagttttgtctaatttggctacccaatttagtcgttatgatttccgtgttgaaatgggcaatatatagttttagaatattgaaataatgaaactacatgagagtgacaacatttgttttccttgtttgattctttaattctgttaaatagtcttttgttagttaatgcatgataaattgaccgtacatttgtccacgaacttactcaatgtctatcttcatatctattgccgaccccttctttatttagagtttgggtaaataaatataatggtcaagtaaagcaaaagattaaacaatataaaacaataacatcatttagttatttgtaaggcaattaaacctgaaaacagattcttcccattattgtgttaaatcagcattagtttaagatagaaataataagtctggaactacaaaagttgtcccatgtacagaaaatgtcaaagattcgagtaggtgtaccaacagagttggtttgacggcaattccattacagatttacttgcttattggttcattattaaattcaaaagctaatttaatattcaataatcctttttccatcaaagaagaagagaaaatctaagaccattcataactttctttcccttctgcaaatatatttcacttattatcattattaattacatatttaatatatcattattaattttcgtgaatatatacgcaaaatatttaaattacattaaatatgtaattactatgattatattatttttaatcatggaatgaaaaattacacttaacttaaaagttaattaaaattaattaataaattatttgcatgtacttctttttgggtaataattattcacatgtttctcaaatacaatatgacaatgaagtcttcgcttgcttcgtgaatcgtaagtatctcagcaattacttcattaaaagatgttgttgctgaaaaatagttaacacttgctgctaaattggcgtgacgttatagaagtggagtaaatgagagagacacacaagatttatcgtagtccacttctcgtgtcgcgatggtaatagagctat

SEQ ID NO: 239247 - DNA, 1308 bp, Cannabis indica
tttgttattttttttttttttgtgctttgtgaggttgctttcttagtttgaaatttgaggagttttccctccaaatatcaatgaataagtccacaaaggacattcaataaatcaaaaaataaagtaaaatctataaataagtctacaaagaaagaacattcaataaatcaaaaagtaaactaatcaacatttgtcttggaaaagtagtgagagggtaaatgttcttaatttctttcttatttttcttttaaagaaatttcatcaatattaaaggcactaaatcaaagataaccacaagtcatacaaataaaactcatcactccaaataattaggcaaattcatactttgaacaaggcgaaaacagtctaaaataaatggcccatgcgaatacaaagcaagagaccatggagcaaagtaaaggctttcatccaacgtaaaagaagctgccacaggagttgcagctaaacataaaattgttatgtagcaatagagaacacgtgcccaagccccaccattcttgtctccgagtgacgaataaattataaggacctagctgcaacgcctcttgtaaaagtgtcctagttgccttcaaaactgaccacatcacagcaacagtccccacgggttgagcctcttggtaactcgagaggtagttcaaagcgtaaggttcaaccatgtcatccttcaataagtgatcaagtctttcttcgatgccaaattctccaacaaggctatggctttggtgctattgctaggaatgaaatcgggtacctaattgagggtgttacacgctcttatttgggagtggttagacctgagttagtagagacgattggggttcgtgaggccttaagttggatcaaagccaagggatggcagcaggtgacacttgaattcgactgcttgttggtcattcaagcaatccggagccctgtgagaatgatttatagcttcggttcagttattcaggagtgtaaggctttactcttagaattgggtaatgttttaatttattttgtaaaacgttcagcaaactcagtagttcattcatttgcaagagtttctaatttttatcctgatcgtgttttcagtttgggggatgtacaactgagttgttgctggtaggagagattaaagtttaataaagtttctcattattttcttaaaaaaaattatctccaaagttcactatattcaattcacttagtaatagtatagccccttttctttttgaaatggaaaatagtactatagtaattgtccaaaaaaaaaaaaaaacgtaaagtatagtttattaccgtataaaa

SEQ ID NO: 239248 - DNA, 2915 bp, Cannabis indica
aaaaaaattgggaggccggccagtctaggacaagtgacctatgtttttccaaaaaaaaaaaaaattcccaaccaagaaaagcaagaagatttgcttgtcaaggacttgcatgttttgcttcccaactcaaggatccacaatcacttacacataacaagggtgctaatataatttgtgaaattggttttcatgtgcgcaccagagtttaataaatatggttttcaggcatgggtgcgtttaaatttatatgattgttaagaaaactcgtgtttgttgtaaatgttaaaagcaattataaatatggctccgtggtcttgactcttctgacaattgtatattttaacatgttaactctgtcctcatctgctgtggtattacaaatcctttcagatgaaagttgattgaaggcagtttcagctacactgaaatttgctttattaattcagttatttctaatattagttcatctgcattctctgacaggattataaggttcaccgagatgaaatacatacaaaactggttcaaataatgagagaaaggttattggtacatcttcgtggcttaccacaaatagtggagagttggaatagacctgaagatgctgatccacagcccagtcaatttgctcgttcacttactaaggtcagtactgttttgctgatttatattttttactgctaactccttattatgcaagatgaccacccctaactcttgtttgacctgatctgtggttcaatttatttccaggaagttggattcttgcaacgtgttttatctcgaactttgcatgttgttgatgttcaggcaatttttaggtgagggttaagcagagggttatttgtctatttactaatttgaatttaggcagctagtaggtactatgtacatatatatttttcttaaaaaaaaggttcaaatgaggatgtaaatgtaattgctgaaagatcttgaggttttgaaagactatgtattgttattcctcgttgaccagggacaaaaaggattttccattctcatgtcaatgtcattcttctaactttatcacttgtatggtttactttcaggcaagtagtcataatcttccactctcaaatttcggacgcattcttgcgcatggagataaacactccacaagccaaggacaggtacatatcttgtcacaattacattattccagcatctttctgtcaacttcacattgaaacaactttgattcatttatactttaaatttccaggctacatcgggatgtgaaacacattcttggatgcattcgatcgttaccaactgataattcgagtgaatccactactccaaactggggtcaactagatgaattcttggcgcagagatttggaactgaagatggttaaagtgttagtatgaagtaaattggttaattgttttgataaggctaatcatacacaaggcaaggtgttggggatgttacaaccagttttgccctttgcatttgtcttgtacgattaaattcaggtgtcaaggctcgggacacattttcgctttatggagtgtaaattatactaaaccctcttaagtttccattttttcaatcccacaaatttgtaagaattcgtgtaaaagattcatagaaaagatcagaaaaaattgctgggttgtgctgtcctgtgtccaatcaaattccttttttgtagttactaatatggttttcttttcctccaggttttccatttgttcttcggtagagtaggtgtataaaatcctgtatttgaattcaatattgtggttagaagtgtttctcttttgcagctgccacagcttaattggtcgacattttgtattttgacttagggaggttgttagtcttttttggccctttggttgtaattttgtttgcagtggaatacttgattattttcaatttaaattttagtgataaaaataaatgcatggtagtccacaccagagttgtaaatagggtcctgacgggttgacttgtattttcaaaagctcgtaaaattatgaattgtgctgtattggttcgtaaaaggatgtaatgtgggtttgtttaaccactacattcccatcttgctggaattagtattgaaccgacctgttcaaattcgggctctactttcttgccttatcttttatggacaaaccaccaaatagtatgtgtttcttatagtttcaattcaattattatttttttaacaacattctagacaaaagtatataaaaaataattatagtaagtagaatttaaatacttactaataaatattagagttttcaactcaatttttttttaaaaaaacatgaattcatatatatagttatagaattattaatactcaatgttatgttagaaggtttattatcatattaatttatatataattgttaagtaagtatttttttttttgggaattaccgcatatattatttttttaatttttttttttttcaaatttacggtttgagtttctaaagtgattgcaacgctagttgcaataggtgtttctatacgattttttgttgtagttgaaataggggtttctatacgattttttgttgctatttaggttgcagcgctagttgcaataggagtttgtatggagaatttcgtaaaatgcaaaaaaactgttttgaagtgtaaaaatgaaaaaaaaaaaaaccttttttttttgctgtatttaaattttattatcatcaaattattgcactttaaaaaaatatcgcgtttttagatgggaactttgaaattctatacttacaatacccaaaaattttatccctaaatgcatagttattaaaattggtcatatatgaccacattcctaatatcccaccaatacccctcccatttgaaaaaatcaaaactcaaaactttctctctccctctcactgaacacgcacgcacaaacaac

SEQ ID NO: 239249 - DNA, 2413 bp, Cannabis indica
cggcaagtgtttatgagatgatcctttactccgacaatatttaagatttcttaaacaatgtaatatcttgcactgaataaattctttgtgtagttcacttagacttgctcttagaacgctataatttagggtaaattatataatattttttatttagggcaaaaacagataatattttttatttagggtaaaacaagcaatatataatctaggttaaaaataaatatattttgtattaaataaagtggtacaatattacaatataggcactagggtgccaaaaaagaatcaccataaaagtgacatttccatggtgagtcagtcaattcaggtgcattggttccaaccttttgtcttagggataaaacaatcaaaattaatagataaataaatatatatatatatatatgttatatgttgtatagtatggtaacaaataattgttgtaagtataggttaatttaataaatgtatataagttctcaaaccaaacaaacaaacaaaggaataagaaaatgagtagtcactttcatttgcatgtgccaaccctatcaccactcattaatttcctctattggaaaatgatcaaaatatttgtggcccaatcaaagatttagtttggttaagtgatactatcacatcactaaacataaattcaattattattatcattaaaaatatggatataatataattaaaaaaaatgttattttgttagttgtatacaatgttaccattaagatttgacctcattttgccctaaattgcgcctaaattatgaaagtgactttgttttggggttattttcttggtattatgatttacatttgtatttagttttgactttggtgtatttcaatttttaaatgagtaattaagattttgttcataagttttgatatgcgaattatatttttggactttttaagttgttaaattttttttttgaattattgagattgttggatttaagaatttttatctaattttactaataaacgtgtgacatggataaaagttcaagtaacaaatttgtcaaagtttgagaattacgatttagtacatatcaaagtctagagattacaatttgatacatgaacaattaattaccatgttagtaaaattaaatgaaattgaacaggaatcattgaatctaataatctcaatactttggtgagaatttttatcggtttaaaaaattcgaggagcacattaatacatatcaaaattcaaggaacaaaaatcataattagcctttcttaattatcttgactcattttagtattataagtactgaattttaaaagatggatttcattaatctcacaatagtttaatcatttattatattgattagacaattagcctaagtttgaagtagtgactaagcaaaatttggaattttggagtgcaaaaagaaaaaaaataaaaattaaggaggatacattgaattataaatttcaaagaaaaaaaaatctcaacaatttgggggtatgagaaccattatgtatagggtagatctatcactcggtagaagtacaataaaatcttcgtttagaggtggcaatttatctttacggttttgttcatattatgttgagactcatgtattacatatatatttgacccgaacaagacttgttcaataatcgtgtcgaaaattgaaactcaacacgactcgtttataaattgattgacgcgacacgatctatgtaaattgtttataaatggatatttttaaacatggcaactcattaatctataagtgatatgtttaatacgtttataacatatttatgacctgttagtcttaaattaactttaaataagttattagcaagccaatttcatgtgagtcgtgtcagtcaatccaaaaaatgacccaactctaaacctgttaatttcgtgtgaattttaattcaagttgtattattatgtctacctcattttactactcctacttttgtgtaagtacatacataaaacgaaatttatagtgcattgtttatttatttatttatttttttgaaaaaaaaaaagaaaatagaaaacttgccatatttattgttacattgcttcctaatgttgctttacttgtagtggaatatggaacattgagtgaaattctctacttccttttaaaatgagaagcatattgtattgtcaaatattgtatcatgtaatgtttattaagttattactaaataaagcctaaatgcaacgcatggtaaacaaacttagaaaaagcaaaattggcctaatctcattgtattgtcaatattgtatcatgcattattaatatttactaaataaagccttagttccatacattgtcaacaaaagctatagtattatttttagactaaaagtaataaatcatagcaaaggcatttttttgtatatactaaaaata

SEQ ID NO: 239250 - DNA, 3381 bp, Cannabis indica
ttttttgatgattatgtgaattcgaagacatcattgaagcaattttgttgaacaatatgacattgccttgagagacaaagttgagaaagaaaatcttacagatttctaatttttttagcacacaaatcccttgtgtaacacaatttgagatagagaagcaatttcaaatgatctatactcattccaagtttaaagaattacaaaatgagctagttgggaagatttactgtaatatttcttgtaatggtgaaaaggatggggtatttgatgaaattgaaactttatttgttggaggtatacaaaaagaaagggtttacacagttcaattcaataaagagacatgtgaggtcaattgtgcttgtcgactatttgaatttaaaggaaatctttctaagcattcattgtcaattttagtaaaagaacacatcaaaaaggtgccagaaaagtatattgtagcacgatagaggaaagatataaaatgatattacacaatgatcaatgtcaaccataatgattattggaatggaaatgttgaaatccaacggtatgatagttgcaaaagaaattttatgaagttgctaattgggttgttgaatctgatgagaattgtacaacgttttggaatgtgatgaatggattgccaataaaaagaaaagattaagcaagaagatcatgtaattcacagttctaaagttgtacgaagacatggacgaccaccaaaaaagcgtaaaatttttaagttggagaaaattgtttctatgaagaaaaaagtgtcagataataagaaattcgatacccattgcaaaagaattaaggtactattaatttaaatatattctttgactttttctctttatattttgctttggacttaaagtgttttttttttcttttcttgaaggtttcaaatgaagaaagtattgtagatgatattgttacaaaagggaaagatgtatccacaatttctactcaatgtattacccatgatttacaagaaaaaatgatcttaaaggtaaacgattatttaaaatttctattttgaatttatggttatataaaaatatatttgcactaaaattttgactcaaggaacaacatatggaaacaatgacaccttatatatatcacttccaaatgagttaatagatttcaaacatttggatggatcttactcgcactctttagaatcttacttttatgatcatatgtataagtttcattctattttccttgtatatatttataaatatagaattgaaaagctaattaattaattgtattcttgtcgtaattaagtaggtcttacattgagtgatggaatgccgcaccaagcaacttcaagccaaacaatgtattactaccaagacccaaagattaatttctcatgatcatcctaaagatatataataatatgtaccgaacatatattttatgactgtgggagatgttattatgcagtaatactccacgtatattttttagaatgatgtcaattccaaaactttatgaacattatatataaatttgttatttagtagtatagtttacttttcaatgactactttaatatgtattttatagggagttatgcatttgatagagaaggtcaaggtacttgtcactatcgaaaaatgaaaatatttattatcttaacaattttatgtggataattttatttacactctaaaaatatataaatatactttatttttataatttttattttatataaaatatatctcaaattatattgatttttatatgaatgcaattttgatttttccgaaaatctttagtctaaaatcataaataacaaaatgaaaaagtaaaaattataagaatacaatatacatgtaataaaataatgaatttttttaatatataagcatttaatataaaaatactaaaaagtttgagattaaaaaagtaataaaaagaatttgatgtaaagaaaaaaattaaaaaagaattaaaaaatatgtaaaaatgactactactggtaattgaaaattatgtaaacatgaataaacatttagatattaaaaaaaaatgttgaaaaataatttattggcagatggtgcgcgtgggcttattatttagatgggaagggtgaaaaatggttgtgggtcccatataattaataaaaaagtattataaataaactaaataatattattttgtattaagtcactgttaggtagttgtggtgttcggcaccacacttccggtgccgcataccaattctcatctttttttttcaataatttattttaaattgtacagagttttttttgtttcttgacaaagtttacaaagctattttttttttacactgattatatgactcaaataaatgtaatttattaattttttttaaaaaaaattaattaataaattttgtaattagaaaataattgatatgccaatcaaatttaataggctactaaaaagtaatttgtttaagatactaaaaagtatttgattatttcatatactttgttcttggatagtattctaaataaattaattttatcaaactattttattaagttttttaaaaaaattaaaagacaaactggtatctttttttgttttgttttattttattaaataaaatagtatcttaaatatcacaaagttatatcaccaaaaaagaataatactaattttgttaataaataattttataatttattaattttctttcaacttagtacacttttaatcaagtttcaaagtaatacaaaaaatgttaaataaataaattaaaaacaacgtaattgcatcttatcttaactaacaaaacacacataataacattaaattaaaattataatttaaaaagtaattaatctaaaaaaataacaataattaccttgaaaaataattcatcatgtattattcttaagttcaaattattaatggtacgatcaatttttgtaatagataagagagagaatgaaataaaaataaaaaataaaaattgattgacgcacgcaaaagaaagtttagtatgacataaaaaaaaaaaacaagaaaaaaaaaaaaagacagctgatagctgacgcaagtaaaaagggaatgtcaaatgttttttccgtaaataaaatagttagagttatttatttttgaatttctttctaatattgcgttcaaaattaaaacttcccctttatggtatcctttcatatttttgccatccagattttattttttttatatgaaaatgtatgtatcagtaattaagacgtgcgtgttacaaatttttgaaaaaaaaaactcaaaatgatttaacatataaaaacaagatctaaaggtaattgattaatttaaccgaattagtttaaactgttaattttaatgaaaaaattaaaaaaaaaa

SEQ ID NO: 239251 - DNA, 2225 bp, Cannabis indica
tgagatgcagctacctgtaggcgataagaagtaatgtcatatatagagcatgaaatggagaaaatggtcaatatactcaaaaccatacttatttagtggaaaagattactctactgttcacattcaaaaaaataaataaataaataactcacgtacagacagtgtatataagttaaccctagcaactaaaatagaaactatgttaagataatatattccataactaatgggatattctaactgaataagaaactaaccaaactggcccagattttttaatactgttgatatctcaaaaaaactgattgtaaatcaatcttattttcccacacttaccaatccaaaagcttttgccaaaccaagcctgtttgttggaatggtgatgttagcttgcctgtacatccagtcaatcttattgcggacataacccctgtcactaactttttggagcagtatgccaaagcacctgcaagagaaagattgtattattggcccagactatgaagtttaaaaccatcttcaacctatatacattcacaacgagggaaaagaaagtccctttaaaggaacataataaagtataataatagcacataacattactacttgaatctaatatagctacatcgatgacaaaacataaatactggtgaagaatgcagagtgctcactttcagacatgattaaatgtttacacaaacatatcaacattgaagcattactacctatggagaactgcagaatgttcatcatcagtagtataaagctcatattgtctggtaaaagcattcccaagggatatcacccactcagcatcttgaatgacatctaaagattctgcaagaaactgtaatcaaaatcaaagaaacatattaataaactgtccctgtgaagggccttagttttacactattttttcttaagagaaaacattttcgtaaatcaacttaatttaagctgaaaatattcaatattagtagtctaacaatttgcctggtttactaacaaagaggaaagcttaaaaaaaatggataagaaatgaaagttatcttattaataataaatattgttgtcaatgggaaacaactaaaaaaatattcctgtcgtctaacaatttgcctggtttactaacagagggaagcttcaaaaaattggataggaaatgaaagctatcttattaataataaatattgttatcaatgagaaacaactaaaaaaaatacgcctgtcgtctaacaatttgcctggttactggtttactaataaaggggaaagcttagagaaaattggataagaaatgaaagctatcttattaataataaatcttgttatcaagggaaacaactgaaaaaaatatgcctaaaggcagacacacgcagccacagcttacaaactgactcttgatcagaaagtgaaacaaaaacaaactttaatacaacataaacattcctaatccctacattttaaatgtcataatcaagcaaacaataaacttgccacaattgaaaatagtgaagagaaaaatatatcaaagctgaacatcaataacactcacatttattatcatgtcatcccaagtctcttgatacataggatcctgctttagatcttcagtgtcactgacataagccttcatctttggaatctagagcttaccaaagaaaaaaatgaataagctacaatcttatgttacttgtaaccaataaagaaaggataaaactgaaaatacaatatttgctgaagcatgatgagagttgtattatagatgataaattgcatcagacctaatgtaccctttctcactaaatgtatctttaatttttgtaagctattcatgaattgatacagaaatgaaaagcttaagtatcgaattacttccgaaatgaccaatcattatagcgtgaagaagcagaaaaaaaaaccctaaaattgttagcattgaaatccatatatccacccaatgcctacacaagacaaattatgaagaggaaaaaaagaaaaaagaactcgatatgaatacaccaatacctcacagagcccactcatccaaaaaacctaaggaaaacacttacaaaactattgggactgaacatatctctataaagtatttgttgcatttgatttgtttacatctaaatcctgacagcatctaactcaaccacctccagaggttcatatgcgtaagaaaatgaactcaaaatggaccttcaagtttaaatcaatat

SEQ ID NO: 239252 - DNA, 4198 bp, Cannabis indica
aaagagatccaggttcagatcttggtgatgctctgctacagaaatgaatcaagggctagagatctgaacggaaggagtcattatattccactgcacccaatgtaaggtttccttaaactttatatgtgtttatttcattgttatagaatacatattatgatgttaatgaaacatacttattactaaatttagatcctggtaaaatatttccaacagtattatcaaactatattataatgtagatacacatctgattatttttgagttattgtttagttgatatttagtttatatgtaattgtcctagtgtatttttctagtcttttttatacatatttaactagtgttgttatgtaattattttttatttattataaagttatttaatcaataaaaaaatgagtatatatttatttctttttatgagtaaaattattttttttagttgtatgtactagtacttggtatttgctttttttatttttattttttagatttacttttgtttgtttattgagtttcttataagttgacataatgtgttgatgtctatttaattttttttttttgtttatttgtttgtagttatttaatatgtttaactaggtacaaaaataagtatgtttagtttttcatgggtacatatatccaaattgcttttgtgttgttatacagttgtttgttggttgttaattagttgtgtgtgtgtgtattgtgtatatgtttttttaaggttgttgaaagtattttattgtagtctaattgatttgtatatttaattagtgttgttgtgtagttatatttttgttgccaaacaaaattaaaaagtcaatttttgtataatatttgattttttttttatatagttatttgtttactgttaattagttattattattattaaatgttcaactaagagaaaaaataaatacatatgtatatatgttaagtttttataagtatatattttaataatgtttgtgggttatttttaagtgttttatagtttttgatgtgtattattgtaaataaatatgaaattaatttttatttatataataattgattattttttacgaatatactttgagttaattatgtttaaattaaatatataaatatctgatatttgttgcctacttgatttctaattgagtataatttttttattaatcattttaatttttcttaaaatcattatttttgtataatttttatatattttttagtttatatatttcaaaattttttatatttattgcaaagaatttataaatattttttaatatgttcaattagtggttctcgtagtttcaaaaaaaaaaaaaattagtggttcttgtataatgttgttgtgttatttataaattttaattgtataatacaatatgttaatatttaataaatttgttttgaagtttgattgtttttaagttatttttgtgttgctaattagttatttttgtataactgttgcattaagaaaaaatagccctacacgcccaagctcacttcgtccacactgccatgtggcaactgcagagcccctgccacattctgattctgcagttctacgtgcatcagtaaatgattttacccttcccacttgcgtgtgaatcccactcacctatcctatccacatgtatatctcactttctccttttgcacctaaaatttatctcttcattgtatttttgtaataaaaaaactttataaatattatttttgtaattaataaatagtataagtatttatttttctttgggatgatataattatttattttaagtaattttaacttaaaatagaaaaattcttttttttataaaggtaatttatataggcattaaattaaactacatatgtatttatactgcaatttttcttaagaaaaaattatttttagtgtatttttgttgctaaaggacagatctagtttttttacaaaaatacaaatttatttacacaatatagtagatgagttagcacgtttgatggaatttagaagtgctaatcaataaaaagtcattacaatttcaatatgaatttaagacgtgacaatgtctatcactccttttattagttggtttgtgattattttattaatttgacaaaaaatacaaattggtatatgatttaaaaaatgaatctggaaagcttaatatagtattgagtgaagaataaattggtatgcaatttcaaatgtgttaatttttgttcaattttcaagttagttttagagcattgcaccacgacgatgatgccaacatcatcacacaaggtggtgtataacacgcaacaccattactaatatttttttaattgatgtaatagtaattgtaatagcattgtaatggagtgagaactctaatgaaaatagttaagatgcttggtctaataaacattgtcattaaatagggtaagtgatatattagacaaacattattcttagtttaattatttattagtttcaaaattttaattaaaataaaaaaaaattggaaaaaaaggtatttcaaacaagaaagattagcgtctaactttttattataatttcttagtcaacctctgtatttcaaaatatattttggaatatcaattttttttttatgacagtgtttgttataattacagtattatttctgtaaatttttgaaaaatttcggaaagtttataatgtctaaaatgtgtatgaagttttctgaacacgagtgataaattaaaatatcaagaatactgttacgaatactgctataaaaataatttaaaataaatattttgccatgtaaactcaagtagggaggttgattaagagagattgtaattaccactcatcttcaaacaatgaatcatgtttacattaagtttgtaatacactaaaatctctatataagaatatatttaggaccaaataaattatattctaattgaaaaattataactaaatagagttatactagaaaaaatcaaaataccaaaaaatattaatgtaataacgataataataaacaatatttatatatgtatgataatttgaaataaaattattaattttatataaataaatttataaactatatatattttattaaaatataattatttttatataaaaggatatttttttaatatgggattatgtataattaattaaaattttacggttactcttatttataattttatttataattaattcaagacttaaaattatttttttattaaattaaaaattatttttcagtattcttagagaaagattaatgtataatgagaataatggttacaaaactttaagattaaacaaaagaatctaatatgttgactgttcgttgtgtaacactcatgtagaaaccgttcaacatgtgttggtagagtgtgagtttgctaaagctgcttggaatcgcagcatagtcgacgtcgaggctggggctacaatattcaacagctggctgttggggatcttcagcagagggcacgaaggtgaaatggaggaagtgattgtggtgagttgggctatttggcgcgcgcggaatgaatttgtttggcaaaagaagagttggtctgcatcaaatattgttgcatcagctagaaacatgcttgatcaatataaatttgctcaaggaatgaagggtcttttgttgtctccgctgcatgatggtgggtgaaatcttgagcgttggattgcacctgagttaaacaagatcaaagttaatgttgatggggctttatttgaacaagaggggcgttttagcatgagttttgtagctcagaatcatcatggtactatggtagaagcattcaagaaggggaagattggttgtgttcaacccgaaattgctgagataataggcattaaagaagttttgagttagattgcaactcattcgtaggatagagtcatgttagaaacagatagtttgatgtgtgtccaaacgattcagaacgatatttttatgccttcacagttttgtcttattgttcaagatgttcaaaatttgcttctggttttatcttttgttgatttgtgttttgtaaaacgatctgcaaataagttggctcattgcttagcaaaagactcttgtttctctacaggtcgggtgctttagttggaggactgttcatataaagtgcgttctattgttttgaacgaatttattaattaataaattttttaattttattaaaaaaaaaacta

SEQ ID NO: 239253 - DNA, 1822 bp, Cannabis indica
tagatgaaccaagttgggttttcgaatggcattttcataactgggatgattattgttattattaaagcttatttcaccagcatctttagtatcaacagagtctttatcagagcaagaacaccctaaactagcaagaaacttcattctattcatcttactagatttactccttgaagagtttaacttttttttcactattttgtagtaacatgcttcgactattccagctcgattcggaacgaacgctaggagttgagggatgaatttttgattgaatttgctcaatatcaggcactcgctgatgaatttgacgatggtcaccattattcttatgatggtggttaatatcatagcttcttacagagctaatacttgaaattctagaactggcgtcttcgttgattactccattgaagtatttttcagctccaaaaactccaatttcctcgtcatcttctttccttcttcccaatttctcgtggttggttattaagtatggaggaaatgaggcttcgatgttgcgagtagatgttaatgtcaccatgtcttcttttgtttttaattctatcaggttggatggaaataaaagaaaataaataaggacgaaaagaaccagaaggaaacaaacaaaaaaaaagaaagaataaatgatgggaagaataatgcttaattatttagagtcagggtaagcatacgtattactagacactagaaaaatacaaagagatgaatacgaaaaggacgcaacagaaaaaaagtaatatattaggatagagtttgagagagaagaggtgcttaacggttgaagtccctcaaactaagagtataaatgtataatgagcttgaaagaaattagacatgaatgggtttgatggttctgtaatttgcaggagctcagctaataattagaagaataagaagataaagatgatgaatgagaggcttaggcttgaaagaacttgcttggcgtgtcttcagatctagttctttaagtagacttgagcaataaatatcaataaatatgatgttaataaggtaggaccttattcttgtggtctacatgtacaagttgttgatattttttttggtacgttcttgatttttttctttgtaataaacttttcttttatttgattcagatatgattatattttaaaattagatcattaaaccatcataaggaaaattgtgcatgcaaatgagagtggacaacattcaatttaatttaattataataaaatgaaaatctaattattacaattagattgaatgtgaaaagttagatcgattataattaaattagataggttatgattcaatgaatttgattcttatcaatacatggccaaagataaaaaataaaaaaccactaattaatcgacgaccaagtgtatgatatataggaagaagatttttactaattcatggccaaaagattagataaggataaataaaaaagtaaaaaagaaaagaaacaaaaaccatatattttgacccatgtatataggtattaagagtttagcataagagtcgagacctgtatttcttggtcattaatattctaaaattaattggttatatatttaaactaccttagatatattacttcttggaagtaagctcaaatacaatcttttttcccttttggcttatgagtacaaggttggttctttaatattgttatctttgttcttttttctttgtacgtgtatgttcttggtatggtttgtatattaatcatcccggaccctctgtctaggatttctgtccacccaattaaaataggaattttatagaagataactaaaaattattttttttt

SEQ ID NO: 239254 - DNA, 1773 bp, Cannabis indica
accacaaaagtcgtaatcatctttggcggtggtgatagtggagaatatgaaaatcgattgggtttttggtggaaattggcttcaattcacaaccccacttaatgtggggagaaaggaactttgatagtaataatattgtcaaaaatcaagaatttattattttctttacatttttttaattcacaatttttatttagccacatagaagtccctgtaatgcatatcgtggtccattgatttttaaataaattaaagatcagttcacaatttggatcttctacatgtgctcaggttcagccaaattattcaagtaggtgagaataatgtcaatggaaattgccaaatctaataaataaggtaaaaaggtgtattatataaaaataaaaataaaaattagtatctgcattaaataaatgaagagactaggccggagttaaaatacataaaattcttccaaacaaaagtatgatgcatcatctaaataatctaaatatttaagaagaatacaaaattattgagtaatcaaaatataaatattttcgttcaagtttcaaccactaaaggttaaaatattattaccaattcataatttcttttgtaggtcaacaatatatttttgtgttatcatttaggtcttggattactacaataattattaatttttacaattaggacagtatttaagtgaatctttacttgtgattgacaagtaaactctctttaattgagataaagaaatatatctcagtatctcacgaagattttgaagtatatattagtgtatgataaaaaaggacaatttaattactctttttctttttaaaatattaagagaaggcatttaaagttgaagaccgctagatatggaaatttaaattaattaatatgtattttggtataaaataagttttcttaccaaaaatagtcattagtaatataatttattaattatgaaattttattgaattaaactaggtatgtcatactttttatatttgaaatttaatattatcatattttatgtttgacaacattaaaaaataaaaattcgacgaattagccaaaatatcacaacaatatggattagtattttagaatatcgagttagtgggttacgaccatttttacccttaaatttagtggttacttagtggtgaagtaagggtattttaatcttttgccaattaaacattataattcgagtaaattgcagcataatctctaatagttgcagtttgagaaaattataaaaactgcatatgttgtttggtttgaaaaaatagctacaacccgcaccacccgcactgcgaatacccctacttgattcctttctatggtagagcattatcaagatttgaacttgaatcttctcatcctttagtttggttagattcttcaaaatctttcacgctatgattgagtacttgagttgatatgagtgggcatatactctatcactaatggctcaaaattgatgaagacgaagaagaggggattttgaaatacaaagaaggaggctctcaattttctaattgtctaacaaagaatgaaaactaggttagttgagttggataaaaatgagaaccatcttattccttttatagtatttcagctagggtttaggatttaaattatatggaataaaaaagataaattgatttagtgttcggccatacatagtgggcctcactacaatttttgtcattttgttcaataatttatcttttctttcactaatgccatatttttttaattttaattctataaatgtca

SEQ ID NO: 239255 - DNA, 4884 bp, Cannabis indica
ttttgttttttttggacagaatctcaatatagaattttatcaaatacacaatgtttaattgttgtgaattggagtcaatgcatacttttccagcactattaatagaaacaataaggaaattaagtactaactatggtaactctaaattatgaaagtaattagaaaactacttcaattagtagaatttgaccaaaaatggtattacacaattgtcatttaatcattctgagttgcataataacataattcggtctgatctttatgtaaatttgcacacattttacagctctataaatggaaacaaaaattaagtactgaattattatattaagcaatgcataaaattaaataaaagttaaaacctgaaagaaatcatcccaaactatatccaaaggaagccgatttcgagcaatgaacaagaaagcgatcttcgtcttttgaacgctcaaagaagaagccatagtcataacccgactgtactggttctgcataaaaaacaagcttccgaaacaaaaacctacgaatatcacaaccaatagcttcctcttccatttgtaatttgatttcgactgagctaccttccgcttcatttagcttcatgaaccaaaagaaaagactagcctaaaatgtaattaaatttaatactccatgcaaatggaaatgttgtttagcttcaaaactcagctcaaccagatccagtgaacttggaaaattccaattatatatatataaataaattcgtgtgattgaagacaacgaagtaaagtttgtatagggattctcgtggtggtaagagtctttatggtatgaagcagaggcagagcatgtgtagttttggggattcagacccagaaagaagggagagagagagagagatagactataatggttagagagagaaaggaacttcaactctcagtgtgagactgacttgtctttgcttgacttggaatttattttaatttatttttgttgcgtatgatgtaggagatcgaatcctctctatcattgaaacttcaaaatgaaaagtgtttttctttttccaaatataaaatttatatgtattttttctattttaaatcatttgtttcttttatgtgttttgtttatctcattttagatttgggctttttaaaagaaaaaataaattgcataataaatcaaaaatttgaataaaattataaaaataaaataacacgaaaaaaattatttttactctttgaacattttatttaaaaaaatacatcttgagtaaaaataataaactatttttaaattattttatagtttatttataggtgtactctaattgtcatgaggttgtttttctagttagtttgtagtttatttatagttaatttatagttattgtgagtttgaagtctcgttgtttttagttatttttttttattttgctcaatatttttgtaattttaaaattttacaatatttttgtaattaaaaattttaagtcataaaattataaataaaacataaaagaatagtatttttgaaaatctccccacaagaaaatcacattgatcttaatcgaataaaaaaaaataaagatgttaatttttcttttctgaaaatgatgtgttatcccaaactttatccacctgacgtggcatatccacgtaagccaagactaaggacacgtcgaatatagttttgccaatagcaggacaaagtctccttacaatgtatggcagaaccgtcaagcagcaagcgaaaggagttaagcaagttgtcaagaagctacacaaccatatctggccagccaaggggagtacttaggctggccaagatgagcttgtatggtcggccaaggtttgagcacaagctggccggccaaatgtgactttcagaccaagaaagggcccttcgaccaaggaagccggacctatgtaagaaaaacttgtacgaaggttgcccaacacctacaaaggttggacaacacatgcaaaggctggccaacacttgccaaagctagcgggaacatggccttctagactttggcagtaacatggtcggtcaaaccctggcaggagcatggccgaccagaccccaacctgcaagcattgtatggccaaccagcctacacctggcaagtgcatggccggacatttttttatttggcaggcctttggtgcatagccttcatccgcagacagcaagttaagcacgaattgggccttgacaacccatgaaaacagggagaaaatattagcaactttcctatttttgagggataatttagtcatttaaagtttattaattaattatgtaaatataactttatttacctatttttaagggatatgagggatgtctgctctactatatgaagagcattagtcaaaccctaaatctctaagtcttaagcctctaatctccttaagctctcaattttaagtctgaaaccctaattctctcttctccctctcttctacacgctctagattctctctctcacactcgagatttgccaacttaattctcacattgtaatcttaagagaggcactcccaattctacaacacttgtgatttgagtggtatgatctttggtatcaatacaactaaaaggggagtaggtcattacccgctaactaaggagtcgaacctctataaaatcttctgtcttatttacttttctattcttattgtataatacgtggtaagcatcagtaataaatacgactctactattggttgaccaaatctgaggtcaacatgatgattggttcttttttttaaaaaaataaattcattcattcaaagaaaagttacaaaggattaggcaattcttgtttaatagcaagatttgcacaagggggattaacctcaatccacatggcactagctttgttagtcaaagtataattggctagagtatgtgctaccccattaattttccaatatactaaagaaatcccatttacattgtcatatattaacatattccatatatgatcaaatataccatcaatgtctcgacacacatcctccttcttatggattaattggacaacttcaagacaatatgactcaatcttaaatattggtaatttcctctatattgctagctaccacccttcttgaatggcgagcaattcagcatgaagtggttgacattaaaatggcagaaccgtagcagaggcaaaggagacatgtcctttactatctcgaatcacacttcccaatctcgcatgccctttatcttgcttaatcattgcatcaacgtttaatgtagaaacctcgacagtaagaggttgttactttatttttttttggtcgtgccttgccttttttcacaccagctgctttataatcttcaaggtagtgagcacaccattcgagcacctcattgcagaaggggttttacctccatgtttagtgttgtatcatatgaaccagagattccaagtcactgctaaaaaatacatagtcttctgaggtacacactttggacagccacattaaaaaggctagcacatcctcattcccttctctttgtaaatcctatttaaagctacatcttctccaaacttccttaattatattgcagtgccacagcgcatgaaagacatgctcacatatttcttttgagcatctaaaatagcttggatttgttgtaaccttcctatgaaccaaatttgattgagaaggcagccaggagtttgctaacttccacacaaaatgtttgactttaggtgggattttcatctttcacatcttcttcaaccaagttaccaaattaacaaattactatcattagattgatttatccctcttcttaattccaaagtcatgggatagctacttttaacagtgtattcatattcttactaaagtgccaacataccttgtcctctatttcccaccttgtggtgggtatgttcaaaataagttcagcatctacttggttgaaattaccatgaataaaaaagctcatctcatctcccatcatgtagcttcaagtcactcacataaagttaattcgacaaagaaggtttgtcataaatattaaaagtttgtgggtgaggcacccaagggtacctttaataatcagattttctctccattctcaatctaccaatgatagccattaacaataatttctttaccccaatgcaaactcctccaaacaaaagaagtatgagaatcacatttagccttaaaatatcattattagggaagtaactagcctttaataccttagcacaaagcattgtcggatgtcaaacacatctccaaatttgtttagctaaaagagcttgattaaacaacctaagatccctaaatcccgatccgcctttctctttcgttttacacagaattgaccacttacaccaatagatttttctttctttatctgaggaaccccaccaggagcgaactgccatcttatggagactttttatggtatttttggatagaaagtagcaactcatgatgtaggttggtattgcttggacaattgccttgataagtacttccttgcctaccattgagaacatagaattcttccaccctcttagcttattccataccctatttttgatgacatcaaaaatttacattttgcttttatcaacaaaggatggaaaccccaaatacttctcgtgattctcaaccaccctaacccgatgatctcagccacctcgtcccgaatatttgcttctacccgacttccaaaacatacctctaatttgttgaaattaacatcatgactaaaagcatttgtatatttattaagtaaagcacaaaattctgacaagcttcttgagttgcatcaaagaaaatcatactgtcatccgtaaaaaataagtgggaaatcgatgagccctgtcttccaaactttaagccccgtaattgaccc

SEQ ID NO: 239256 - DNA, 2651 bp, Cannabis indica
catggaacgaatggatagcggtaatgatgatgactttcaatatggaccatggatgaaaggtgcaaagctccctacaagtggctatgacagatatcgcacagatttcactaaagcaaatgcttggcctctccttactagattggctagaaattcaatttcttcctcactgccaaacattcattcacgtggcctgccacaaccgagaatactctatgatggggaggtcttctaacccacaccttcaacataacacacatcacaaccattccaacatttccatccctaacaaaacatttccatcgcccactaacaccagacttcaaccttcactaacgggtcttcatcttgctgcaacaaatatcagtacccacaccagacacaacacagttcaaacaccctcttcatactctcacaccacatcttctctcttgccttggacattggactcaactgctgcaataaattatcctcaaaccagtcacctaatagaccaaacgccctctccttcaactcaaacatcctcttgttatggctaccactcctagtactaaccattctaaatcactgcagatctttcccatatctatatgcatgatattgattatcattcaccttcacatcctagttcaaacaatgtctttgctacctatccaccatcacaccacactcaaccatcgatacaatttctatcccaacttcacacacatgtaccatctacaatcacctatgctactgcaagtcctaatgtcactgctcttttggatcaagaaattatttcaccaaattgtatccctaaaagaccaaatgaaaccatgtctatgaggaaaatgctaaaacgaagtcgaggtttgaatggagcgttatcatcttcatcaggggctgatgattttgtgcctactgttccgtttctacgaattctacaggcacctttactttaacagcagaggtcgctatgcaataccgcctaatcgccatgaaaatccttagtttgaatgctcgggaattgaggaacccaaacacattcaaacacttacgattgcttgctcaacaacaatcgccccatgtctaatttttcatggaaacaaagcttatttctaattcgtttactcgatttcataaaaatcttaattttaagaatagattagaggctccaaggatcggtctaagtggtggattaatcctcttatggaaagacaatgtgaatgtcaagctcttgaattatggttattcttttttcgactgctttatggcttttgaagatggcccaacttttcactttacagctttttatggtgcccctgctgcacaaaatagatttgctttgtgaacccttttaaaaagattggttgatgtctcacctctccaaccgtggctcgtaattggtgacttcaatgagatcttatccaatacagataaacaaggtggtcccctccgaaatgaaagtctaagggcagactttcgtgcctctcttgaccactgccacttgaatgatacaccatatgatggtgatgcgtacacttggattaaaaatcgaatagcagcaactactttaaaggagtgtcttgactaatgtgttatcaataatctttgggataatgtctttgtggttccatggatctctcattttggactactttcactcagactaccgtgcaattgttgttgtcattgctttacacaatgaacctgcacagcaagttagacgaaaaaaccgattccgctttgaaaaactatggtttgctgatgctaagagtaaggacataatttctcaatgttggattgatcagtcctttaataacccgatagacaatgtgctaaacactcttgactcgtatgctacaaacttacaaaaatggcacattggaaaatatggtcgcatgaagaaaacaattgctgaagcacaatctagagttagtgaacttaacaatactttgtctcgatctaaccacatcatggaagagcttaaagcctctgaatcaattctagatgatttattagaacaagaagagttatattggcaacaacgctcacatgtagattggatgaatttgggagatagaaacacaaagttctttcatgcaagcctaaacaagacaatccaacaacataatcaaattcctcatcaacaattcaggccaaaaagttcattcatgttcagacctggtcactgtcattgaaggttattttcagaatattttcaaggcttctagtacagatgatgcagccttgttctctgtccttgaagcaataccagcaatggtaactcctaaaatgcatcatgaccttaccaaaccttttactaaagctgatattgaagtagcactgaaaagtatgagtcttgataaaagcccaggaatcgacggtttgtcagtaatgttctaccaacaaaattgggatttagtgggtgatttagtttccaaagttgtgttgggggttctcaatgaaggagctgatcctcccagattaaaccgtaccattattaccttgatcccaaaaactaaaaagccatagaatatgaaagactactgacccatcagcctttgaaacgtaatatcaaagctcattaccaaggttctagttacaagatttaaggtggttctttcgcatgtcatttcagaaacacaaagcgcattcttaccaaactgtctaat

SEQ ID NO: 239257 - DNA, 2256 bp, Cannabis indica
atttattatgcacatattttgtaataaaattaaataatgtatacaatattaaaattttcccttactaatattggtactcgtaaaaagcattaaatattttgaaaaagagaaggacgaatgcacgatcacatcattccaagaaaaactataaacagtaatgaattttgtataaattaaaagagagagtgatatcagtaaaaaaaaaaaggggggaagaaaaataaaccactgaagtagagctcttttcttcaacattgaaaatcagatagtgaatttgttgttgaaagggaaaaatgtcaagccacaccaattccaacgaaggagaaaatggaaaggaaaagaaccttgatgatgttcaaccaaagcatatcacacttaaagtgaagggccaggtttaatttcttatgttttattagttttagctttgtttattaggtggttaggcttgtttttgttggtttaaaaaatgatatttttcttcgttcgtttttcccagttaatgaaaggccaaacgtcattttgtgatattttctgtgttaatgtatatattgagggtttcctcacaaagttccttttttttttgggtgaaagggtgacaatgaggtgtcttttaagatgaagagaactgccccgcttgatgttcttatgaagcgttattgtgaagaaatgagtttggacatgaaatctcttgcattcctttatgatggtcgccttgttaaacctttcaacactccagaaaaggtatcccctttcaaattgattaaataatactactgttaatatatgtgtttttctacatacatatgtttaatttaattagtttataatctatgtatgtttttacagttgggaatggaagaaaatgacctaattgatgcaatgctacacatgagtggagggtgctaattttatttagagttaagctgtaattaagccaaatattgttgagtgagtccgttatgtgttaatttccacctgtagggttacaacttacaagtactgctgttatgatctatatatatgtgtgagtgtgagttagaatggtttaatttctaatctttttcttacttttgaacatgacactacatctgtttttaatgttgtgacgcccagggtttccttcgtactagctacttgtttgtcagtgtcttcagttaatcagctctgctttctaatttttgcaagaaattgcttttttatttattttttctcttcttcggacctaattgtattggccttttcagatttttttttttgataaaatggagaaaacacattcataatgtcatcaccctcaaaaaaatttaaaatggaaagagattatttcacaaaaacataaaataacaaaaatacggtttcacggaattttaaatatttttacgatttttttgatattatttacataaaaatatgatcttttaatgttgtaattttgttaatttattgtgttatatgtatgttattttatgttgttattttgatattatttttatgttacttttatgtagttttttatgttatgttttagaaaactctaaaaatataaaaaaacattctttgaacgtaaaaatgtaaatattttacaaaaaatagtgccttgtgtaattattctaaattaaaaagtgtataagagggttgaatcttaaatataagagtgaatgagtcgcctttcaaaactaaagtgttttttctttataattatggggtactcatattttataatcaattaatagcttaataacttaaaagtcctagttgaaagtcataacctctttcttttttccatctctctcaccactaagataggtggtgtttagttacagaataataattactctttttttgttactattttattaaaaaaaattaccaattaacaacttaaacaaataaataatatatctttacatatctcatattagaaagctccacttagtaattagtattgctttgcaaaagatttcaaaaattttgaaaccctaatattaactattactatatattatatatagggttgttcatccgatccaattcgtatattttttatcaaacaacatctaattcgcactaagtgcggatcctaaattttggatcaaatctgcagaacagtctaaattcattccgcaatagtgcagattggatcggttactttgtatcggtcacatttttttaatattaaaaattatttaatattttatcaaaaaaattaaaggcaaaaaaaaaatcagccacatttttttaatgttaaaaattatt

SEQ ID NO: 239258 - DNA, 1319 bp, Cannabis indica
tctgcatcaatgacatctccgtccggtccctgggatgatgaatctgatgggccagcttcagcaccaggggtaggccctgcaccaggggcagcaccaggtcctgcaccagcaccaggttggttgtatagggactgacccagctgcatcacttcctggttgagggcagcaatggcatctttaatggtttgggtagatcctcctgaaatggcttccttgagttctcctaatttggcctcaaccttctccttcacttcaccaggaaccttgtctcccagctcctttagctgtttctctgtctggtagacaacggaatcagcctggttcttcgtgtcaattgcttctctcttttccttatcctccttcgagaatttctctgcttcactgaccattctctccacctgtaaatttcaattcatattcagtcactacaaagtaaaaaaggcatcaaatatttcttaaacctaatagaaggctatgaaaaatattgacaagactaatatacctcatcgctgggtaaagtgctagcaccagtaatggtaatgtcttgcttcttcccagtacccttgtcaacagcagcgactgagaggataccattagcatcaatgtcaaacttgacctcaatctgaggaaccccacgaggcgcaggtgggataccatccaatcggaagcttccaagagacttgttgtccctgacaaattctctctcaccctgaaggacattaatctccacacttgtttgcccatctgcagctgtggagaacacctccgattttgatgtgggcagagtagtgtttcttgggatgatctttgtcatgacaccacccagggtttccaaacccagtgacaatggtgttacatccaacagaacaatgtcactgacatctccagccaacacaccagcctacagtaaaaacataggaatctcaatcagcatcagaaacaagggccagaaacaataattcatgttaaagatgaccccattgattttgcattagaaattgataaataatcacaaactaaatcacacagatcattaataaggcccacctgaactgcagcacctagagctacaacttcatcaggattgactgtgacattggggtccttcccactcaatttcctcacaagctcctggacagctggaatacgggttgacccaccaactaggattacctcatccaagtctttataggagagtttagcatccctcaaggaattttcaactggtgttttaagcctgtaaaataatttcaggttaaagttatttgacttgagagagagagagagagagagagagagagagagagagacgtaccttc

SEQ ID NO: 239259 - DNA, 1391 bp, Cannabis indica
gttagttaaagactacgattgtaaaattctctatcatcctgagaagatcaatgtagcaacaaatgccctaagcaggaaaggactcgggcatgttttcaacacaactatgatttcccctcaattagcagtagatatggtcaaagaaggtattgagtttgtagtcagcagacttaataatttgacacttcaatcaaacttgttaaaaataattagaaagtctcagttggtggatctagaattaatgaagattcgagaaaaagtcttagctacccaagctaaagatttctcagtatcaactaatgggatgttactttataaatcccgagtttgtgtaccaactagtgttgaacttaggaataaaattcttgatgaagctcacaccactccctattcactacacccttagttgtttaggttgaatttttaattgacgtattaaaatttgatggggtgaaacaccaattgggacaaggtttggggacagaaaatttgactccgtccaattctctctccactatatgcagtaatgctacctgtcctcagattaatactaattcaaatttttgtttggttagtttatcctgaacactttttctttctctgttttggaactaaaatattttttttgtcaaaaattgaaaattgaagtaaaatagtaatattactaaagaatacacaataatttattgatatatataaataatgcatagataaaagctttttttttatgtatatttactctttttttaaataataatattaatttgtattatcatttaatatttttttgacaaatcatttactttatttttataaaatatatttttttaatgtatttttataaaataattttaatttacttagatgaataataattaaatatgtaggtttttttctttttttttttttctctttaagatcttataaatataatcttaaaaatgtgtgcatgaaaattattgtgtttgccaaaattattaaaacattatacacaaattatgggtgactattgaatggttatatttttattataaaccatatggttacattttcttttacctgtaatagcaggttacgaataggtaaaaattctatttttagaattaattaattataattatctattttttaagtaattaaataaatatttaataagaccttttttagctaattaatatttataaataatttttttattatatataaatcgatactataattattttaacagttaagccatttaattatagtatttacaatttttttttttacaaaaattaaagcttatttttatataaattaaaattctgtcctaataataaatttttaaataattaatttttttacaattagatgatgaggcctcaagctagtgctgggcctcaagctta

SEQ ID NO: 239260 - DNA, 2810 bp, Cannabis indica
taattaaagggtaaaataataatttgaccaaatacaattacgaacaaagacattgaaggctaatcactagaattgattatatgaatggacactccagtaaaatttagtaaatataattctataattactaagagttcaattctatatttatagtggagtaatcatggaattaataaacaaagattatttgtttgatgagactcaataaataatttagtttattggagcaaagaatataagtctatggtccccaaattgccacctcaaaatacagtcatggaaagggatacatagtggtataatattgtttgaaaaaatctattttgaattagcaaaatagtgattatttatttttgtaaaaaataaataatttttcaaattaattaaataaagaaaagacaaaagttgttaagacaaaatttatcaagattatatttgttgagacaaaagttgtcaggataaaagacatcattgttttcctaaataagacaaggtaggggcctaccctagtgtagggtgttcctattggttttatattttttggttaattaattatttaattaattcaattagataaatatttgaatttaaaaaagtggttaaagatgttatccaaatttatacacgatgatgtggcatccatctaggtgacacgtggaactgatttcataacctagacaggcaatcctattcctaataagtcgtatagggagatttgatactcaaggtcataaacagaagttgtgatatctgagcagagtactcgaagacacccgaccatctttcgttaagcaggtggctcgtatgcattgaccaggggatgcgggttgaaaagcgtcatagatatattctatatatcttcatgcttacaagacgacactatccctaaattcatgggatagattcctattattgagtagaaagaaaacctgcataagtttactattttgctaattataattatagaaagtaaatagatttcccattttatttcttattgaatgtgagaaactaatttgatgtaattaatccctataaatagtggactcatctcactattcatggacatggatttcatttagagaaaacactcaacaaagaaatctagatttaagagtcaactactcgtagatcgttgtaagagctttagagagaaatcaaggctttcttacttctcttctcacaagtaaatacagctaaacgggagtaggctattaccaccatcatgggcctgaatctctataattctagtattttctttatttacattatttatattctgttatttgatttttcttaattgcttaaatttgactcattatcattggctaaaagcgaggtcaatattttggtgctttcattgagagtaaagaaacacaagtctttgttttaagcctttttcaggacacaaaatggttgtacaaatttgaacatgcagacgcctacaaaccctagagatccagctaggacagactctgctctgactaatccttaaccaccaataggcccacaaactgtaggtcaatgagtgactacccctctggctggtttcactctgggtatgcaagaaacttgaaccaccagcactcggaccaagaaaactgcctccgatattggaatcccatctgctacgaattctcaaaggtcgattggcaatgacaccgaactacaaaacttgcgagctgcactagggcacatacaaggccacaataacacttttcattataatcaacaagatactagagcaactataaattttttcattgaagaatggagggatcaagagatagaaatcatgagagcccaataagaagtgattgacaatcgatctaggcaggccgccgtactaatcaggaaagcctattaagtcactgggcaacaaccagtagcagatgcttacatccctcttgggccacaacatgggccagaataatttccagctgaacaaactcaaaaaacccaagttaacagaccgtccaatcctaggccgtagagtcaaactgtgggccacatggtagacaagcaagttctgacaaatcgttacttgggaggaaatgatcagcctaacatccttcctcatacggaaatagtaggccaaccccttgctcataatggtcagacacagaggcctccaggaaattaagcactgtgcatgacctcagaaatgatttgaatctcataagaggactagatagggaaagtatccctcttaccgttcagtcaaataatacagtttactttgtgtccggcccagtcctaagagatcctcatgtgacacaggtcagccaacaggcaggtcaagttgatccattggtggaagcacaaatagaccaacttaacaacctcattcaaggcctgactggccccaaactcatagatttagaaattttctggaccaagggatcaccattctcacaagaaatcaatactcttgacctaccgcccatgttcaaaattccaacatgaaaaatgtatacgggcaaagaagattctctatctcacattaaatattaagaaatacaaatggacttacaaggtgatgtacagtgtagaatcttcccagctactttggtagaggccgcccagcagtggtacttcaagctagctctagggaagttcaattcacggaattcttttatgtcagagtttcacgcacaattcgcctcttctcggcaactcccatctcacttagaagacatggtcaaagtgaaacaaatactaggggaacccttgagagcttacatcaatagatttatgactgaagctacaaaagtggaaagactgaccgaagaagggaggctggccgcaat

SEQ ID NO: 239261 - DNA, 2184 bp, Cannabis indica
aaatgtggcatattattattagtttaaattaatattaggtcttaaatattttaatttaataaataatataaaaaatcacttaacacttagaatacttcacatcactctgatgttaggtactttgtagttctcaataataatcctcaaaattttaagtataataaatgaaatttttagagaatctgatatgatagaaaaaatctctttatataattatgttctctatataattgatcacaactaagctagaaatattttgtttgtatccaacattagtacactccatgataacctaatttaacgaactactactttaccttattatcaacttacttattatatactttaaaaattagctatgtgcattgcacaggaatcatgaggaacaaaagcatgaactgatgcagtgaaacataatattatatgtgtatatatatactgtatataaaaaaattcaatgaacactacacctagctattttaatttctatattataaatgtataaataataaaactgttgttgatacgatatatcactatcagaaagctttcttttgccctttccagttgaaaaaataggttttattttggccaacaaattatagtaatatactttatttattcaaaaaaaaaaaaaaaaacgattctttttcccaaacaatttcacgttggtgctggttctcctaattagcaatgtttattaaagtaatcactcaataataaataaaatatagataaagctggtgtgattaatgggaactgaagaacttgccgtcgaattgtctcccattaggaaaaccaatagtggatattacagataatcattgaaatcactgggaatttaaatactgattttcttatgttaatattaatttaaactactaacacagctgtatatatcgtgcacggatgcgtacgtatttttttactttttaaaaaaagagcaaataatatatgaaatttttttttgtttataataagtcattgagagaaaaatttgagtctgaatttctgaagaagaagaggagaaaaaaatgccaaactgattctgttaatgtcaaccatattatacttaattttaaacagaaacatactataattattttggcacatggcatgattttgatttgcagatcctttgtatatgtatttatattaacaagtctagctattggatgaatctctacatactatatcaatgtttccgaggataccatataacgttatatttgaatatatatatatcattatataagaatataatggaacttaaaaaaaaatagaatgaaattaaaattaaaatatataaaaaattagtaaattttaggtaaataccattttgtataatctgttttgcaaaagttactaatttcaccttctgttttgttaaatgacataatggaccctgtattttttaaaattgtacaaataggacccttaactgattttttgtcaaaataaaacttaatagtaatgtgatttagagatgttatgacaaaactggttacattttctgtatctgttaatgttagaaattgtctaaaagttgattatattaaaaaaaaacattgaaaaactaagctcagggtcctatttttaaactattttggaaaatataagctctattttgtcatttaacaaaacagaaggtccaattgataacttttgcaaaacgtggtccaaaatggtatttacccttaaattttttgtcatcttgtattagaatggccgttttccttccatttcaattcaccaaaacactgcaagaaaaatgactttatgttaatgtcctcagtattattttgccgatgagcttttatgtcggtaataattcgtcggcataaggtgttttgccgacgaaccaccttaactcgtcggcaaaactatttatcccgatgaattaattggtcggcataaaatcctcgccagcaatgatttatcagttgagggttctgtgacgaagttttgccagcaaaatattgcgtcggttaaacttttgcgccaattcttgcctaatttttatttaccagcaaagttttcccggcacaatattttgccagcaaaacttcatcaataaaaaaataattttaattttgacgacgagatatagttcactatcaaaataattttttaaaaatatatatatttataataaaattaaaattaaactaaaactaaaattaa

SEQ ID NO: 239262 - DNA, 4263 bp, Cannabis indica
tgccccttgaactttcatccatgttagaaattttttactaaaattagacaaaagtccttaaatctaacaatcttaatagtttatggggaatttttaacggccaaaaaagttcggggggcaagattgagtacatgtcaaagttcgggggaaaaattgctaattaacctagatataatatatgtaaaattttataatttttatatttatgcccaattacagtggaatgcgacatatgatctatttagtaacttagataggattttataccttagaaatagtaatccaatatagtttgacatttagaatgtcgaaaatgttcagggttatgatttaagtccattttacccctaagtacgttgattactttatgattaagcaaggggtagattggtctttttactctgattttgtctttagtgttttgaatggatttttgtagtaaaatcatttcttaattatataggttatatgctaaaattaggatttaatatccttttattcacttagacaaaattaaaataaaaattattactctttctcccctagggttcggccaaaccaaagccaaaagcaactaggattttttcaaaattttggtttatttctaaggattctagcaaaattctaagtggctttagtcagtttcaagctcaaggtaacctgtttccttctcctctttgaatttcatagcaaagtttgagtttttcatgtgaatttcaagttttagtttctgtatagacttgttatgcttcgggtgtgttttatatgatacgttgagttagctaagtttgttgtggctgttatgttgcttgttgttgagcttagacaaactttgagctttgaatcttaagtttttctctttaatggctgaatttgagtgtaagggtttttccttgtgccttttggtttttatgtttgttgtggcttaaataggtgttctagaagatttagtatgatttggggaaaaattgagtttgtggtgaagtttttatagttttttgcggagaattgattaattggttctgacagtcctatagaaccggttaattgtttccctaatcctaggatctggtttttcattttgggaatccaatttaccgattctagtagtcttggaaccctatttcttgcgttttagtaatatttagggtattaccacactatccattgatatggaaacttctaattttaattttaagtccctcagaagtgatttagtgtatcacttatcaattttacgaattttgtgacttaagggcctgtaaatcgtcgagcagtagtttccattcaggttgactggcacacctaaattcaaaatcaagataagattagtataataattgcatatgtgatcacatgtttagcgtgcatgtttatgaatgcttgttagataacatatcagtaatgtcattattagtgtacatagagttgcactgaataccaacgaatatatatttcgcaaaatattaattgacgctatcacatcagtacgactagagtaccgagtataggctgatattatggttaataatattgtcgtgcaaacattctagactcagtacgcgtttgacgcgtgataggattataattgggtgtatggatgcctagttataacctgtttatgtgttatgattatgtttttcttactaagtctgtcgactcacagatattgtttgcatgtgtaggtaagggcaaggctaaagctgaataacagtgagctcaagctaataaagattgtacatatcgaaatggttagacctggagtgttagatcctcgggacaacaggctgtattttggtggttgctaaacaaaaccttttgaagttaaatatttagtaatacaattgtaaattttaaagatagactcctgaattaagtaaagcttttgtttatttaattttaaaggttaatcttcaaaattttaattatccacgtatttctataaaccctttgattagtaaagaaatttacagcattaagaaatcataataacacacctaatctaatagggtgttacagtagatctccttctcagctttctgtaacaatttgaatcacccaaatcgtgttaatattgagggagttatgctcaaaatatagaagttgtacaaggtttcgagaaggtcactcggtcatgacaattcaagaggttagtccacaaaggcaatgaaatgtcacacatctaaggacatctcggctttctatatctccttctcaactttttatagcaccttgaatcgctaaaattgggttaatattgagggagttatgcccaaaatatggaagtggtacaaggctttaagaaggtcactcggccatgataatttaagaggtcagttggcaaaggtaatgaaatgtcgcttggccaaggacatatcatctttgtagatctccttctcagctttctatagcaacttgaatcgcccaaatcgggttaatattgagggagttatgctcaaaaatacggaagtggtacaaggcttcaagaaggtcacttggccctgaccatttaagaggtcagtcgacaaaggcaatgaaatgtcactcggccaaggacatctcagcttaagctctctatagcagcttgaatcatccaaatcgggttaatattgggagagttatgctcaaaacacaaaagaggtgcaagatgagtaagatccacttgacgaagaagccttggatcatcctcaactcacctagcaagcacatctcgagaagtcactcggcaagcactttttggaagtcacttggaatgaactcttgagaagtcactcgtcatgcaccctcgggaagtcatttggccatgacattgcacatgtcactcgaccaagaccttgcaaaacttggtggaatattcccaagcaagaggagagtgaagcgacaaggatgcgatcacaaggacaaggcaagcacacaaggagagtgaagcaacaaggagatagtcacaaggataagataagcacgcgaggagagtacggtcaggaaaaggatattgtcataaggacaaggtgagcacacgaggagagtacgaccacaccttctgtaagctctaaaagtaaagaggtacgaaaagtggaggtactgcaccggtaaagtgttgggattttatgccctaaataaaactcattttaatataattttatttgttatcaatagaagattagaagtcatttatgtttacatgtatttttcgtgtttatgatttattatagaatttttgttaaatctaaaacatatagttattcacaattacagtgatgttaatataatagaaggtaattgtgattatatacttcaaaagataatgtctcatgattcacaacatagtaagtctataactaatgttaatagagaattgttaaaaagataccattggtgtctaatatatactcttcggtgtcatactactattgttgtaattaagtattgagtctcatatactttacaaaaataacttttagggaatatcagtaacaaatcatggagtgccatttataaaaggtgttgaccactagctagtacccaaatatattactacaaatttccatataaggcacgtttgaatttacaaacttgtgtagatttttactcagtttggctttatatataagtagtgtagttgttaatgaattataattgatatttaactaattaatggcgcttgtgatcatgatcatgatgtgtgacaagtagatgataatgatgcatatcagaatcctcttaccatttctaaacgcttactcattcgcatgtgatagtgtgttgatggatccacatatatatcttgttacaatatcgttgttaacatattttatatctatgtatattttacatcaagccctttgaccttttaatgtgtatcaataataatcataaaaactacatgtgtgtatgtatacataacaaaaaacgaactatatatataattttttagaaagaagttatcattccttacaaaaaaaaaaaaaatgatgtatatatatatacttttttctttttggtaaaatataaactttaatatatatatatttatttgtacgcgttcaaaagttgtagatattaatcattttacaataacatgtgcatgtttgtccagaaattttatcatatatatcctagcagtcattcaggattgaattttataaggtgaatctagttatacatttagggttcgtttggaacgtcgtattaggtcgtattgtattgtattatattgaattgcattttatgcaatatttttatgtaaaactatatgtggtatta

SEQ ID NO: 239263 - DNA, 2565 bp, Cannabis indica
ataaaatactaaaactcaaacattaaaaatacaataaaatttgaaccaaaacttaacacacacatcagaataaaaattaaaccataaatgagaatttatattactatttttttttgaatatcagtatttattaacaacaaatttaatattttaagtatttatgtcacaaattttttagtagtaaagttaaaattttaatataattttatgaagtaattatcattattaattaaaatacacaatttcttttttatatttaatttaaaatattttatatatccgccgggcgaaaaaaaaaccgacatttactaatttttcaataatctatttaacatttaacaatcaatcaagtaccaactacactttaaagtagaggccgtcaaaaataacaaaattttacagcaacaattaaaaatacatttataatgacaatattctgaaatatattataattataggacatgatattttaatcagtgatttaagatgtaaaagaaattatcattggaaataaaataaaattacactatgcttctttttaaggaagaaatagaaacatttagaaggaagaaaggtaattccaaaatttgtctcataccacctatagtagatatgagaagctgtaaaaaagtgaaaaaaatattaaagcatgaatcatctgaagatatcagtaggttccgaaaacaaagaaatgttgttgtaagctgaagcaagaccacactatttcctgtccaagaacaagtcattaatcaaaatccaagcacaggttccactgatatatgtgtacatttatgtgtgtaaacaaagctcattgaagaacaatatcaatgttgacttcagaggcttgaatgtgttttataaagaattctgaaaaaaaaaaatcaagagagaagagaagattcagctatgttactaaccttccgttattggctcttggaggaatcagaccccttttctccaggcttttgtagcgatccttagcaaggttggaacacgccttgtgcaaaaaagaaaaaataaatcagaattcttcaactagtatcgcaatttgattgtacatatttactgaagccctaaatctaatgtaccttgatcttgcgaagagatccagttatttcttcagataataagacttgcgtttgggcaggctgaaatctgcagcaaagaaaataccaagagagttaaaatctcagtattaagcacagcaatctccagagcattacaaatttcatgtgttcatgcagaaactagtttgaaaaaatcttatctgtgaccgagaagatagtaagaaaaatggaaataaacaataatattacacttaaacttcacaatccaagcacccgaagaaaatgtagatctacataagttaatggaagaagaagtccatccactacttaaatttcaaaatattcaaaatttcccacaagaaactacatacctgtgcttccccaagcgaggtggacatgactttaatctttcttgtttagctacaacacgcctggtatgtcttttttgcttctcttcatcttctttggctatttcttgaaggatatcttgtacactgatcaaaagagcaaacagtattaatatgtactcttcacaaggctacttgacaaactgtctatagaatcacctgtcaatttctcgagaaagattcacaacttttgctgactctgcatcctttttaagctgttctttacgtctagccctcttatttagctcaacctgtgtcaccttcttagatttagcagacctatagcagggtgaattcaaaaagatgagtacaggagtactgtgccatagatgacaaatagaaagggaaaacaagacgcaaaagaaatttaaatgagcactgttccagaagactttcaaatatagcataaaataaccacatgagcaacatctaaggaacaatcttcatcagcacaatcctctatgcaattattaggaaatcaatttgcatgatcaaactttcaagagcagtagtaaacaaatgtgagcaatgacatccctttcaagaagatgaagttaaccttttctcagctgcaccatcctcagtctcaccgtcattctctggatccatatcatcatcactcccatcatcagcatcaataaaatacatctaataaaaaaaaagtccaagaaaaatgtgggtattcacatctaaacaaaactagaaaatgcaaacaataaataacaaagaccttgaaaaaaatgtggctatttacatctaaaatattatatagatatgcaataataaattataagggtcgtgggaaaacgtatccacccaaataagcaaaagggggccaacttagcatcattaaaagaagaaaaaagggactcacatcttcttcattcacagcttctcctaaaactgtcaatggaactggttgaggtcccaactcctttttgtagactttctgcatttcttctgcaacagcagaagccaacacatcctggattgaataggaaaaaaaaagaaaaagatggtcaaatatgtacaaatgacttaagagtcctcccacggaaaaaattgtaaaggcaatcatatcaaaagaatac

SEQ ID NO: 239264 - DNA, 3636 bp, Cannabis indica
aaagacaggcatattcagtttcttatggagaaactttaaaagacatcattcgatatcagatggtgaggaagacaggcatttttttatgattttgtatttgattaggtatagatactaaaacgttaattaaccaaccattccattccattccattttagaattaaggcatagaatggttttgtatcaataaagaaagagttttacatttccattttgatctgtggcataggtttgaagtttctatttctgaccacaggtgtaaaaacgtccgcataaacattgttatttgttataattattcttatttttaatttctgtcaataatggttgattattgccaccggactgatcggaatgattttcttagttcaatcccaatatgaatatgagaaatcaaaatgcggggaatctgttacctgtaagcaaacgaaatactttgatgctattgtgtttttatttgacatagtaataaaaaagttccataattaaaaatgggttagctatttgtagaacttgaaaaaaagagagattaggtcttgttctcatcggtccatgtgtcccgctcaaaatagacaactcttttaagctctttcattaatttatatttgagttgagctcttctcgtccatttgagctgaactcttcatgtaaaattgagctgagctcttcacttttagtgaaacatgtcgttaaagtatttcttgcaattaatctttatctaacactacgacataattaaacaaatgcatcaattacataaaaatgtgatgcatataaataactgttatttaatttatatattggcaaaataccctcacaattgccctttaataaaagcaactgagcttagttctcttaagctagaagaaccatcatcattttttacattcaagcaaaatgtttgcacaattgcccctcgatcttaaggggaacggagctcattactcttcaaatttaagaattactgtcattttgtattcatattggggtttttttaattctattagcatcctctgcccttattggggtctttacctcaattgggcttctttgccctgacactgaaactctacttatgccacaattgaggtcgtccctagataattgcctttcgttcttagagtaggcctggcatgctctaaggatgaatatgaagcataacaacattgaatattgtacattgtaaaggtaagacttttactattttcacagccttgaagttcattttgttattttgttttacgcatagagtaaatatgagttctttttgtgctaagagtatatttgactctcttttgtgttcatggtacatttgtctttttttgtgctcaaagtacacctgagtgttacatatgagttttttgtacctagagtgcatccaagtcattctttttatgctcaaagtgcatctgagccttcttttatgttcagagtacatccaagtcttattttatgttgcttaaaaccaatttaatttattttattttattttatttatttttttttttttattgtcttgggagctagagctttcttgcacaatgcactcccatattataccctttcgagcttttctgccttatgtttagcttttgtctttattgagccctctcactattgagttatgctaatattgagctttatttagcttttgcctttcataagtcacgcctctgccatgttctatctgttaaaattttataacctaaataaaccttattttaatataatcttatttgttatcaatcgaaggttagaagtcatttaagttaacatatgattttcatgattataattcaatatacaattttaaataaatctagaatatattattattcacaattacagtgctgtcaacacagtaaaaggtaatcatgattatatgtttcaaagcttataatccatgattcatcagtacactagatttatactgatgtgataatcaacgataatgtttacttacaccttggataaatgttatgttctttctagagcattggtaaagtatgctagtattggatgtatggagtatacattggattggagcgatattgaatttggtacatatattataaacttacagttatatctttctaagtcaatatcatcaagatgatatcactcttaaccagtactatgtccacactgctgaaccgacataatggttgtgtcgctatgataggtccaaaataatttacataattttcaaaagatttatctttattcagcaagaaatcttatgtaacagagtcaacaaatttaacctcatacacatcatcacatttaacagatttattaacaacattaaaaatatttgactcattagtcatatttccaaatgataatttaagaacatcattacgtcagttaattattgcattagatgtggctaaaaaggtctattcaaaatgatagaaatttgagcatttatgtcttcaacaaaatgagtatcaagaataatgaaatcaactagaaaataaaatttatctacctttatcaaaacatttctatgatacctctaagaatttttacagaccgatcagctaactgaagtgtcatagatgttggtttcagttcccctagaccaagttgcttataaatagaataaggcgaaaaattcacattagctcttaaatcaagtaaagctttgttaatcacatgatcaccaataatacatagaattgtgggacaccccagatctttgtgtttaacaaggcttttatattgaattatagagttggcttgttccgttaaaaatgtctttttctggaacattggtttttctttttgcagtagacagatctttcaagaattcagagtaggcaggtatttgtttaatgacatctaagaaatggatatttatacttacttgcttgaatacctctaagatttcaccatattgactaccttttttgactaggatcaacctttgtgggaatgaagctcttggaatgaacgacaaagtttgactcatttcttcaattgagtctttggaatgtgagctttcaggctgactcttttcattttcttttaacgaatcattgttcatttcagtatcaggttgaggtacataatcagggttttcaaatatttttctagacataaggatagaaattgcattaacttcttcaatatgtctagatgtacatacctcgtactgaatctttagattgggaatgggttgactgggaagttttcccttttccctttcagctacagtagtagcaagttgaccaatttgtgtctcaagccttgacatggattgagaacttgtgtgtaaatctttttaggtggtttgcatgcacttttgtagagtatcctctaaatagttttctttgttgttgaggatatggcatattcggttgggcatgactctgattgggtgagttgtattggtacccttggttcattggaggctgattccgtcttcaaaaaaaatttgaatgatttctccaatttggattataggattgagcgaatgggctatcaaatgaattcccataagtttgaagagtgttcgcttcttcaaagaatgccccttagtatataggcaatgatagacaagactggacaacatgacttgtactataatatagagaacaaaattcattccgatgtatatgagtattcctcgat

SEQ ID NO: 239265 - DNA, 1972 bp, Cannabis indica
aacttttccgttaaataatcacaaacaatgtaagagagatattatacacgttgtaattggatgggatgcatacaaaaatgtaataaatacacaaaaacatgtgtcaaataaatataaatattattagggaatcataattttcttttttatcaaatccataaatattcatcagacacatttttgtgcatttgatacattgactacaccgattttcacgcgtttacagaattatctttaatcaaaaataatgtagaatttttaaagaaatatcttgagtccatgacattccttcacgatatgcagataaaacaaatgttaaaaagcatacaaaaactcattctcatgtctcaaacctagcaaatggcaatgtggatttaagtttacccaagttcagtgttaactctagacaaaccagtaatcaattgatgggatcttaacaaaccaaaaagcaactgctatcaattcaaggacttttcccttaggtacatttggtctactgttatgttcttaaagcatttttccacaattatggtagaatgtacatttttagatgaatgataactaccttgccttgtgtttataaaaaaaaagaaaagaaaagaaagataacataccttgcgttgtaaagttccaataatatgatcaattcgttttacatctctaaaatcaattgcctctttggcaacctttggttccaaagctgcactgtcattttcggaatcaactgcatcagacataacacgagtgagtattaaaatttacaatacagaactgttaatacctttgggaattctaccagttgccaaggcccaagattaaaacgtccttagtccaaaacagcaaagcaaagtaccagttgagctcattacttgctatactaatattcaaaatcacaaaaatatacagatgcatagcacagaacaagtatcatcaaactaaattaaaacatttatgaaccctttcaaatacctaataaaaaaggtgcaaaacaagttaataagatgatgtaccatatcctatcttctctgactttgaggcagctgttgtaaaggcctttgatatgtagtacagagcacgcccctgcatcatccatagacaatccacattaaacatattgtcttctaatttcgaaatactctatgaaactgttatgtagtcttccaaaatgtccattttttcaaaactaaaagaacactaacaattgaatcgagacaacttcaaattacacccttcttccacacacatgttgaaagttgcaggattggaagttacccgtgatagtgttgtgcctcaaagaaatcattttcagttataaagatataataagaatacaacataactctgaaagaataaagcacctacaactcgagcagcgaaaacattgcaaagctgtggtgcttggtaaatcgacccatccagaacataataagtcagcatcagtgtaactttctcaggtccatccctcttttgcttacggaaaacgaaaaggtgaggctccataacttcactcaacatgaattctatgccagtcattttcctgtgatccaaacaaattaccgtcatcatcaactctattttgacccaacaagttggagtcaatctcaagaactaaaagatctagatcatattaatggaatgctaaagttataaacattttctcaatataacaaaagattataggattaatgagtctcaaattaaaccagagaatcagaaacattatgctccaaatattcatattgacccgaattgaaaaatcccaagacaagttttagattaccggcttccagataagttcatatcactaaatacaaatgtctatataattcaaaagtttccgtttttcccttccataatagaaattcccttcgcatcaaacccaattttcaaaatttcagcaattaactggaaatttacagagtgaaaacaaaaaaaaaatagaagagttgaagaaattacgagagttgggaga

SEQ ID NO: 239266 - DNA, 1768 bp, Cannabis indica
aaaaaaatacaaatagatataatgcttatttaagtaccactacatgtatattaataacatcttaaataaaataaactatataaatttatattatataatatttaaatgttccttaaatttaacctttaatctattattaattttctaaaatattaaaatttatatatattatctagtataaatatatatcttttattatcaaatgaatgtaaatttgtcgtatatgcatgaaaacattaatatagaaggtagatctttcaaggtcgaccctacaacgaatccacgatttaagcaagagagactaattatttgacagaactttgcatggatttgacacccaaaggttcgcatgatcatatagattccagcatttccgatcaggtgacttctctcccctctttcttttaacaataattaatgttagaatttgtgaataagataaatgagaattgtaaaaaagtaagataaaacagtaaataaaatactatgtttacgtgattggaatgttaataaacattagtctatcacaaaattttaaaattatgaagattttacaactctgtattgtgtttacatgaactatgaaaaattgaaccctttgcatgaaaaggtagtgtcatatgtttagtgggtcggaatgatttggatcccattagagttttgtacaataacgttcactgaagggacaaaatatattatatatttttcattataatttgagttatagggccaggtaggcgaggcctaattctagtgagagctacctgccgcacaagatcgtactattgacagtaacaggtgaggcgtgcgccaccgttgggagagaggaatgtcagaatagtagtgtccactaaaaaaagtaatttggtttttgttgtgtgtgtctccaagacctgacagatctaggggacaagtcgctagatatcatgggattgtgttagagatgtcccacataggcgacctccgacattgtgaattgtcccaaacactctttcatattatgtttctagatgacccctctctactataaatatagtgttttttgtcagtttgcagctgatatatatttttttagtgtcgatttttaaactggcgtatataccgtacacgcaaaacactatattatttagagtcaatttcaacagtcagtacaaaaaattagcgatggttgaaagccaatgcaaatagtataaaagtcaaattttacagcatcggttttgtacttatacaacaaaaaaaaaatagttccaagatattcatctcgaggtcacacctaaatctaaaataaatacccaaaatttaatgttcactttaattttacagatctaaaataaaaatatacaaatactatacaaatacacatacaaagaaaatctaaaataaatccaaatacaaaacacaacagccatggtcatgaggtcgaaacccaaaacaaaattgtggtcatgctcttcctcttccttcccaactaagaaatctgtacaaaaaaaatgtttcacccacaagagagaaagaaagagagagcacaaaaaacttagaatggtgacgcaaacatggtgtcgagatgaaggagaaggggagaggccattcatggcccataatttgttcatcaacgagtgggtggcagagctggtgtcaagatgagatagagaaagagagaagaaggggcacaggactggacgattataggaggcggcgcatcactgggatgattggaggaggcagtgcacggttggggttgtcgattgtcaagagagagagagagaga

SEQ ID NO: 239267 - DNA, 2173 bp, Cannabis indica
gggaagaagatgaacagttgaggtgagagagcataaccaattacaaaatttagattacgaaaataataataaaaaaaataaaagaaaaatacataaatacaacacttttttatcagaacacataaccgtacaaatacaaaacaattaaattttttttttaaaaaaaaaaaaaacgtggcaaaaccctatcgtgacaagtggcaatgaaaatcaaacacacggctaaagtttaaaaggcagtaaactgccaaaaaaaaaaaaaaaaacagtataaatgttgtatttgccgtgcaacagtataaatgtaataaaatgggaaaaaacagtagtgggtgtaaatttccctacttcttttgggcccaagtagaattcggcccagactgttccaagtccatctttggggttacttttcgaggaaattacaaaatatttagaaaatagtacgtatatctactaagattagtagttctcatatgcgactattaaatattatttaatatatgttattctttaaattgaatattttaatatttgcaattttaaaaatgtttaacaatttagaaatagaagtatttcaaatttaaaaatatttaagtgtattacatttgcgcaacctaataagttcattttctaaaaaaaaattaacctaatgagtttccaatacatataaaccacttgaggctagctcaagtggccataagagagtgtctattgaaagtcatgggtttgagtctcaagttatgtattgtaatatataaacgcttaaataaaaaaaaaaatacatataattaaacatataaaggttacttatttcagccattttttgttacctatttctatggagaaatttgacatctgtggcttaaattgggtttagccactcttaatattccaccctacaaaaagttttcaaaatacacttttgttttactttaacgtccaaaatacccctcccatttcaagagatataccatgtaaaatcaagcttaaaccaattagtgttatattagagtaagacaactcacacttttattataaattggggagaatttactgtaaacttggaggatgtttatgttttacttctcttgccgatttgtggtacagcttcaatggtatcccctttatccaatgatgaacaatctctgttgtcatctttaaccgtagccatagaggatttaaagaaaagatatatgaaaaagaagcagtatgacttgcttgattgggtaagatattttcatcaagaaagtagtcaagatttggtagaatcggcatcatgtatttctttatagcaatggtggggtcagacatgatagccgaccccgcacaccgtcataaacaatacgcttttttctcattaggcaatgtgactttctgaaccttcttttctcttttgggcttggcaattgaaggattatttgttgcttcatattcttcccattggtgtaagcacaccacacgtggtcttgtgaccattttcatattattttctgaaagctcgtcaaagaacattgcttcagccatgtgagcttcctctctagcaaacgatgctttggtagctgtgatatgaacatcttttcctcgaaagtgtgtcttgacacattgatgcaatgtcgatggcacataatgacactacaagaaatgtcacttttgccagcacatttttgtgctggcaaaagttggtattacgctggtaaaatagaatttacttgtgatgtgttggcaaaagggggctggcaaatcaatgttggtattagaacttttgccaacataaaatgaaaagtgctggcaaaaatgacttttcccagcgcgtaaatgcactagtaaaagttagattttagccactgtaaatatacgctggtaaaactttgacctctttgccaacgcagtttgcaaaatgcgctggtaaaagttacttttaccagtgcagtagcgaactgtgctggtaattaaagtgacatttcttatagtatgatgtgtatgagtccattgtcgtcgtaataagagatggtacgaagtgtctgcttctatcacatagaaacgaatgggtcctctgattggtccaacctatagttcaacagttacatacctcatagtttttacagacttggcaacaaatccaatgactgtgattggttgcaggattaactccccttttacctcttttatagca

SEQ ID NO: 239268 - DNA, 2621 bp, Cannabis indica
gccattttctttcgttttcacttcaccttatcttcttcgaattcctagtttttttcgttttccaagcgaagatgagagagtgcatctcaatccacatcggtcaagccggtattcaggtcggaaatgcgtgctgggagctttactgtcttgagcatggcatccaggttcgtactcttaccaattgttgttcttttttagttttcgattcatacatttcccttagatctgaacagatctggctagaaatctgttaggttgaggtccctttcttgtaaatcgttaggatacaagggcattttctttgttcatgtcaatgtgttttagatctatgtgttaaaaggtcgtagacggtgtagatttgatgtcatcttgcatttttacaagattaagctgaaatttttaggttagtataattttaaagcatatgtagtgaataattactcatctgttttgtttgaatggatgatgctaccagatctggtgtttttaatcgtagatggtaacaatagaatacatttttaacaagatttgttagatctactgttggagttgattttatatccttcgtttggagtttcgattcgacaatatgataacggaaccaaattgaattgtttttaattaggatctttgtttttacccattgccactgtttgtgtgggttacgtttggttttgagtagcttttttagattcttgattgaagtcgatgcttatatttgattcgatccgtaaattgaacttcttttccaaccattttaacagcctgatggacaaatgccgagtgacaagactgtgggaggaggtgatgatgcatttaacaccttctttagcgagactggtgctgggaagcatgttcctcgtgccgtttttgtagatttggagcccactgtcattgatgaagttaggactggaacttaccgccagctcttccaccctgagcagctcatcagcggcaaggaagatgctgctaacaattttgctcgtggccattataccagtaattatctgatcttttgcttttgtttttttttccttttctttttttggaaaataaaattctttatggtggtatatttattctaattcattttgtaaatttctcagttgggaaagagattgttgatctctgcttggaccgcatccgtaagcttgctgacaactgcactggtcttcaaggctttctagttttcaatgctgtaggtggtggcactggttcaggtcttggatccctcttgcttgagcgtctctctgtggactatggcaagaagtccaagcttggattcactgtctacccatctccacaggtatcaacctcagtggttgagccttacaacagtgtcctatccacccactctcttttggaacacactgatgttgctgtgttgcttgacaacgaggctatctatgatatctgcaggcgctcccttgacattgagcgacccacctacaccaaccttaaccgtctggtttctcaggtatgttttgtttatcttgtgagaaaatgtgttatatttactgtatttgatttgtttctaaattctcgatgtattattttcaggttatatcatctttgactgcttctctgaggtttgatggtgccttgaatgttgatgtgactgaattccagactaatttggtcccataccctaggatccactttatgctttcatcatatgctcctgttatctctgctgagaaggcttaccatgagcaactctctgttgcagagatcaccaacagtgcctttgagccttcttctatgatggccaagtgtgatcctcgccatgggaaatacatggcttgctgtctgatgtacagaggagatgtggtgcccaaggatgtcaatgcagctgtggctaccattaagaccaagcgcaccatccaatttgttgactggtgtcctactggattcaaatgtggtatcaactaccagcctccaactgttgttcctggtggtgatcttgccaaggtgcaaagggcagtgtgcatgatctcaaactcaactagtgttgctgaagtgttctctcgtattgaccacaagtttgaccttatgtatgccaagagagcttttgttcactggtacgtgggtgagggtatggaggagggtgaattttccgaagcccgtgaggatcttgctgctcttgagaaagattatgaagaagtgggtgctgaggctgatggaggtgaagatgatgacgagggagaggagtactagatttcttctatattgctcggcagtagtttactcataatttctatggtgtctgactttgctatagtaaagctctgtaaaattgttttgtgttggctgtttcactttcttgtgtagcggcttatgtgattttcttcctgttctagacttctcaatgatatatggttgtggcttgtttctttttgttttggttttaaattttcacaatattcacttaaaataatttcttctctggatcatataataaatccaatgaattgagatcactaatacattatgctaaagttctcacaataatctgagggttaattggaaatgttgtagcaaatgagccacttggtcctgtcatgtttgataaaaaattattttcattgaaattgtactgcaaaaacaaaaacaaaaaaaaa

SEQ ID NO: 239269 - DNA, 2075 bp, Cannabis indica
atccacccctaacgcatgttttgccaatccatgagccgccatattggcatcacgtttgacatgagaaacactactaaaaaggataaaagactaacaacatctacaagcaagtcactaaaagatgaaatttaattgaagggagctcgtagagcatttgagaccaaaagagcatcagttaccacataatgaattggcagttggtgctgtaaagccatgtttaagccaaaaaatagtgctttagcttccttctcataagataagaaattacccttcatcggcattgatagtgctgcagtcacctcgccaaattcatttcgcaagattgcacccaaaccaattgtgcttgttgatgaattgacagctgcatcaacatttagcttgaaaaggccagcagcaggtggtttccaactcgggcaaaaaccagcagcagcaggatgttgtaaaggggcaccagcagccgaaggagcatgggaagaacttggtgctacagatggtttgacatgctgatatttagcagttgcagcttgaaaactctgaagtaaagtaatagcagtagtacctgttacagctgctggctttgcaacttggccatgaacgactttgtttctttcagtccaaatagaccaaagaatacaaaagagttgctccatttcagaggtataatgtattgttgagaggaaatgtaagtaatcaccttgcttcatggaggaggcagcatgccaatcgaaatgcatattcaaagatcgccaaacattctttgcatatttgcaaccaaaaagagcgtgaccaactgtttcccaggcttgtcgacagactgagcatgtggaatctataattatcttccttcgaacaagagctgtggcaactgggagagcgtcatgtaatacccgccaggcaaatattttaacctttggagggagctgaagtgaccagaagaacttccaccaagaggctgctaaagtggagctcgaactgagggtagattcctctaatgatgaagccaagtgataaccagattgaacagtgtagtaacccgatgagtgatggtgccaaataagggtgtcttcattgctgaagtagccaagagggatagttaaatttctttcaacatcgagcgacaaaaacacgtgctgcagcatatcaatatcccattgcctctcctcagttataaaattaccaacaacacagtttgaaggacccgaataatgtatagggaggaaattagtgtgaccaggaatccaatggtcggtaccacactttactgttctgccattaccaattttccatctcagcccttcaactagtagttctcgaccccaatgaatgccttgccaagtcaatgaaggcgaatgaccaacatgagcttccaagaaagtattattaggaaaatacctgcatttcagcagctgtttgccaaaagagcttgattgaagtggataaaagaacgaaaacccaatcctccttctcccttttttttgcatagcaagtgccatgaatgccaatgtattttagatccattttcattcatgccccaccaaaaagtagccatcattgattcaagttgcttacaaaaatagttaggaaggcggaaacaactcatagcgtaggtagggatcgattgtaccacagcttttagaagaacttctctaccacccgccaagaaaattttctcactccaagaatgcataagcttccgaattttgtccttgatattactaaacaactcctttttatctcttccagagtaagatgggaggcccagatatttttcatggcactcactaataggcattgaaagcactctatggaagaagacttgagttgctagggtcgtgttaggagagaaggacatcactgacttgtctagattgagaacttgtcctgaagcccgatgatatatatgttggaaattatttaccaggatcttagatctactcacaagtatgtttattaacatcctaaataaacattctaaaacgatgaaataaacacgtataaagtttaagaaatcttacttcgaaattctaaggaaagagagagagagagagtggcgaccaaggtagagagagaaaggc

SEQ ID NO: 239270 - DNA, 1508 bp, Cannabis indica
tgcgagagtcacattgaatttttatgaagcaagcttaggcttctgggaaggaaggttgaagttgcataaaaattcaagctgcaaacttcacctaaaaagatcaatgggtgaaagagtcattggaagtaaagcagacttcaagcagcccttctcttccaagaaagagggttgatgacctgcggcacacccaatgatctttcacgcatggagatgcagtgcgcatgcttctcctgagtcccgggaggctctaggaggtgcatgcttatgccccagcatctcttaggcattttatttcctctgatgaagtgctaggcatttgatggctgctgaggcaaggacttggactcccagtaggttaagcagtggaccggcaaggattcctaactggtttataatgtctcgagttgccctccctaatgcagctttgggattgtagagacatcaagcgacaagaacgacattgagtgaactttgccaaagttggcctgctccgtccaataataccatagccaggcctcactggtgacccagtaaacaccaacggtactgatggtctcctctcatctgctgccattataggatcgattttcgaactacttcaccacctagcgcgaaggtaggggaagcagttgttggaaatagattcggcccttcctcgcgctaacactggtgccagagtccctaggtggatagagtcgttacatttgacgacccctcttgaattagtcgttgtaaccgcatcaggtcgtagcctttctttttctacccttagcgcatctctgctcgtgcatggtgttatggtgggggatccgaatctgaggatactagcaattggtcttacccctgaagagttggctagccatatctgtgcttttagggacaaaagtcagtgtagtaggtgttttaagaccacgtgcatttatttttgctacttttcttgtgcaggcgagggaactaggtcttattttgagaaacacctctggctggtacatttttggctgtcggcgagagctcaacaagagattaggaggtcttccttcttttctagcaccgacttgtttttttataggctcgtgtcggtgactgccgtgcatatctctttcttcagctctcaatgaaagcactaaaatgtttaccgagatttttggcaacttaatattgctagaacttaagaaagtaatgaaggcataaataataaaatattaaacatgagatttttatgtggttcaggcgctaactatccttagtcaacaagtccagtttattaggctcattggccgagcactactaatacaaatacaagaaaaatggacttttactcccttccatcgtgttcctcattaggaagaggaagcttagtaggaatattatggagttaatagtagggttacataaatgagtttgtttagaaagatgaagattaagtcttcaatccgaaggtaaaggtctgaaaggtgatcccttttttgtgccttctctagggtatttataggccaactccattgcat

SEQ ID NO: 239271 - DNA, 2591 bp, Cannabis indica
aaaaaaactaaacaaatttctaatattatatataaaatatatattatgttaaaaatttatcaataaattaaagttaaaggcacatattttctattgctataggtacaaacttggatttgcagcgacattcattaagaatagtggtcaccattcgtacgaacaactttacaatacaatagatgagagtgtcaaagaaaaagatttgaagaagtgtttcgacgaagaagtgatcgagtcctataatgacgacgatcttgcatggatgttgttcttggatggatgtttcatactccaattcatttacagcttttatggcgatggtgatgatgaccaattcgaaaaatcttgccttaaaaaagaccaaattgcttttgtgtcgaacgatcttttcttgcttgaaaatcaaattccctttagagtgcttaatttattgataagtcattctattgttcgatttcgcattaaacttaaaaaaagtatagtggacatttattcatgcaagcgttatgacacccgaaaagaagataacaagtgcaccagatttacacgatcgtgttaatcatcttcttgattttcttcgattggaactcatacacgacgaatcctctaaacaacgtgatgaaacgaacattttcttgaaaagtatttcttctttttttagaggattatgcaaattcaaaactcggaatgtggaggaaaagaacaacattccaattagggatgacaagagcaatcatgacaaagtaaaagagccacaaaataagagtaagagaatgttttacattattttagagtcataattaataatgtttgcaaaataatgagtattttttattttatttttcccttagatctacaaatcatttttgtcacactattttttgtcttctagatatatatttttgtttttcgataaatttcaatcactcacataatatttatctatttataagtccttatatatttttattttattcctataaattctacatctcttgtatttttaatttgttgattaatatattttttattaattatttgtccacacaaaaattattgtcaagattttttataaggtaattttcatttttatggggtagtttgggaaaatatagctagctctttcatttgaaaaaaattattatttcatgaaaaaaaaaagaggaaaacattaaaaatatggacaaaaaaataatattcggtaattgttcttttggattattttatttttcattttcaattttacaaatattgtataaaaacaatgtaattttacactttcttaaaattcattttcttaagacaaaaaaggtattataacattatcatgcaaagtgaaatctttttagctattttaccatttggctatatttactattatgctaaattttttccatgtttttgaattttcatgtatggtatgctacaacagatcaagaagaagatgaaaataataaattatcacaacaattttttcgcagcgcgaccgatcttaaggcatctggaatatctataaaaccgagcaagagtacttctttaaaaagcataagtttctctccacttttctgtactgctgagttagagcttcctgcattgatcgttgacgactcaacaatccctaaattcgttaacataattgcctacgaaatgtgtccagacaatttcaacacggattacgaagtaacatcttacatcagtatgctagatacactcattgattatgcgaccgatgtaaaagagttaaggtcagctaaagtacttaccaactatttgggctcggacaaagaattggctaggcgtttcaatgaaatcgcgagatatcttgtaccaaactctcaactataccaagatgtcgttaaccaaatcgaagatcattataggagcaacttcaagatttggattgctcaatttttgaatgaacatttctctagtccttggactttagcagcatttcttggtgctgtttttgtgatcattttaacccttcttcagacttggtacaccatttactctccaccaggtccttgtgatgatttctgtcatcaaaagaattagtcatcactattaattatacaaggtacaaatatatatatatacttaattatcataattattattaggagaatgatttagtgtttatgcaaattaatttctatttttataataaaagaaagggatattttcgtaagactcacaaaatacagatttactagtttttttaatatttttacggtattttcttttacaaatatacagatagttattttttttttttttttttggttgtgttgttttaaaaacaatggtattttcacgttattgctaatgtgaaaacaataatgtagttttctgaaaaaaaattatataggaaataactttgtaaaaatataagtattttgtgtaaaaattcctcaaatataatatattaaaatgttgtgcattaatctttttttttttcattacagcatatttaatattattcatgataaatgattatatgactacaaaaaaaaaagaggggtcacataacataaattttttagagattatttcacaaatacaccaaaataacaaaaaaaaattacaaaaat

SEQ ID NO: 239272 - DNA, 2764 bp, Cannabis indica
tgttcaatctcataattaaaataaaaagaacctgactctatgattcagcattatggattgttttctaggtttcgtggatctccttgagtgagttaggatgatagatgtagcgaaaatggtttgtaagaatgatacctgtgattatagtataaattattattttgatgtaatctcacattagataatctcttcatcaatttaggcaatttgagaattgctacttttcattttacttccttttagcattttaaaatcatcaaatgtccttttttgtaattgttctaataattacaaatatgattatgaagtgtgtgagtccattactttttttttgttaaaatatattaatttgatcgtcatttaaccaattcaagtatgtattacatatgtgtatatatatatttataaaataatgtggaaccaaatcaataactccttaaacagtgttgaaaaaatcacctttagcgattctcatcaacaacaatgacttttcttattattgtaatatgatcatcatctcctcctttggccaatcattatatattgtttaattaattctaattttaaagagaatcttacttccaaatgacacaaaaataatttgttttgtggttttgaaagcaaattcttaaagtttttcatgtaacaaaacaaaaaatatcaaattataagtagtaaggttatttatttttatttttttggatgcatttcgtcctttattaatatcaaaataatatttaaaaagtgtttctcactatgtgtgtctcttgcatcaattcattttgtgttgcacacacaagcccctacgcaccacacacattcgatttgatgatgtgttttatagttgcatatgtaatttactttctatgtcttcaatagattaaagttaacgtcatgatctctaggtgctttcattcaatttaaagctttagctgaaaatcaatttgacactaaaatcaaacaactcaggtctgattggggaggagaatatcaggcttttgctaaccttgttaatgaatgtggtatagactttaatcatccttgtccccatacttctgcacaaaatggtcgtactaaaagaaagcacagacatattgtggaaatgggcttgacactttttgctcaagccaatatgccactgaaatactgggttgatgcttttcaaacttcagcatacgtcataaaccgactgcctactcctgtgttgaatggaaaatctccctgtgaagtgttgtattcaaagaaacctgattataaattcctaaaaaacctttggtacaacatgttatccttgtctaaggccatatcaaaatcacaaattttagttccattcaactaaatgtgtcaatttaggctacagttaacatcacaaaggatataagtgtttgagttcaacaggtcgattatatatttctaggaatgttatttttaatgagaatgaattcccatttaaaaatggcttcctcaatacacataaaaaaaatagtctgttaatgtcacaacaccaagtacctggtccactttaccaagttttcagcctcagtcagaagaaaacatacctgatgtccctcaaaacactgaactacctactggtataagcactccacaagctactgctgcatcatcaccaggaaaggaacatgattcatcacacactagtcaggtagatcttactggacatctttttgttgatttaaacattgaccctgccaacactactatcttggatagtcaagaagaacaatttagttctcagcagttgtatgcagatcagaatcaggagactactattgaacagtcccacaagttggtcatcacatgacaacaagatcgaagtcaggtgtggtcaagccaaaaatttacttgagcaaaacacagtgggaagacagtggaggagaacctatctctgttgctgaagctttgaaacacaagggtcggacaagagccatgtcagatgaaaatgtggcactaattaagaacaagacatggattctggttcctcattcaccagagtataatgtggttggcaacaatgatgatggatctctgcaaagactcaagggtcgtcttgtggctaagggatttcgtcaaagacctggcttggattttggagagactttaaacccagtaatcaaagcttccacaatcagaattgtcctcacaattgcagtcacaaacgactgggaagttagacaacttgacatcaataatgcattcttaaatgggaaacttgaagaggcagtttacatgacacaaccagaaggctttatagaccccaaaagacctaattatgtgtgcaaactccaaaaatccctttatggtttgaagcaggcaccaagggcctggtttgataggctgaaacagactctgattgagtgggatttccatcactcaaaggcagatacatcattcttcatactcagaaccaaaaagttcattattatggctcttgtgtatgttgatgatattatcatcacgggtaacaatgctactaaacttgaaaggtttgttgtgaaacttaatcaaaatttctctctgaaagtatcttggagcattgaattatttttttggtattgaagtctacagggatagtacaggaatgtatctcactcaaggaaagtatgttgttgaactgttgaataaattcaacatgatgaatacaaaaccttgtccaaccccaatggttgctggtaagcctctgtttataaccgatggtactgttgggtttgttgccctaaataaactcattacaatctaatctgat

SEQ ID NO: 239273 - DNA, 2235 bp, Cannabis indica
ttcctgctttcactctctacaaagctagcttatatttgacttaaaaattgaataactctacaacatcactaatgggagtgatcggctcaaaccacacacaacaagttctcgaaaaaaaatcaacattttcaccaaccggaatatttttttttataatagtgtacggtctactaaataagcccatcaaagaataaaatacatatgataaaactgttctaagtatgtattttaatataattaaaataatttaaaatacatcttcccacccaattaaaatcaaaagataaataatttaaaaatatatcagtatctctctctttataagtcatataatacatcttcccacccaattaatggacaatatagaatctcacagttaattattaacaacaattaagtttgctgatataattccctctatataaacccgaacaccatctctattaacatcgcaacccacctaatatcataaaagaaaagcctggttcatttgaaaatggcctatccaagaatcggtagcgctgccaacttctcaggaggcggaggtggcgtaacggtggtggactgccataaacaagtccgctcatggcagctttttcgctctttcatggagcttattatcccatgctgcaacattcataataacgataatgatgatcagtaccatcctaatcaaaacaaaacaatagccaaacactacccccaatcccattattattacttcaactataattcccaaccaagaatttcttgttcctccacttcatcatcttcctcttcttccacttgcaacgtcgtcactggcaccatattcggataccgacgaggaaaagttaatctctgcatccaaacatccccaaaatattcatcatctcccaatgatgctcctattctccttctggaactcgccgtttcgaccaagactctagctcgggaaatgagaggaggaaatctccgaatcgccctggagactactagccatgatattcaagctgatgctactattccggggtataaacgtaattatagtaatcacagtacttctcttttgtccactccagtttggaccatgtactgtaatggaaggagagctggttatgcggttaggcggcggccggggaaaagtgacttggaggcgctgaagctcatgggatcggtggtaaccggtgccggagttattagcaagaaagaacttaacaatgcaccaaacgacgtcgttggggacgatgagcttatgtacctcagagctaactttgagagagtctgtgggtcggagaattccgagtcgttccatttgattgacccggacgagtctattggtcaagaactcagcgttttcttatatcgttcacggtgatttttttcttttcttttcttttttttttttttggaaaagaaggaaaaaataaataaataaaattggtttgttaattatggaatattaagtatatctcttttgcttgtaaattattagtgccctgtaataagttctctactttcttgtgttttttgagctgtgctagctttttgttgaagcaagctttatgatctagatttggggtattaatattatttttttataagctttgtaaccttgagatattgatcaatgtttattaactactagtacttttttggtgtattatataattaagtgttaaatttacatgtatatgactctctggccattaagcctaaataaaaatgagaccgaaagaattaattcaacctacttttgtttaatcttcttcttctgtttattattattatcattattattattattattattattattattattatttacttttgtctttttggatcaataatgattttaatcttagaataaattagagcatcgaatattctcagtaacatatgaaaatttcaaagaccgattggtgctagtgtatattgtaacagctgattagatagaaatatatgctggtgtatattgaaagtgagaccatatataccggccaaaagtgttaataataaatatgttttgtcaaatgtagaagtaagtacagcatttcgtaaataacggacaaataaaagtaacaattattactacagtagctaataaaaagcacagaataaagataagaaatatttctatatatacatacacattatttgtcttccttcttttgcctttataaatatatgcatgtttttttttttgtccgttcttaaattttgtatgtaatgtggaaattaaagagtaacata

SEQ ID NO: 239274 - DNA, 3195 bp, Cannabis indica
aggctaattaataattttttctcatgtaagaaatcgtgcccctgaatttttttggccgttaaaaatatctccaaactattgagattgttaaatttaaggacttttatcttaatttcatttaattttactttttagtgattgtttatgtactaaactattctccccagactttgatatctaccaaatcatacccctcaaattttgatatgtactaaatcatggctcttgaactttcatccatgttaaaaatttttactaaaattagacaaaaatccttaaatttaataatctcaatagttcgaagggaatataaattctttgttaaaaaaaaaagtgtgataattccaagacacttttgccctttataaaatgaggtatttattttatgtccttggttgatttggttgattggtcaatgattcaactttcattcaactatccctctttctttgataattcggtccctttgatacatttgagatcagctctactgatgagctccaactcttacaaacatatttaaaagtatactgaaaaagaacacatataaggataacagcaaaagtataaacttattatttgtgttaataaagaaaattatttgtgttaataaagaaaaaaaagaattattagtggacataagatgtgagattaagacctttaaaatcagaaaagtaatctcagtaaaacaccaaatataaaatataataaaatataatactaataagtacaacaagaaatataaagtatcacggcaaaagcaattaatcaaataggaatatttgcataaaaatagaaaactagaatatttgttcaaataataatcttagttggctctgagaaagttaaaagtagattagcacagtaatatgagacaattattattgttcaaaattgtttcttatttaatcttgagtacagttattattgtaacagctcagtttacgaacatgttaattttacttgccaaaaaactatattcgtatgaatttagtgaataaatttgcctgccatactaattatatgttataaaagactacagtttattccgatacattcttgttccttagttccgatacattcttgttccttagtgggaagaaaacttagtcacttatccgatacagagacacagttacaggcctattgtggcccaagcccaacactatcagccttcatcaatagacattagacactactgcttttagcttcacttctcctctcattttctttgacaattttattttatcacattagaaggcattttcaatccaagaaagtgcatttgcagacatcgacatcgactataaaaaaacactaccaatcgagtaagagttacaaaggtgaaaatgtgaaaaacagaaaaatacaaaactatcttattaggaaagaaaaacaatatcaaaatattaacaactcaactcatagttctcatagccattacattctcatctctcatttctcacttttaagtaaattgtactcgaaacaaagaagacaatagaaaaagccatgcttaacagaactactcaacgttgacatgtaaaacgtcagacctctcatcttctttgaccttaggcagaaccactttgagcacaccattcttcatctcagccttgatctgatcagtcctgtacagtttctccggcaggtcgatcctgctcatgtacctccgtccactctcttcgtcgccttcctctttgccgccttcgcctctgatggttagagtgttctgttccactgaaaccttcacgtcctctttgctgagtcctggcatgtccactcggagatggagtgcatcctcagtctccttcgcatcccaccctcgccgaagcccggacccggcgccgcgagaggctgagaggagcggattctccatgagattgtccattaggtttaggacctggctaaggctccttgttggtgaaaatggatcaaacacttctgttacataacaaagaaaagattcgaatcaagtttagaaaaatgcttaaattcacatctcaattaacgttttctaacttaaattctctcagtaacagacactaaaggtatctaagaaaatcaaacactgaaggaattacaacaatttaaagaagaagaacacagagccgaaaaaacagagccattcaactattattttttctaatcgtaaaagcgttcgtgagagaagaaaatggatctctgaaaggtttaaaagaaggatcaagaagacgactacctgagaggaaatcatcgcggcctagtcggcgagagggagaacggtcagagcggcggtcgatgtcgacaccgcgctcgtcgtagtcgccgtcgtcgtaactccgtacggcgttggtgttgaagtacctggaagcgatggagggagtactagctatggggcgaaccggatagagaatggagttggagcgtagggtggaggagaggaggcgcttgagagcgagtgaggaagccattagagctgagcttagagcttgacaagagaaaaaggaaaggaaagagtagagagaaatgaaatgaatgttagcgttactctgttcgcagtagactagactgtgttggtttcttttggatcaaggcaatgggttttatagtggagtcagaacagtgtggaaggtcctggaggtgtcgctgttgccacaaatcaagaatcttctagaaaaatcagtatgggttatggatatttctcgacccctattgatttgtattaacatttacataacaatacattagcataatctaatgaagagatataaatatgttgtatttttttttagtacatatggctaaaaattaaggtaatgtaaaatatatgataaactactaaataattcgcttttgtgatgaatattttaaaataaattataatttttatttaatgaaaattaagtaataaattgtattaaattttaatttaattttttatataattttgtatgaaaaattaagtgtgataaatctaacttgtattaaccaaatcttgttattataatggaagtcaaacacgattttagttaactactcacttttataaataagtaatttgtataattttttttttataaaaataggataattaccattttggactctgtgtttcgtaaaagttaccaattagaccctctattttgttaaatgataaaataaactctgtattttctaaaattgtacaaataggaccctgaactgattttttat

SEQ ID NO: 239275 - DNA, 2084 bp, Cannabis indica
ccataattaacctgaaacaaaacatcaagattttgtgatgtcttgataaggaatgaaaggccacgaacagcaacaagaatcagagaagagagtagactgaagctgctatttcctgtcttaaatatgtattaacagccagtttgagtaaatattcagctcaccaaagtacacaaaaactgcaatgaaaaatgccaaatgctttcccaataaattttgcagagccaacacaagttcagaaaaacatttaattagataagcattttgataagcctccaataagaatgacttatgttagaactagaagtttgtggggctgttaagttgggaagatattctacatagagagagagagagagagtgagatttacttagaaaattttggcaatatttcaaagagggatgcctctcaacctttgttatgtttaaagtattggtctataccagccttgtaactgaataataatgaggaatttcagtagttcttgtgtgttttggtgtgacaagatacttacaatcctatcacatttcctcttcaactatcaaacaaatttttttctctagttttggttcctcaacaatggctacaacgtttacaatcaaaggaaaatctatctaaaataaaaactcactctgccttgctgattccaccataaatctccagagtaaaatgcaaacaagcttttttagccacaaaaacaaaggtaatttactcatccagaaattgtacaaaatagtttattctcttcatcttccatagaatagaagtatctcacctctgaaattccaataatacatttttaattttatttataagatacaagtttattgagctgaatgagtgcattaactaaattattggtatagtttagctaaaaagaaattgaatacagaattaagaattagagcaggattcattctgagatcaatacaccaaacttacatagtaggaaaccctgaatcgtccgcaatcccttaggacatgtatagactgagaacaaaatacaaaactctaattcaaagttacaaatctatgaaacaagtaatagagagtgtaccccatgttggcgagtgccagcgtttatccgctggatccagagggaacgcatgtctcgcttcttgttacgacgatctctgtaggaatactgcaatgccttttccaccctctcccttgctattcttatgcaattcttggcccgtccacggaacccctttgctagcttaaaaatcttacccttgttcattgttgaaacttctttttactgaagaatcaaacacacaatcacttacttcactacaaactaaaatcagtcaaaaagtctgaagttccttaagtaagaactctgaggcagcatcacaataaactaccaaagcagaatatattagcctgcagactatttcctgaacttagctctaataatctaaactaaagtattatagtcccatttggatagcttcttattttgcttatagctaaaagcttaagataagtaatgccactgcttattttttctcttataattattacatgaaaattttttagatgaaaagttttttttcgagtgtttgaatatcaattaaagctattctaatttaaaaatagcatctcaaaaaagatgactctttaagcttagccaaacgggcctaaagtctttaagaagaagaaagcaactataattttacgatagaattttctgatttttatgattcaaatatgagaaggtagtccaattaaacaaatcaagatccaaaaggtttctaaacaattactgtttctcacacaaatctcaagtaacaccatctcatttcattgtacaacagggtcagcacaaatgactatgctaggaaaatagacatactttcaaaccccaaaaaaaagaaagttaaccaaaaatgcttgaatttattcaacatatttcacatcactgaaattcccatattccaaaatgagcaaccgacttgccagttgaatttagttcataaccacataaactagcagaccttactcaatgtttacaaataatcattaaggaaacaaaaaaattgtaaaatgaatgcggagaggtctactctcaattattgctcat

SEQ ID NO: 239276 - DNA, 3777 bp, Cannabis indica
tcacgatcactaccagtagtattaggactaaaaaagattgaagacttactggtattaactttctgaccagagacctcttcaaagacagctaataaatttcgaacatgatcagctgcatcttgtgttgcttggcaaaaaagataactatcatcggcgaaaaacatatgagaaacaacaggtgcacctctagccacccgaataccttgaagtagattgttcctcacaaactgaccgattaaattagaaagaccttctgcacacaaaataaaaagagatggggataacggatccccttgtctcaagccacgggtgggagttatagggcccataacatgctcaccatgaacaaccgaatattgaaccgtagatacacaatgaagaatcatctcaacccatcgatcatcaaaccccattctgatcataatagctctcaagtaagaccactcaacacgatcgtacgctttactcatgtccaatttaatagccataaatcctttccttccggttgtctttcttttcaaaaaatgcatgacctcaaaggccaccataatgttatccgaaatgagccttccaggaatgaaagcactctgagtctcagaaacaacatgatcaaggatacctttcattcggtttgccaatacttttgaaacaatcttgtaaagaacattacataaggcaatcggtctaagctctcccatggccgaaggatttttcttcttaggaattagaaccagattggtggcgtttaatcctctgggaagaacactggtttcgaaaaaattcctcactaattggataacatcacaaccaacaatgtcccaatgtttttgaaaaaaacccggccccatgccatcaggtcccgaagacttatcttggtgcatatgaaacagggcacttcttatctcatcatccgtcggatcagcaagtaagtcagcattttgaattggtgaaaccgatggcacaataccactcacaaactgattgtaattggctgaaccagcagtgttaagagattcaaaataagcagtaattaattgatccaaacccccaccatcccaatcaacccaaacaccatccgagtttagcagtttttgaattttattatttctctttctagaactagccatggcatgaaaatacttactattcttacctccgtcccgcaaccgaaattgtttagctcgttgacgccagaaagtatcttgctgagataacaccccaaagtattcttcatgagcttcctaaaacagactaatggattgatcatcaaccttgcctttaaacaacttcattcttcttttactcgctgcaatcttttttttaaaaccacccgtgtaatccttcccccaagtggcaagtgtggaagcacaagcccttattttatcctgaatcgacagcgaaggattattacgccaacaatcattaacaatctcataacacataggttcatgagtccaggaattctcaaaccgaaattgaacacggctacgactacgctgaaatatattaggctccaaaaggatcggtgtgtgatcagaagaagagaactccagattagtaagagtagcatcattaaaaatatcaatccattgagaagacagtaaagctttatccaatcggatctccacccaacgactagggcctcagcttctttcccacgtataaggataaccagtaagttccatgtccaccaaaccgcactcactcaacatctcttggaacccattgatcaaagaattgggataaggtcttccacctttttgttcagttaaacttccaatattgttgatatcaccaatgacacaccaaggaagtggggaatttctacgaagagtgcgaatcaaagtccatgtttgatgacgaagagaacaattgggttccccatacaaaccagtaagtctccatttagtcgtttcctcctgagaaatctccacatcaatgtggttattcgaataacccaacagagaagcttcttccttgactttccaaaataaggccaatccaccttttctacccactggatccacactaaaacaagcctcaaagcccaaccgattcttcaatctctcaataacatcttttttacaaatgatttcacaaacaaaaacgaacttgggtttcttttgaagcacaaggtcttcaaggaattgagaggcccatgggttcccaagcccacaacgattccaacttacggtactcataatgcctggtgggtctgcgaagcagaacccaccgtcaacccattttttggcccattagaaacctgatccataagctcaagtgactcattatccccatcagcaatttcagagtccatattaaccattgaaccatcccctcttggcccattatccaggcccaactctattcttctcctcttcaaatcactaattgtcaacgtatcattctccagggtaattggagatgtgatatttaaggtaccagttgtcccatatctttcttttgacccctgaacagcttgatttgtggttcccacaatctgaggcacattccaatacaaagatctctgaaaattcggcccactattattgttaacggccatgacatgtgggtcaatcccaccatttactgctccagcattaaacgcaccagtatccatcgtctcctccgcccttcctgaccgaagccaacgtgatccaaccaactggtttgcccgccgagaagaagctatcatccacttaccatacagtttaatggtagaatcaataggaatgtccaaggctttttcacaaaatcgttcagagtggcccatgattccacacagaaaacaaaacgttggaaccttttcatatttgaacatagcccaaaaaatctcggtactatcttttttttcgaattttcatacgtcgttttaacggaactcccaatgatagagtagctctcaccctgaggtaatccttccaaacacccgtaaagttatttggatctatttccacaaagcctccaagatagacacccgcagcacgcactaccgcctccatcatacaccctggttgtaagtcatgaatctgtacccacatatacatcttctccagtttcatagctctcggattgtcaccttccttcaaacgttcaagaattaaatgtttacgatcgaaagtccatggactacctattataactctatgtatatccatctcatgataaaattgaaacagaaaaagatttgggcttaactccttcacatacatgcccctcactggcttccataagtcagccataatatgttggaaaatctgaaaatctgagacccttcctgttagaagacgccccacgagataccatctcgtatctataatcggttccccctccgctggcccttcgaaaataaattcctccccatcttcttcatccaaccgaatccctgtccaagcatcctccaaatcccttatcgtactactgctcgacaccataatcaaaacagaaaaaaataaagacacgaccaaacaaaactctctaagaaggagagactacaaacatatcagaggacacgacaagtcgagagaactaatatagtttatgtaataaaataagatattttttttttaaacttattacaatcattataactttccttaaataaatttactcgtaaattttttatatgttattattatagatttttccttttgtatattacaaaaggcagggagaaaaataatgattttagatactatttaataatttttttaacataatcatacttttatttttattatgctttattgaaatccaatatttttttttcactcaatt

SEQ ID NO: 239277 - DNA, 3357 bp, Cannabis indica
tgaccccaattatttctaacaattttcttgttattttatagaatactttaaaaatataataaaaaaaaagtaaaagtaaaatataaattttttacaaaaataatactttatataattatttttttcttcataattatataaaaataaaatttaaatatgttattacacttattataattttattttgataagtgttgtaaataaatattaacaagagaggtaataataataataagagatatatatatagatagtaagaaagttaattaattactccagttcccaaaaacaggataaatgctacacttggcacaaaataattaaaattacctaaaacacctcacttaacggataaccctttactctctttttctctgccgacccattttgccagttgccccatgcaaaattataattataaataaaaataaataaatacaactctctcttctctcttcccaatataaattcccatgcaaacccacccaaaaaaacccattattttctcaaaacacaaaaaaaattatggaggttgaaactactagtactattgcttctactagaaaacccaataatctattgcatgtttcagattcgggttcgggacccgacccgggtaaagctcccttcagaaaactaatcgccgtagcttcaatcgccgcggggatccaattcggttgggccttacagctttctttactgaccccatacgttcaactcctcggcattcctcacacttgggccgcttttatctggttatgcggcccagtttccggatgttggtccagcccattgtcggctaccacagcgaccgctctacctccagattcggccgtcgccgacctttcatagccgccggagcagccctagtcgcaatcgcagttttcctaatcggattcgcagccgatctaggctacgcttcaggagacgatctcaacaggagcgtgaagccacgcgccatcgctgttttcgtcgtcggattctggatcctcgacgtagctaacaacatgctccaaggtccctgccgagcattactcgcggatctctccggaaacagccagcaaaaaatgagaacagcgaactctctcttctccttcttcatggccgtcggtaacgtcctaggcttcgccgccggttcctacactcgtctctacaaaatcgttcccttctccaaaaccctagcctgcgacgtctactgcgccaatctcaagacctgtttcttcatcgcgataatcctcctcctaactctcaccgtaatcgccttaatttcggttcaagaacagcccggcggtgccggtcccggagccgccgcggacggcggagacggggagaggtcggcgccgtttttcagcaacattgttggggctttcaaggagctgaagaagccgatgtgggttttgttactggttacgagtctgaactggatcgcgtggtttccgtttctgcttttcgatactgattggatgggtaaagaggtgtacggaggtgaggttgggaagggtaaagagtacgatcttggggttcgagcgggggcgctgggtctgatgctgaactcggtggttttgggtgcgatgtctcttggggttgagccactggctcgggtgttaggtggggccaagaggttatggggtttggttaatttcttactcgccgtttgtttggttatgacggtgttaattactaagttggctgagaatagtcggaatggcttgcctcaaacgccgttagctccgcctcctgctgttaaagctggcgctttgtcactctttgctgttttgggtattcctcttgcggtaagtccttaattactattattattattaattattttattatgtgtaattattaatatttcatattttatttttaaaaagttggattctttaataaatatttttgtataattatttacaaaattgaaagaaaaaaaaaattaacttttgtttacagtttgcatctcataaaatataaataaatacattctaattagtttttattttttatattttttttcacatttattttttatttttaaaattatatatattttaataaaatctcatataattctttttataacatttaaaatataatttttttaatattaatattttttaagaatataaataagaagaaattaattaaaaaaaattgatgttattaaaagtatattttttttatataaaataaaattattaaaacctgaaataaaccaaaaaaacagtctattttcattacttattttactctaataattatctattatgaagtgtatttttatagccattttaagtaaaagaaattatgtatatagttaatgaacagctaaatattttttttttgtagcaaaaaaataatattctattttcttgttttaactaagaaaaaaatgataattataactatttataagtaaaaaaaaaatctaatttcccactaattacctgtttttaagtgtctgtattgtagtcactcaaataagtaatactatttttaatgttttataattatttaaaaaaacacttaattttcaattattagtcatgttcttagaaattacctatttttaagtgtgtgtgtgtttttttattaattcaaagagaaaatttcggcactttgagagtgatgagtgtttgtaggaaaagttaaaagtgcaaattaaataaaaaccacgtttttattgataatgagattcaattattagtcaaaaacaactttaattattttgtactcacatgaaaaaataataaatatttattaccaaaagaagataaaataaaacaaggtttgaatgaaagatgcatgttgaaaaatggtcaacaattattatataatatcatttaaattaattaattaatgtcatagttagtcgtgtaataaatttcttgattttgattatttacttaaattagaatgtcagctgtttttttaataataaataaatatttggtctttgttggtcattattaattaattaattaattattatataagtctcgtgattcaagtccatctctttactatattcgtacgtaacgtcttaggtatcaatttgatatgaagataaaataaattgtcaatctcaaaatttgagaattgaaatgaaagtgacatttaataatataaaataaataaataaatttgatttaattaaattaatatattcattattaatattaatattttgttctttttatgtataggttacttacagtatccctttcgcattggcctccatattttccagcacttctggtgctggccaaggtatatttatatacttaattttcttatatatttatacatataatacatattgaattttattatcctatatatattaattaatttataatt

SEQ ID NO: 239278 - DNA, 1532 bp, Cannabis indica
aatatttattatattttttatttaataaataattaaaatagtaaaataaaaatatttgaataatataaaattgtttatgttaaacactaatttaagataaatattaattttttaaaataattatataaaatttctaataatgtaaaaataatatataattttaaagtcatattgtttctcttagaatcaatttaagtaactatggtttaattaataatattttaaattttgaaagattatgtatgataattcacaattatacattttcactaattttaatgaataagtttttgattaaaaaaacataaattaatgaatgtgtgataattcttgtaaaatcttaagagattatttatcccaccttggatgagataaataatctcagacagataagattagttggattagttatcaagacttccaatacaaacactggactgacaaattaacttgtctaatccagtccaatcctacctaccacccctaaattataaaatatttgctgcaaataagttctgtagctactgtctccttatttatttgagtgtagaatataactgaatgaaatatttataactatatttatagttaggaaaaaattataatataacacttacgaatatgaatcctttgatgatttgatcagaatagtattcaggattagattcctgcattgcaagcaagtgatcaatcatggtaatatctgatttcatactccgacgctcatccacaagtttttgcaagaaagcatccattttcttaaaagcccttttcatcttaaactcataactaattcccaaccatttcaacccgaccggcaagaaatcggtcgggttggctactccgctactaggcactacctcatcaaaaatcctcatagccacctttccttcttctttctctgccacgtcatcaccgtaatacctttttccggccaccattctcattatgatattgaatgtcaaattcgataacaaactcttcatctccacctttgcaaaatcaaacttagtgttatttatatcggacgatggagatagagagtttctagccagagtataaagcaatcgattgatctcgtccgtacgcgtggacaagtgtgatttaagccggctagccgagaagatctcaatggagccgattcggcgaaggttacgccaatggtcgccgtaggaagctgttatcattgaggtgtagttataaccgaagtacttgctgaatgaactttttccgcggttggctaaaacgacgtcgtttttggtgaagcattcttcggctgcggaatgtgatgatacgatcacaacgcggttggaaccgaaccaaagggtgaaaacggcgccgtatttgtttgccaggtggcggaagcatctgtggacaggtggctttattagatggagatggcctatgagtgggagagaataaggtgggcttggtggaaggtttttgtattgtcgttttgggtttttgatgaacagtttgtatactaaaacgacaatgattaggctgattagagctgtgtagagttgttcttg

SEQ ID NO: 239279 - DNA, 1501 bp, Cannabis indica
tatagttcattcaagagaattcactttgtactcttgaaggaaaaataaaagtggttacaatgattgatttcttacctttattttgagtgcatgatgttctcccatatcttttgaagagcgaactgccatgagaaatcaacttcagtcggtggcacagaatgaggtccgaccttgaaatagaccgatgtattaggtacaaagagcgccttcttgaaccgaacacctaatatatcaaacagatactattcaattaaaaatatctacatacgtctatttagtctatgttttccaaaatttctcagctttcaattcaggatgcattactattcttgttaaaggaattcatgttggatttagaaatttatgttatttagtttgacaaagttaacgactatcacatctattcaaagattgtcttggtcaagtactcaccatgattggcacatgactccatcaggcgaggaagaagcacttgaggatcccgcactgacatgcaattaaacagcagtatctgcaatggaatacatcataaatttgaaacattgcgggtgtaagagaatggagctttataaatatgaaagaaagagaaaaattgttgcacattgttatatagaccaaaaaaattaaaaataattaactcataatttttctcagttctccatatttgtgggtgagtacaaatactgaatttgaatggatgttctatattcatgaattgcataactaagaacagctttgtactccacctgtgtggtttgcttcctgactctctcattcaggtgcttgcttacaaactcgtgtgatgacttatcttgtggttgataactcaagacttgttgagaaaaccatttaccacacacttctaagctttctgggctatgagctccatccaaatagaaaaccagatccccatagttgtcagcatcaaaacatcgatcagggacaatctgagctcgcccttgcaaactggctgttgttaatccttttatgaactgctctggcaaagaatcctactccaagcacaaaaagaaaaacatcattcaaagtaaaaattgggcatatacagaccaaagtctcacttttagaacttacggtttgttccaggtgtgcagcttcaggacgacctgtcctctgaagccaagaagagcacaacgctaccgcaagacctgcattaacatattggtgctcaccttcaagtccaagttttaaaccattgagcaaattggcatttaatggtggaatcacttgaagcggtacctggtaatcagcaagatttcctcagcacattgaagggtacaaataaatgcattgaaaacatctatactcattttaattttctagatgaacatcttatcttgtttatagttttaacaatacataaaacttggaatattagaattttacaaaacttgtgacagcactatcatgcatgaagacatggaaggcacacctgaagtcaaaataaaacctgagtgtttagtgatgacagtaaagctttgtc

SEQ ID NO: 239280 - DNA, 4259 bp, Cannabis indica
ggtaaatttatgcctataacaatggtcaaacctgtcaccttactaaaatcttccaaggcatttttgaggtgcctgacagcagcttttgaccctttacacgaaaaggatacggatcatccacaaaacaaagacttattagcttaagagatttatacataaggttaaatcaaaaggtacctactcgagcttcaagctaaattcttctggttataaattcaatgatgatgactaaacaacaaaggagacattgggtctccttgtctcaaccctttatcacctttgaaacccccttggagtcttccattcagcatcagcttgtatgtggtaccccttgatacatttcatgacccgcttaataaatatttttgggaaacgaagatgaaccagccaggtccctaagaatctctaatcaacagtatcgtaggccttacttaggtcaatttttgatagcacaacaaggagaaacattcttccttccatagttcttgataagatcttggaagataaggatgttgcgagctatcattctgtgttgcacaaaggctgcttgattttgatcaattaatgtaggaaggacaatggcaagtcttgtgcacattacctttgaaatgcacttataaatcgtagtgcagcaggccattagtctgtagtcaatcaccttggttgggttatctgtcttgggaatcaaagagatagttgtctcatcaaattaattaggaatagctcctgtgttgaagaaactatttatggccaaatagaattcatctcccaactctggccacattattttataaaactcagaaccatagccgtcaagtcctgggctcttaatgcttggtatactgaatagactcttctttatctccttcttagttaatggttttataagttgaagttggtgttccagattcagagatgaactcgaagctagctttttgaagttgtaactgcaaacatcagggttagcacttcccatgtaacctttgaaatgattaacaaagtgctttaccacttcaatgtagtcctctaccaactgcccttgatcattcatgtagcttgtgattctattttcctcccatcttttcttgatagaagcatagaagtaggcattatggtcatttcccttttttaaccaattgactttattcttttgaactaagaagctatgtaacatcttttcatgatcacaatacttctcagctacttctctttctgccttaataaaattctcatcgtcactgttggattgtgctctcaacttagcctcaacttattgctccttagccttttgaaagttcaaattcacatcaccaatcatctccttgttgaacttccttaattgatgcttaagtctcatgcttttcaggtgaaaagataaaagccccgagcccttgattggtttagcccaactctctgacaccacctttttgaagtctctatggcctatccataaatgtaaaaatataaaaggtttagtcccgatatcctaaaccactgaagaagaaacaacataggcgtaatgatcagacactgtttcccaagtcatattagcagctgaatttggaaacaagtccaaccaatcatcatttttcaacacatggtcaattcaggagtaagttctgtccttagcaccttggttattagaccaagtaaagtgagtctcgatcttatgtaatcagtctgtcgatcctaacacactccgatttgaagcgacgtccatctctgctctagtaatgtgattaccccctattctatctccatactcaatcacagcattaaaatctcccataattatccatggtttaatcgggaaattgagttgatctaaccccatccatagatttttcctctcatccaaagagtttgagccatagataaaagtagcacaaaattgctttctatgacaggctaatttcacgaggccgtgaacatactgtattgatttttcccatatagtaaccttagcaaatttatccctccaaataattagaatccgaccttcaataactggacttggaaaaaagcaccagcctcaaaagttattgacaaaagcatcagtcactttagaacctttcatcttggtttcaagtaaggctccaaaaccaattttctttattctataaacttcaaccactgcctcttgcttcatagagttattgaggcccctaacgttcctactaagaatgttattactatccataaacaggtagattagtaactatctcagttttctcactgccctgttgtgtatgaaaaacctcaaaagtattagacctagaagcattaccttcttcgtcattcggcataaaaatagttttgttcctggtttgcatagttttggtgtctccattccccactgccaactttctttgctctacctcgaatagcaattacttctccctctgacttctctgtctttttaatctcctctccagtagcgattgaacccgagtccaccatcttgttctcatcagttgttgctacatagtagcatctatagttaaagcatctctagtgtctagcttttttcctttttccttgccagcattatgactattattacgttcctttttttatccctctacagcctttgacatttttctacagtgtgccatcctgtgaccataaccattacaagctttgcagcgaacaggcagccattcatagtccactgcttgttcagaaagtctgccatgttcatccgtataatggattattcttgggggttcatcagtgatatccatctccacaagcaccctagcaagcttcatcatttatttttccttcgtaactttatcagtcattataggttttccaatcatgcttaccaaagcactaaggcatttcttcccttagtaatggagatgaagacgaatccataacggaatcaatttaaccaaacacacagcagttaaatcagttgtccatggtctcaccacaaccggcttcctatcaaactgaagcacaccctcttccaggactagatcacttgtggtttcatcattgaatttaacaatggtgaatcccccattcattcgaacaacttgaaaaattccaagatgcccccatttaagttttatgaatccttcaaacgccgaaagagtagggtttgcacctagtaccatacacacaactattgtattcaagttctcagcttgcaatttagcctcttctacatcaatctgggctattttgattccttctttaataagcggttttgtataggtcaaagtagtctctcgaaaagaaagcttaccttctgtgaatttcttctagctttgctgtgctttttcatgaaaatccgcctgctccacctgatctgcccaagttttcttctcctctcgatcttcatttttatcaaatttttcccagtcgaatccacttccacttcaagaagatcttcagacgaaattgcctgagaaattaagtctagagcattaagatttccattcgattcaatcttgttctcatcatcttggattgaagggggttctgcaatgttcaatctcacaacaggcttttcaatcgtgcgctttttctttgccatggaagagagagaacagaccacacatgccttttctttatcttgtcttgtccctttattcgtgcaggttttaaccttttcctatgaatctcaacatgaagatggcctacacctactcctgagccatgtccagtgccttaaaaactataaccaacaccaacaatctacaaaaggaggtggatgtagccaaaaggaggctgaggtcacaagggcaaagttgggcgaggtgaacaaaaaacttttagccgccaagaagagggtcgatgaggtacaaaaggagattcaagacatgtcgtctaccgcctaacttgaagcggatgtcgatgttttgttcgaggaggtcaattgtttgaaagacgagagggagagtcttcagattcttcttgccacattaacccaagagaagatgaacctggaagaggacataaaatacagtgaaacaagcgaggaagtgctactgaaggaggtcaaaagtttggagtcgcccgccctagaggttttctacgaattctggaaggccaacccagaggggaactttgattacctcggtgaaaccaaagaggcgtatcttagttactgtgtgggctagacaaacaaagaaaatcttgaggcagctaaatctacaacttcgaccgaccaaaacactgagaccccgacctctaatgagcgagatgatctgtacaaagaacctgggcctcctgctgtgtgaaccctt

SEQ ID NO: 239281 - DNA, 5187 bp, Cannabis indica
ttcttatttttctctttcttgtggttatgttgtttgttcagtagacaaaaatgagtcccaacaacactttgaggttgaccaagataaggccagggatgcccttaaacagctcgaccaacagctgcaatccatctcccaaaaacaacttcggtctcctaaaatcaaaggtaactaataagaattataaaattttatgtaaatgtattaatatatacatataattggtaacgtaaaaatttttattaataaagtaaatttaggcaattgtattatatgctgatatattactaaaaaaatcagaatcaacaagatagagaaattataccgtttataaaaataagaatgaaaatcctatagtactttcaactaaaatacaaattcaaagtagcaaaattacgataaagaattcaactgctatataccaccatcataattggcatttgattatgaaaacactaagcatttagaacttttagaacttttattgaggtgacatggacatgaaaattgatctaaattaatatcgtgaatatttaattaagtgaaaagtttagtaagttttaaaaatttgacatagttttcatttgggtgagattgaagacccatatatacttaaatatttgtggttttgctctcttacttattattgtcatattatgagtagtgattgaattaatgtgggactaatgtttatactcaaaaattgattacatcaattcaatctcaaaatacataaaactaaacttagagaaaagaagaatcatgagatttaaatttgttgtaaaagaaactggtatgttttaaatttatacctagtactcaatcaaactaagatgctttagtattagtttttataactagggaatgaatttgtgcgcaatcttcaataaagttaattaatttttatctaagtgatatgtaaaatatattatattatttttaatatataatagttaagatatataaatttaactaatattaatattttaataattaatctatttttgacataatgtccattaattctattaatttatagtcataaaggagatatcacctcatgtgatgtaataaaataattaacttattataatatggatatgtattatgttggttgtttttataaaatagttaatgttatgtttccaccatttaatatttttggaaaaatataaattttatcaaataagttattattctatgttattcttgtaaatgtatacttatatttttttatatgcttgactagtattatatatcaaaatatacacatgtatatattatttttgatgaaaaatatatataaatatatacttagattcaaaacaatgaaacaaaaatatttaaaagatacgtatttcagatctttttatagtattttaattttattgttttaatattataaaatgtatataattactacattatcaatacttttattgttgagttgttttttttttcttaagatatataacatacaagacaacttagtatagaaatactaattataactataagtatattttttttctttcttaaatgccaacataatgacatttgattttgtttgttatatatttttttataattaaaaaataaaaataactacaaattaaataatataaattgttaaaaatagaataaagtttaacttattttagatgttaattatagtcaaactatataatagtccatatctaaaaaattattatattatctaaattttattttcttacacttttttatattaaaattaagataattatttgattactatatggattattttagaattatttgatattagtgcatgttgtagttaataaatacattgttaaatgatattcaaaatcaataagtaatattaagagtatgctattataataataattatattattattattattattattattattattatcattattattattgtgggaaaattacaactaaataagagagttaaatcaactaaaacttaatcaataaataattagctatagtaggattaacaatccacaaacaataaatgaagatatgaatagggactaatagagtattattataactagaaacgattaaagcaacaagacaataaaaaaaaaactcaagatatatactggatcaagtcatatagattgctgtaatctatgacttactttaattttggagcaccgccaaatcttctttagtgcttcagcaaaaatagggtacaactacaatcgagattgatttcctgttagattttctcacaatatttttctctcacactcttacctaagaatgttcttcatctataaaaggttctttatacaaaatccaaacccaatctctcacttttctctctacctctcagtctctctctcaagatcacctctcgaaactcatttggtctcattctttccaaagtaataagtgttagtggtattttataggtccatgatatagatcctaaagtcggtggttgtaagtgctaagttgttaggttagttatgacttaacaaacttaacaaactccatgtaacagtatctccacatcagcataagataaagtgctttcgaatgagatgtacgcatcctagaagaaataccaacgcatacattgaagagacttcttggataggaaaggcaatagctagagttgattatccaaaactcctttcctagaggaacgactagccatttggactacaactcttttctagaggaagactagcttttctaaagactccttccaagttgacacgatagacatatgagaatgccctttcgaatgacatctatcattccacaagacttcttatagatggtcaagttagacttttgggaatgcctttttgaaagacatctaacttttcataaccggaacagtttttggagatgtttttatttataggaactatactacaagttccacctagtttcttcaaattaaaatactgacggtgatgaagaaagaacacagccattattgttggtgttccagatttctcagtatactaactttagagatttatcaagttcaagcaatgcttgaacttttttactattaagaccgtagtcccaatatctgtaggattatcttctgatctgaccttctttaattaaaccaatcgttcctctatcttctctataatccagtggagttttatgtctatatgttttctcttttcataataaatcgaattcttacaaagattgatggatgactagctatcctagtacaaagttactccaccttttatttgtttgaattcaaacataattccccaaagccataacactttcttgaatacttctgtagtagccataaatttagcttccattgtggaaagggtaaccaatgactgtactgggccttccaacgtatacagttctggtttgtcatgaaagcataggaaatggttattttctcatatctctattcaaagcatagtcaacgtccacaaaccctttcaactctagctctcctttttctttttcataggccagaccataattccaagtgcccattaagtaccttaataaccatttgagggtcttccaatgtttaatgcccgtattggttatgaattggcttaggatacttagagcatgcgctatgtctagtgtggtgctcaccatcacatacattaagcatcctaaaaccaatgcatatggtacatctttcattttctctttctctttcacactgtttagacactactccttcgacaaaataaattgtctgcctaatagaacggatatactctttgcatctttgatgttgaacttctgaataagtttcttgatgtacccaaaatactttaagttgattgtcccttcctccttgttccttaaaaccttaacaccaagtatctttttaactagtccaagttccttcatctcaaattctctcttaagctaggcttagatagttttgatcatggatttgtctttgctcatgatgagtatatcatccacatagagtaataaaaacacaattatagattgctccagattcttaaaatataaatagtgatcatatgtggatcatttgaccctcatttgttgcatataagtattaaatcatttattccattgtcttgatgactatttcataccatataaggacttgttgagcttacacactaattcaaatcatttcttttccactggaaacccaggtggtcgcttcatgtagatctcttcatccaagaatccatttagaaaggaagtcttaacatcaatttgttcaacttcgaactccatttcagctgccgaagacaacatcaatcttataatcttgtactttactataggttagaggattttagtgtagtttattccttccacctaagtaaaacccttagccaccaacctggctttgaactgcactagttcattctcattaattccctctttcagctttagaatccatttgtattccatgatctttttattctgtggcttctgtacaactacctaagtatttttcttctaaagtgagtccatttcctcatccatagcctggagccattacgacttttccacttgaaattgcctctttgtagccttggggctcttccaattcagtttgttgtactactgccagtgcaaactcaatcaagtctacctcagcaaacctttccgaagggtgaatctctcttttagttctatcacgcgccaactgataaccttccaaaccatcttgttcaaatccttctggaacctatgttttgtcttcattatcttccagcttagcatcagcttctgtgtgtgcactttgttctggttccacattcgtttctagttgtgaactctcttctagatgtttcgtttcgcattccatttccatgtgtgcagtgttcttatttcctattttcctgcatcacacggagactactacctttttcaaatctcaagtgaggttattccaactcattgaaaacaatatttctagcaatcacaaccttttatctacccttcttaaaaatgcaaattctatgccccttcgtacttaagccataacctaggaaagttcccttaactaatctgggttccaatttgttaattgctttgtgtacataagttgtacacctaaaggttcgtagatgcgttaggtttgagttctgttttaccgtatttcataaggggattttaagcttataactctgtttgggcttctatttataaggtaggt

SEQ ID NO: 239282 - DNA, 2186 bp, Cannabis indica
tataaaatcaaaattcccttttgagaattcctacgttttttttgtagatgatgagttacttggttagaagaaattctaccaatgtgatgagactagactagtggattatattactacattgattttatttatgaaattcgcctttttgtaaaaaaaaaaaatcagtaattaagttttttttttttgcaagaaaagtaattaagtaaatatatatatgttaaattgaataataattaaaataaacctcatgttaaattacacttttaaatatactacttaatcaaattatttggttatagacatgtttacgtgtagtgtaaacttcattttgcatggcaatgcattgccattagcttaaaaagttcattccacgtaaaacaaataatacatattgaaattcattcacaaatttctaaatttaaggaaaaaaaaaatcaaaaaagagaaacaatcctttgactttctgtccttttttgcaattttaattttaatttatatttaaaaatggcgcaattttatttttaaggaaagtacaaaaataagagtaccatattatccatagggtcccttttaaccttaaaatttaaaaatattattattattattattattaataacaaaaaaaaaatagtgaaagataatgcacagtctcataatacgacgtcgtctctagtcttggctagctaagaagaagagcgcgtgattacaccgcctaattttatttaatatattattttattcttatttttcctaattaagcccaagcaagcaatctttttctttgaatggaaagatcaaaacgattcgttttaccatttatttcactctccgtttctctctcctctttctctctctaaaatggaaagaaagaagtaacgcattcgaggatttcagaactctgcctctcaaaaatcctctcactgcgcgtgttcgacactcgctgatttaattgtattttttattattattagtttttttttgggttttgaggttttgatattgcaccagtgaccaccaccaccaccaccaccaccggatccccattctcccaatctagagctacactggctgtaattatacgtcgtcgtcgtttgacaccgtaaacgcttcgccgttagaggttctatgtataaccacactaggtgaaatctcactacttctcctccattttaagaaattgattatgtaatgtttgggtgttggggaagaatttgaacatgggttgtgtttgttttggaaaattatcttttgggtttttcgcttaagaaaattaatttagggtttgtggtttttttttttgtcttgttgcagaggaatgtcattatggattgtgcaaggtcagggcacaagtatagtatagcattttgggtgttctgggagggactctgctcatctgattggatttacatcctcatataagggtttgtttttttttattgtttctttcgatttatttgatgaaccatagatttatgaatgtctttagctattggattgtattttctcatgtgtgtttcagtgtatggttgtactaaggggtgttagtgtaagaagatatggtttggtaggtgttggggtcttgagggtaggggaagatagagctgtatccactttattgtatttgttggaatggaattattgactatatttagttaccttttttctttcttttttccccaagtttcattttcggttgtattgttctgttgttaatatttggtgtttactgatggttgttatagaacagtattctaagtaagggttgtggaataatagtttgatttccatatcttttgttagaatgaaaccattgccatgtttggttgctttttcctttcataagttttacctttggattatgtctttttttttttttgaaaaagagacagaggccacttgtctaagacaggcccctatccgatagttattgaaaagcctcacttgtggcggaggaaaacggtagttacatgaaattaaacagaaaacactaaaaaaccagcaaaacgaaaaaacagaacaggaccccaaagaaaaacagtatttgtttgaccaaaaaacacattacatcaaacttctccattctctactcaaatcgaagaatgataagtgctcaaaatgcttggtcttatacacccaagtcagcaaaacaaaaacgaaccaggacccaaaaaaaaaaaaccaacgta

SEQ ID NO: 239283 - DNA, 3922 bp, Cannabis indica
aaccatttaatagtaatccaatggcttaaaaaaatgtaaccatgatggttacaataaaaatgtaaccattgaaacctcttccagatttttataagtatgataaaagtaaatttgacaaacactaatcttatatggaaaatgaatatagtttgatggtacttagaaaaagctgtgtaatttgtttcaaagttacttattaaaactgaatcactacaattctggataaaagacctttttttagaattgtgttatttgaaaagtaagagttttaaaatgagactacagtacataaagtcaaatgatattatataaaaagaaatccttacttgttatgggaaacaagacagcaaattaagtatagggatgtcgtgaatatgctaaaattttagactattgcaatcaactattcaaaaaaaattgtcttccaacagtgtacgatttggaatgttttttaatttagatattttgtcttgtgtagcaggtttttacaatgggacctaaacgaaagaggggtccttctgtagacaaaaatgatgcagctgagataaataaaaagatggcaaaggaagcttgggtcaaatattagtaagtaatttgtctctgtgttctagcgctaattgtttttagttttgaaaataatatttctaatacccttcatttagttaattgatgcaaccaagctaatttcaaaccgtatgctgtagcacatgcagataagtcagaacaagatgtgagttacttggagtgtgtgttatggatctttaatttttgttatttatcattgagggttctctacttaattgagattcttaattttgcaggtgcttggtaattttgaagagcaattcaagctgttgagtaataaagagatacaaaattgggcttcctatgaagttgagccttcctctaccaaagttggtgttagagggagagggaagaagttgaaggaaccagtatctgttgattaatcaattgagaacaatgaagagataggagatgtacatatctctggtcattgttccttcgaatgattgggtagaattgtcccagttctcaacaagacgcaaaaagaaatggtcaccaatgctggtttctctacattcttaagggaggatggcccttaaattgatgcgaaaatggttagttggctcatcgatcacatggatccaaccacttgttggctggagttagctggaagaactatgcaactatcgccaacctgtttgaggatgtcttggcaataaaggatgggggggaacctatttaatagaaagtgatcgtgacctatatgagttttagaaatttttgaaggccaaggactataagttttaactgacaatgctagagaaggatttaagggagagcagtaaaattgattacatgtttctgattgagtttcttatggtttgtatcagaacattcttgctgcccaagaatggtactgaggtcaacacaagctacatgctttctttaattgatacaaggtcaattaagaagaataattgggctgatgctgcctttcgatatctaataagctctctttagcggtacaagactaaaaacacgaaaaatgtttccagttacaccatattcggtcgtgtactgtagtgcttataaatgtatgtatatttgttatgtggcagcttttatacttgagtcatgttgactgaaatgctggtcacttggaccgcactgtacctccaattttttttggaacataaaaaattataaagcattgtacaaatggattcaagaccacggtggtcacactagcgaacaggtacatttacttaaatttttagaatttagaggaggagatatgcttaataattttctttgtgtaataagcaggtgaaattgactaacacctatgtcatagtaccaagctttgaatcaactatagttgggaaaccaacaaatgaagaaatttacaaagttgtttgtgaattgaaagatgaggtcttacgcattgatgtgaaggtaaacaatgcaaaagagttgttactgaagttaatttcaagttaccttggcaagcataatataaatgatgtctttgagatacctaagatgagaaaagttcagcgctctttctttcaaggggagacccaaaagaaggatgattgtggtgtggaccaaaaagatggtcaaagtatggaggataaatctagagagcctctcgatgatgcactaagtgtcccttcacttaatctaacaaagataatggtgatgttccgattgagaaggctaattctgatgagtcttttgaagagataaactttttgggagaagaagtcccaattattgtgaaagaagattgagaagactgtaaaggatgatttttatgctgatgcctttgaacaattcaaaaattctagaggaaaggtgattggacccttcaatgttaagaagctttattcgaatcaaatgtatgagttcttccgttacatattctctcatgctattgatccaaggtaatctcctctttcttgaatattgtttatgtagttgatattagtacatttattgtatttcattctttattttgtgtttcacccaagtgttagtccattttggcaaggttaaggttgatcctcgtgattttcattgcatgcgaccggacaccgatatctcaaaagtagtaacattcctagtgattattattgttagtttatgcagtatgtctcggtactccttttgtcaccatactactatatggtgattattatttagacttgtgctatttttagttcacctcgtgcattttgtggaacaaattactactactagtattgttagtccttacactttttttttttttttgaatgggaatggatgatattattaatttaaatccgcaatcacaatcgatttgagagtactaggaagagtactctccgaaaaactacgatcagaccaataacaagagccacgagccaaacaatgggcagccttgttagcagatcgcttaacatgagaaatagttacattaaataaagaagacaataaaactttgcagtcttttacaacaattccaaacattgaaggcatatcaatttgactttgcaaagcttgaacggcagtaaggcagtccgtctcgatcaccacattcgacagttgtgagtcttttatccaactcaaggcttcttttatgctaattatttcagcgaaaggagcattagagaagccatacgagtaggtagaagaagccaatataaccgtcccactagagtctcgagctatgaaacctgtgccaaaagagttggtagcatcaaatgtagctccatcaacattgattttggtcattccttcagctggtttggaccatgagttgcagctgctggtgcaattggagtttagaaaaattggctcaaaccgaagactttgtgctgaaagccattgtccaagtgattgatgagcgatagagactacatcagctgcagaactaacacgattattccaaatgaggttgttagcttttacttgattagtggtatattgtataagttttttggaacaattttcatcatactactatatggtgatcagcatttagacttgtgttgttctttgtttatgcaatatgtctcgttaccccttttgtcaccatactactatatggtgattatcatttacacttgtgctattgtaagtttagctagtgtattttttggaacaaattaacagtgtagtaattgtcatagcttaactgatgtatgtagttaagataatgacattatttctgtacttgatttcgaatttatcatatcatgaaatcatattaatgataccacctgactatactataatggtttctttaattgacatgtgcaaaagaatttgttaatattacttttattgattccatattagaaattataaagggctatttacaaaaatatgggaaaataaagataagttttga

SEQ ID NO: 239284 - DNA, 774 bp, Cannabis indica
taaatttgtccatactcgatgtaaatcatttatagagaatatttaattatttggctattttccatacccccagaaggagatcatggaataaattatttgaaagagcatggaacccaaagaagacccctaaatcccagttttattacctctggagccccctcgttcaatgtaggatcatccatggtaagagaaatagaacaaagaaatccactcaaaaatgaaggagaaaggaagaaaaattgcacggtagagcaaagagcgaacaaaaaccctaaaggttactctcttcgagagaaaactcatgttgagtcaaaagaagttctttttttgggttttttgtggtgtaattttctctcaagagctgtaaattattattttgagtaaatatttgttaaaaaaaaatcacaagttttttcatttacatgttttaccatttcacttgctcaagatgtttgtgtaaatctctcaaatatgcgtataaatctctcacatgtgtttttgaatgcaaagattgagaaaaatgttgaaataagatgtttgatagtctcattatacattgttattattttttttttcaaaaatttagtcattattattaacaaaacttaaattttatattggcatctcacacaaaaaaaaaaagttttaggcaaaattaatatttcaaaacaaattattataggggtaagaaaaattcaacttatctattaagatatatgttttttttaaaagaaaaaatgcaaaaataatgtgaattctgtttttttttttttt

SEQ ID NO: 239285 - DNA, 2582 bp, Cannabis indica
atgtaaataaaaactaaaaaaaaaactgttaaaatattagaaactatgtacagacctattttttttttttgttatttttatatatatatttttaaattattcatgttatttttgtcttaaatataaatttagtttaataaatatgagatttcatagtagaaaattatactatatattataaagacattctttccttttgaagttctaaaaggattcatgattattcaaaataagtaaacaaaaaaaaacatgatattatttttaactaattaaatattttgtagtcaataatccaaacagagaaacaaagttagttaacaaccagttttgttatagttgttagagtttgttccaactgtcttggacaattagtttttttaattaagatctcacactcctgagctttggtagttagactgttattttatatatttttcattttcatgtagcttgtgtatgtgaaggcatttaggttctcatttacacttgaaaaaactgtgagattggattgaaataggtttgagagaatgacccaagttgggttcttggagtatcacttaagcgaatagcaagaagtaggtattttgctctggagttgtgttcgatcttagctgagattgtgatcataatcatcaattgaaatacaaaatatcacctaagggaatagcaagaagtaggtatttgtttttggccgaacctcgataaaaattcgtgtatcttgtggttttaagctttgatttcatttttttcttttgatttctactaattattattactttgatgtttgttgaattcagtattgtcaaaatatgaaattttatttttcaggtatgccaaaatagatagagagtttataaaaagagggtgtactgtaaacttaacaaataataatatacattaaacaattagtaccgcaatatatacttaagtaataatttaattatatttttaatatactatattcattagtgaaaacttgtatataataggtaagttttttcattcagtttttttttatgagaattgaatgtagtagttacaaattatttataaagatttaataaatatatagaaaattcttgttattatttttgcttttgggatagttttttttttttagaaattttagtatatagaaacattataaataaattatttttttgtataatagtgtgcgttatagttatacaagatatcttgtctaatattcgtgcatattttatttaatcacagtataactgactattttgaattttaaaattttatttttgatatcgtaaattattcaaaaaaaaatttcaaaaattatatataaagatataatttcttaaaatacataaaataagaaacactcttaaatattgatacccaacctaacctaagaagcttcttaaatattgatatttatagttatttttttagtaagataatacttattaaaaaatgtttgatatgtatatataattaaaagttttgtgcacatatataggttattatacataataaaaaagagattgtgtacctctaactagtggccttgaccacgtcaatcataactttagatctgcaaaataaaacaaacaaaaattataatgggaatttaaactttcaagccctcactaaaatgagcaagcttaatttatgtttggttgtatattcactttttaatttttagaattatgttttaaaagtgagaacggaaaatagttttttgtcatttaaaaatttaatagtgtttggtttagattttttaaaactatttttagattttttcactaaaaaaaaataaatattttataccatgacatgaactcatcctaccccgaaccagaccccgaactcgaacttggaccccgaactcggaccctaacctaaacccgaatccagacctcggaccaagacttggactcgaacccaaaccccgatctcgaccccaacttggacccaaaccaagagcccagaccaagacacgaaccctggactccagaccaagacctagaccctggactccaaaccaatactcggaccctagactccaaaccaagacctcgtactccaaactctgggtctgggtcttggtttggggtctgtgttcgggtcttggtctgggttcgagtctagggtccggggtttgggtctgggctcggagtccaaggtcttagctcggggtctgggtttgggctcgaggtctgggtatggggtttgagtctcgagtccgagtcttggtccaggtctggggtttgggtccagggtccaaggtccgagttcggggtttgggtccagggtccaaggtccgagttcggggtttgggtccagggtccgaaattcgggtcttggtctgaggtctagggtccaaagactggatctgggtcgggatttcgggtatgtgagcaaaaatgtaaaatataatatgtttaacaaaaagaaaactattttttaaaatagaaaataatattttgatattttctgttttctaatttttaaaaattcaattttttaaaaaaattgatttttaaaaaaaaattggccaaacgacccctattagttcttaaaagttattttctgtttttaaaaattgaaaa

SEQ ID NO: 239286 - DNA, 1880 bp, Cannabis indica
aaaatataatgtaaaacacaatttaatatatcatatattgtttcctatttagtttaaactttttttctcttctgtgaaatgtggaataggttggatgaggaaatgattgagtcacttttcggatacagtctacaaaactcattaaagaatgatgaagcaaagagcaaaactccttctccaagcaagcatgtgttggagccaaagagattacagaacataactatactctccaaagccatcagtgtgactggtgagcaagtatgtgaggcaatattacaaggtattcataaaattcttgattagatttctgatactatcatcaaacatacaagaatatgctgctttcatttgtagtgtacgtgtaaaaatgaaagtctaaccgaacactgttgaatatagcttaccccaagaaatgcatacagtaacataaatacacatatcactcatccaatccaatgcaagttttttttttatccataaccagtataatacttggttatcaatgaaatattagtttaactaaacgggagaaaaacacagggaatggcttgtcattacaacagctagaagcacttgtaaagatggcaccaacaaaagatgaagaagctaaactctccggctacgaaggagacatcactgaactggggtcagcagagaaatttgtgaaggccatacttaccataccttatgcctttcaaagagttgaagcaatgctttacagagaaacttttgaagacgaagtggttcacctcaaaaactcattttcaatgctagaggtaaccatgaatgaattaaaataaaaaatacacataataacataataatctcacaaaccttacggatttcgttgtcatttcactcaaatatattttaatactgtgttaggaagcatgcaaggaactcagatcaagcagacttttcttgaagttattagaagctgtgctcaaaacaggcaaccgtatgaacgtgggaaccattagaggaggtgccagagctttcaagctcgacgcactgctcaaactagccgacgttaaaggcaccgacggcaagaccactctgctccatttcgttgtccaggagattatcagattagaaggaatcagagtttcggatagcataatgggaagaattaaccaggcgaataaaaccagaacccctgaagagaaagaagaagattacaggagaatgggactagaactggtctctggccttagcactgagctttacaacgtgaagaaaacggctgccattgatttggatgttctcgccagctctgtctccaacctgtatgatgagatgtccaaactgagaaagcttattactaaggacttgagaatggatgagagaggtgggaacttcgtaaactccatgaattcgtttctgggttttgccgagaagaggcttaaggagctacagggagacgaagacagagttctgtctactgtcaaagaaattacagagtactttcatggtgatgtgagtaaagaagaagccaacccacttcggatatttgtgattgtgagagactttcttggcatgttggacaatgtatgtaaggagcttcgtagttcaaattcaaaagctcaccgtagtccgaaccctctgtctccgttcaaatagatggctttgcttctttcttttctttttttttttcttctttattgtgcgttttatgaacatgtaattctcatcattaatcaaccagaatataatctgattttgttttttgtgtaaagatttggatttttttcttaggttgaattgtttgtcaacttttagtaatctggtattttatttttgagctttcttaagtggagaaacaaatcttatgttgtcgtaagttgtaaccaatgtaaaaagtgatctttaatgtttctttt

SEQ ID NO: 239287 - DNA, 1628 bp, Cannabis indica
caaaatcagtgtgtaaaaacataggtgaagaactgtaaatgaatttttgattcgtctaaagaaggcaaacacatctaattaataataaacttaacaaatgaattcccacacaattagcaagagatagagacaattaactaagcaatctatcaaaaatttgtccaaagaaataattgggtacatacatacatcttatgtaaggttccacaaacatacacatagattgaacgtgtgttatacaggacatataattcgagcattagttttgagtaatagtcggaaacattattctcaccgtatagactcaacaccctaactgctagtgagctaaatccacactgaggaagatcaggaacacctttcatgtaaaccattacaggattttccttgatatcctataacagaaacagatcagaacaatgtaccatagatatatataaatgaattaggctgaaatatatgtacctgctcaacaatgtccttcaaagataggttagagctatcaagcttactagtaggcttaaaatcgtcatgtgtatctgaatcattagtatttgagaatcttctcccgtactggacgaaagatccagtagcctagtattataacagaaacattcaactactgccgttgaagatagatatagaaatagaattatcaaaagtaatttaataatcataaccccattaaataatgtacaaaatcaaatcttacagttcttgtagaactagcagtggagagacctgaaattccctttaatagcatgtgtgataatgaccttgccatgattataaagataaccctgaaactacaacagccattaatgtgattatctaagaaatacaaaaagattttaagagtacccaagaaagaaagaaaaaaagacctaccacatctgctatcaaaatttttcttttttctttttaaacaaagcaaaatttctatattaaaccataaaaccaacttcaaagcttcccccgataacaaataatgtttcaatagtaatgggaaaaacaaaaatcacaaagaaacaacaactattgatccaagacattccttgtaatgccagcatacaagaaatatcagagaatttaagtctcacagtcctgtaaaagcctaagggaccaacataaaccaccccttttgaagcattgaacctcgccgtctttgacaatggcccacattggccttctttcacagatagttccaacccagcaatgatggtcctaaccatcttagcactatggaaagtcccaactaaaagatatcccctaacagaaacagtttcagtataaaggcactttttatcaaatacaagttccttcaatcgcttacttcggggtcctaaaacacaatcctacactcttccagaaacaattccctccctccatttccacctctctcttccccttggaatatttcttggagtttagcttagaaacacattggactctgaaccatataaaaaattttgcatccagaacataagccacaaaatccataagcttgagcccccaaattgaaaataaattaagccctaattataaattcatactacaaaaccaaaatccccaaaatcttttatctgtctaatgtcacataaattcaacctacccatgaaagatggtat

SEQ ID NO: 239288 - DNA, 1887 bp, Cannabis indica
atgacttctcctttatatatagaagttttatagagagatgatatatagattttccaaaatacatataattataaaaaaaataaaaaagtaaaaaagtgagtagtgagtcactcccaccaaagaaagggttttttagactctccaccggcctctcgtacttctttccttccttctctctcttcggctgcgttttttctttctctctctctcatcagaaagaaagagagagataaaccaaagttacaatcccccaaaccctatctctctacctcttctttctttctctctcatcttctcttctatatctctctctctcttccaatccaatcgcatcttgattcaagcctcttcgcggccgctgaatctgtttttacttttttttttattattatttttttgatcggacggcggagattattctcgggagttgaagattgaggtatgcagcaggctgatcagacggtgttgagcttgagacctggtggcggtcgtggtagacttggtggtggttctcgcttcgagtcctcatcttctacttcgtcgtcttcctcatctttagcctttggttctctttcatctgatctccctcttttgcgtccccatggtggctcgccgccttcattttctataaaggtccgaatcaaatctctgctttttatttttggatctacaggtttcgtcacttttatttgatgcccttttcgctgtttttgtttttatgcttttttttaggtatctgtttgtgttaatgtggcgtgggttttattctaatctggttttgtttttttgcttgatattttcagattgatgcaacttttttcttaagagtgaataatttagttctatactgtcaaagatacaattttttttagtttgtgttatttgtaggattggatagttttcatcaatgttggatccctattgcgcttgtgttatttgtagtgctaaatggttaaatttcatatggatcttgagtgttgttttgctcgcatattaaagggttgctaaagtatgtatctttttggtatcaatacacttgcttaatccttaacagggttttgatttgtttaatctctctgttttctgggataaatgctctttttgattatctgttattcataaatcaatctaaagtcttttcctttctcttatttgattgtttgtttgttggttttttcttcatagattgtttgtttgggataaatgctgataactgttttggtagtcatagattaggaagtgttgagtgtgctgtaaccagttttcgttagaaattgtcctaattcttggtgggccacgaagcatgtgtacctgctgtaaatatggacagagagctacttgtaggctttagatgggcaacattgagctgtttattgcccataaaggaccttcaaacattctatttcctaaattttgatcattttcaatgggtgaactttatacagtctagctggttatgcaatttgtatttaaaaattcaatgagaataggtcaattatgcagcttattttggtagtagttctttcttttttgccaatcagcgccctacctatggatactaagccgttttacttttatgtttctcatacattatttctgatttgtatggttatgtaatttttgtttgtaattttgtagagtggagacgcgaggtttgagggtcgtgaacgtgtgcggtacactcgggaccaactattgcagcttcgcgaggtaattgttttttgcatgtaattaaattagtacatgtactgtgatcatacttttatggctgggaagagttttagttgctactgttttttccttagttttatcgtatctaatgtgatgaggtgcacagttttcattaccgttttaatagacttttgatattctacttttttaaaggtt

SEQ ID NO: 239289 - DNA, 3193 bp, Cannabis indica
aatttgttgggaggcttgagaggtatgagactatgatcctatacttgggttatgatttttttttttcaaactttgagacatatttagtttttattttctactaggttatgcttttttttaggtaggtttatcttttatcttctatgaattatgaatgcataataaatatttgtgagaatattggtttaatttattttttccaattattttaaattattttttttcattttaccttaatggatacccgatgggttccccataaccgatgggtattcccctacccagaatccgttggttattagacgggaatgggacggggatgggggtataaataggtagcggggatgggggcggggattgcattccccgtacattaaccgtccaatttccatctctagatataagtgggttcttttagttcgacattttaaattagagcattgctattaggcatcagtggtgtctagcaccttctcgatatatcgcgttacgattgactagcgatactttttaaaatctattatattaaattatataggactcgataattagttgtaccaatagcgatattgacacataagaaggtgctagacaccactggtgtcctttagcatttcactttagattagtagtacttttcactcagaacaattttttttacatctttttagattgatgacactagttaaaagtaccacattagcaacgtggtgtttagttctaaatgggtcgagcttctaggtactttatcataaaaaagcaatggccataattaatgttaactatttacccacccattcactatttattataatttattaaactaattaagattattatatattggtattaattgactgcaaaatctgaatctggcagtgatgatgatgatcgacgttctagatgtattataatgtattataatggtaagcaaacattacattattaatttttattttattattttttatttatcttcatcttataatattaataatgaataaatgaagtattatgcatatactgacaaagtggccaccgtttgtcgtgtctggaagaaagaatcgaaagattaaagcacaaattaggtagaaatttatttccaacttaattatttatatatatttgagggaatgaaacatttttggcttagatcaatgagttaaaatccgtggactttctagaagaaagatcaagatcgtttttttaattataaaaggaaaatcagacaaatcatgacttcatagttaatttatttaagatatacttagttggcaaggaaagcaaaacttgatcttcaagttcagagcaaaggcatgcaaagttgatgtctaaatatattatataaaatattattaatttgttccatcaaagaaaaatgtattaattatgtgaatgttcgttggactggtgcataactatcccagtattttaagtattaaaatcaggtataaaaataaataataataaagtataaaaatctgacaaaaaatatttttattgttttttttggctgaacaaatttctttttattgtcattacttataaatgaaagaaatacagatatttacggatttttttagtgccgtttaatatcgttaggatcacttcactgcatacgtaattgcttaccctatatttttttcccaataattataaattataatctgcatatttttagttaataaaaaaaaaagccatcataaaaaataataattataaaaaatctatcgtcagaattattattcttttgatttggacgcattttcttgttattattaaaattgttgcaatttattcttttatttttaagaaaggttaatgtgtagaaaggcaataaatttaaatttaatgaacagcctccagcgtgtggtgtacaactactgaatttcgaataattatgaatgtgtatacagtaaacagtatatatgtataactgtatattaattaagctatgatataatgactctttagaaataatgtatattagttagttcagcagttactttcattgagacctgggaagcttctaatatttggtgtgggaagtaaaaactaaacccagatgttatatcaaaagtctacacaatgggaactatatattgtaatgtaaagtccaaagataacactttcaacgataacaaaataatttgaagaaagaaaatgtagcatatggtaataaattaatgtgagactctataggcgtgtttctcagtttttttatttatttttttgaaagatgttttttttttttttgaacttcaaaagtgttgagctttaaaaattactaaatgtaaatttgagaatcacaaaattaaaagaatgtaagatcccaaatacatgtcctaaaaaaagtgtgtaacaaaaaagagaggatcacttcttaggaggaggcaccccgggcacgaggggcatcaaccgcgggttgaggttccaaaaaactgctacttctagtgacaaatttttagtcacaacttaaattttttatgactaaatgtaatttttggtcacaacaaaaacttacttgtgactaaaacatattatttagctacaagttgtcactaatttagttttagtcacaataaatattgtgactaaaaacacatttagtcaccataagttgtaatttttggactaatacttttagccactgacattttagtcacaacatagaaatgataattttaattagtcacaatttttgttgtgacaaaagtaaacttttttgtagtgtcccgcacgaggagctccccacgacccgcccttcatgcacacggggcacaccccccccccccctccctctctaatttttttctctgctctcctttctctccctctccccactctccttttatctcctcctctccccgctctctttcactccctttctccctcactctgctacataatctttatctaatgctacttgttccatatatatgttgtgagggagtgaccaccactttgaggggtttaagagggaattcttcctggtagcactaagtatacacaataagacccatgccacaaggcgccaacatgtaactaaatcttttaggtgacgtttggttgggaggaatgaaaatgtaagactaggaataggaatgagaattgaaataggaatagaatgaaataaaatttaaaatgcaaaaaaagttgattaaaaaaattattaaattttttcaaatcttgc

SEQ ID NO: 239290 - DNA, 1602 bp, Cannabis indica
caaacttgattgagcttaactcctctatctggaacacttatggttccagatgaaatagtcttttataatctttcaatcaatttctatgttcgcgatctgatcatctagaacaatgttctctgaggatcttgctcctagatgtagggcctagtggggacctctccaagctattttagaggaggacactctcgtaccctttctatattttttagtgttgacataaactactttgcttttttccctcattctttttcaattgctatcatggctaatacattccaagctgatgatgtggagattttggaacaagaaagaatcaaagcaccgcaagtagtgtataattcatctcaatgggagatggatcaacacactaataaattcagaaactatggtgcgggcctacaaagaagaatgcgacctcataaatatccccaacttgtttcataacaagattcctttgttaggagaatcactgtgcaagtgtgcgaatgtatttggtgtctagggctgggcacatgtggaagtaggggcacatcttccactccaaagttactttgcacatttctgtgcggaagtgggtatagcatccttccaactgattcctcaggctaacaaataactggcgggatgggtcatcttgttcaaggaactaaaagttgaagttgcaatactagaagaaattcttactcttaccaagtaaagtcaaaccccatgtggaagaactgaagcaagattaacttctacaatctagagaaacgattcaaggtgattttcctgacaaacaccttaaaataaacctacttcttctaggaccactggctcttcaccattggttttcctcctaaaagaattctaactttatcattggattttaacatcgctggtaattgacatcattttttcttttttctataggatttcgttgaatcttttgatagagtctgattggagcttcctcttcttattattttagacaatgtctcttgttcaaactcactccttttctggtagaaagggagaatttttacataggctttccccagaggctctacaagtagaaggtttggtcaccactacaaaccttaggcgacttagtctaatcgcccctcatcaaagctttaacacttataatgctcgcaaagtccataatgactatgttgatgttaaagaagtcatcacaaaaatcatcgaggaagaggtaaagaaggccataaaaaaggatagacgctagttggaagattgggcctgattacatctggaaccaatggatgaaaagacagagctagaggtttgtttcaaggtagtcattccggacggaggcgctccaggtgctagcatatccaaaagaggtaactctcccttctgtctattctgcgctcaacatttggaagaattagaccacattgatcagggaggatttgatccctatttcttagaatttgaccatctcatatatcccatgattcattattatggtagggtagatgaaatagtaggaagtccaaatcattttcttccaccttcccaatgtgttagagtagatctttttgtcttgatgaagagtccaggtttcttatagtacagtagcttctaaggccaaga

SEQ ID NO: 239291 - DNA, 4050 bp, Cannabis indica
tattttaaagaatagagtaggaaaaataataggagtgtaatgatttaaaatctcaacattatttaagacattaatagagtttctacttactaaattgaagaaatgttacaattttaaaaatattaggtccttaaaaaaaattattaaatttagactgcttacaaattcaaaactttaagtacttatgttgctatttactcttataagaaaaagaaatacaatattatctttttaaaaagttgtgtttaaaaataagtatgttgtataaatatattttaggctaattatgatttttgtcccttgaactttgacatataccaaatcatgtctcctgaatttttaaggtcgttaaaaatgccccctgaactattgagattgttatatttaagaactttttttttttcaattttagtaaaaaagtctaatatggatgaaagttcatgggccataatttagtacatgtcaaagttcgagaggcataatttggtaaatatcaaaatttggagagcatgatttagtacataaacaatcactaaaatagtaaaattgaatgaaattagacaaaagtccttaaatccaacaatctcaataattcagggtatttttaacgaccttaaaaattcaagcaacatgatttgatacatgtcaaaatttaggcgacaaaaatcctaattaatctatattttaatgcttcttatttatttatttacttatttatttaaaaaaaaaaagtttaaaatatataaattgtggaatttggaagtaatggtagagggtaatatggtaaaagaagcaaagagcaaaaccgggtcagcgttcacgaaaacgaagaagaaacggtctcgtctcggaccatttcactcgcactgcttacatatataaccctcaaaaatcaatctttatttagaacacttcaattctctctctctctctcctttttctccttttcaattttcccgagaaagtgagaaagaaaaatcaaatttcagttaatatgcgggccacagagaacaaccagggttcgtttctgaaccgaattagtatacgccgcaatcagattgtgtctatggatgtaaaccatgaacaagagctccaagacctcgacctctttcagaaacgtgtcagtgatcgattctctaacctcttttcaccctctgatgaatcccctatcgccggcgccggtgaaactgccctcctctctatcgcctggcttcggaagcttctcgacgtttatctctgctgtgaagccgagttcaaggtgcttctcttaatgggtcgggacccggctcatatctcgaaagccccgctggatcgtctcgtaccggagcttctcgaccgggcagtgaaatctttggacatttgtaatgctgtcactcatggtgtcgaggcaatacggcattgccagaagctcgcggagatcgcggtttcggctttgggtcagaagccggtcggagatggtcaagtccggcgagccaagaaggctttgaattcattgattgcggccatggcggtggaggacaaagacggcatcggaggtaaattttcagacagagcttggtcgtttgggcgaaaaggaggggcgggatccgcctcgagtaaggatcgaaccgtcgggcaattcaggtctctctggtggggaatggctaaagggtggtcggcggcgaggcagcttcaagcaatgtcgtccaacttggtggcgccgcgtggggctgagtcaaccgggttagctcaaccggtttatataatgagcactgttatgatgtttacgatgtgggctttggtggctgcgattccctgccaagagaggactggtttggcgactcattttccaataccaaggcatttgtcttgggctcaacccataatcggattacaagagaagatagccgaggagtggaagaagaaggagaagaaagggtcatttgggttattggatgagatacagaaattggagaagctgggcttatccttgacggaattcgccgagtcttttcagtttcaagcagagtctgatcggctcgaagaggtggcgacccaggtggccgaattggctgaaacttgccagaagatggaggagggtttggttcctttgcagcagcaaataagagaggtgttccataaggttgtgaggactagaacagaggtccttgaagtgttggaccaatctggtaaagtgtctaccccgacaatgtaaaaataattaaataaaatatatgtgtggtttaatgcttaatcactcactaatagtattgaggtaaaactaaaatcttcatgatcccttgttcaaatatgatcttttgaatcctttttttggttcatgaagacatggactcattgaacctgaaaggttggatcatagtggtgtgtccatagcggtgtcaaaatattttgattgagcttatagcttaatttaaccactcagggtgtggtgaagtttgctttgattttttttttcttttctttttcttttttttaagcttaatgtgaattcttctctttttgagtaacttgtaattttgttattttggtttttttgagtacataaacactctaattaaagaatgtagataaagataaccaaatttttatttgttcttgttatgttccccaattcacgatggagatgattggaaaatttgcacgccattaaatgacagcctagagaatgtggttgccatgttcatatgtgttctggtttttctttctttttttttttttgaaagttgtggttgtcatgttgtgggtggtgccgatttcgttggaattagtccctaataaaaggtatctactgtacattctacaaagagaggaacaattatcgacttttgatcacattaattatatatataaatattttaggtatattggacttggtataggccttcctaaaaacaataattcataatgtttctttgaataaataaaaaaacaagtgaagtgaatctataaatataacaaaaaggtattctaccaaatgcatgacgacagtgacgacttttatcctatacttgtaccgaaagaaagagtaaacaagagaggacttcgtcagcttgattcttcttggcgcaaatagataagcacttgacagtgatgactgatgaggttaaatatattttactcaggtcactcttttgtatgcaattcttgataatattattatatagttacttcttttttcttttcttttttttaatggaaaatcaaattttattaataattaacttctcctaccaaataagagaacaactcagttagagaacaaccataatcaagctatgcttgctaaacaagcttggcgcattttcacctctccggactccttggttgctcagctcctcaaagccaagtactttaagcgaaacgattttctgcacggtgctattggtcactcgccttctttctgttggcgtagtattctctggggtcgggagctcctgcttaaaggcctcatttggaaaattggggatggcacctcgattaatatttctgaatccaattggcttccttctcatgataaagtttttttcaaacctgggatcctccctccttctcacacagtttcctttttccttactgatgatcgacattgggatttagacaaactaaggacttactttgatgaggagttgtgttctgccattctttcggtgcccattgatcctcataattctgatagcctcatctggaatcatcatccctctggttgttttactgttaactctgcgtaccacttggctaactccagctgctccactcctggcccttctaatccctttacctttaaacgttggtggacctctgtctggtcttccaacattcctccaaaaattaaacacttcgtttggaaagcgttccaccacatcctccctaccagccttaatctttttcatcgccagtctgctccctcacctcaatgctccatttgccactcccaaattgactccaattctcactctctaattcaatgttccagagcaggtaaaatatggaaaaactcttcttttcaccaattttatcttagtaatagaaattgtgatatcaaagaattta

SEQ ID NO: 239292 - DNA, 1113 bp, Cannabis indica
ggggactattaaagcaagtagattggatgaggctctaaaagttttctgtaatatggagtcccaaggtctcatgcctaacacaatgacatataatatagtcatttctggtttagtgaaatcaaatagattggataaggctatagatttatactacgatcatgtaggtcgtgatttttccccatgtcctcgcacatatggcccgctcatggatggactttttaggttaggtagacatgacgaagcaatgcttttcttcgaggagatggcagaatatggatgcaaacctaactctgtgatttttaatattcttatgaatgggtttgggaaaacaggagatgtggaaattgtatgtcagttgtttaaaagaatggttaaagaaggaataaaaccagacttgaagtcttacacagccctactggaatttttatgttgttcgggaaaaactgatgatgctctatattactttgaggaactaaagcaaacaggccttagtcctgattcattctgttataaccatttgattaacgcacttggaagatcacagaggctagaagaagctctatctttgtacacagaaatgcagagtagaggaattgttcctgatattagcacatacaacattctaatacactgtcttggggtggagggattggtggaacaagcagcgagtttatacaaagaagtacaacgtaaaggtcttgaacctgatgttttcacctacaatgctctcattgaagcctacaccttggcaggaaatgctgaccatgcttatgcagtttatgagaaaatgatagttgatggctgcgagccgaatgaaaaaacgtttgcataccttcctactaattgctaagtatatttcagggttcaacacaaccaccataagagtagaatatctgcctaagatcttcatttaccaggtatactttatgtactgtataaaaatactgacttttattacatggttaatagataaatcagcttatttgttccaaaattttagggtggatgatcacacaagacaggctgaggcttttgctatgttatttaaacacatcatttcaacttgtcccagagtatattcaggaattttctctcttacaaaatatgggaaaa

SEQ ID NO: 239293 - DNA, 2382 bp, Cannabis indica
agccgatcgtccgttagcccgaagaatactcacagtatacatacagaagatcgaaaaagacccctctcactatgttgtcgtaagtattctatgattagttaaaatctatgctaataatgtttcaatattttgtacgctgaactagtagctttatagaattagagctcttatggattttttacttagtgaatgacaaaatattcgtctatgtatagatagcttatgtatattaaggaagggtagcgcataagaattgtttgatccatactcaagaaagataatatcaacaccattacaaactaattaactttggagaagactaagatgggctacacaaacaattttgtggctaatcacaagaaaacatgaaattaagataatgttaaatgtagaacagttcttattgattttctgataaccacacttggagcaatctttgcaactacctactatgattactacatcattgttcttaggattaaagagagcgactatgctagaaaaaaaacatcaagattactttatgactatgaaaaaaaaaaaatctagtatcgaataacatcgggataggaagaacgtttctcttttcttacaaatttagaataaattgtatgagaagttcataaaactttaatttatatatggaatagtactagttatgtttgaaaacgttaagtttagatatgcatagggagtttttacttagaataaaactctaatgtttctattaagtcaaccctttctcacgtttagactcatattgttagaacttgctatcgtaactagaagatatgttataatcaatatgagaggaaagaccaatagaagtgggggctaaggatgagtttttccgctgacccacaaatggtcgatgatctatagaatgaaataacccctaaggctaacgatcttataggggaattagtgagactatgagcataattgagacgatggggatgaatagtttgcataggtccaacacaataggtcgctagcaccagcggtgcaacctcaagcacataataaaaggtactagtgtcgaaataaatacggatgcgtggagtaggatctgtcttcgaacaattcagaaagcagtctccacaccttgctattaaatgaagtctgacaaacaagagtcagtgaatgacttagaatagtggaagttatactggactaagacatatattcaatgtaatcaatttactaaagaagaatgaaagaatagatctctaaagaacaaatacaatcttgttggatattctaggattgcacacacctaaattagatgggaaaaatatgactagtatatgtgtcaactttagagataagtctgctataggattttggcccgggaaggtcagtgccataatataaaaaggagtgtagtgtgccagacataatccaaaataaaaagttggaaagagatttggttagaaatcttgaaataaaggactatgaaggtatcttgaacacaaagagataagcagatcaacaaatattagattgcaaatggaaaattgtaatctttaaactcaaggttaactattttgtggaggagacaacagagtaatttgtgcatggttaaaaaaaagaaaaaaaaaaaggcacacaaatgaggattaggcgcatctatcaatttggataaaacatggatgaggctatgaagaggagacaatgaagaggacaactacttgaagccagtcacaactcaacaacatagacaccatagatacgattcttgcagtggatgatacaaagcataaagaggagatcacaaatataaaactagagaaagatgagaagttaacattcatggatgacatctctagaacctaaataacatcaacacgacactaaaaacatggagcataactcaacgaaaagatgttaggtaagccacactagtattagagatagaaaacaagtgaggcaactaagcccaaagtgatatatcttgaagaatttcatgacatggaaaggacgatactggtttcagagaagtgtttggattattaaattctcaggcaacatacatggattcaaggcacaacgtaagcagatgatactacagtctgcttatatatgattcattttgtggtcaataacataagtatgttggagtgtcatcacaaggagaaattaagaggtaaactttcaatgagtgccaatttttggttaaagaggtggcattttagtcttatagtgctcaagaagagaatgacaacaaatctcttagaaagataaagcaattaagatctaagaattttgacatattagaagattttctcgaccttgaaggctagtaatggggacttctagatggactttccaaagtcagatactctattaacaaacgtctgtacaaacaattgaagatcatcc

SEQ ID NO: 239294 - DNA, 2066 bp, Cannabis indica
aaaaaagaaaaaaagaaacatagtaattagttatttagctagtgactaaaccactaaatttaattttacctttttataggacaagtggataatatatatttcgtattaaaatttttaatttttccataggcatattattaagttatttggtaacttgatgataggcaagtggaaggcataatatgtaggtgaattatcttaaatattttttaaaaaaataatttacggtttgggtttctaaaatggtagtagcgctaattgcaataagtatttctatacgattttttgttacaatttaagttacagcgctagttgcaataaaaaaaaaaaaaaactattttaaattgtaaaaataaaaaaatccctaaaattgttataattaattaaaaaaatgattaactaaaatatatatacatttttctcattattttttttttctcggctttatgtgggttctccagtgctccatgctccatgggacacatgttccttgtcactatatatataagatgtcttattacagctcttctcaaaaacactataaccacagctctcctctcctttgtcactgtgtcatcaaaccagaccatttctctccttcaatatatatatacacattaatctaattaatctttaatttcagagacacaaatgaagagtaaatggctgatcattctcctccttattttcaccaccttcgatgattcctatgcaaaacaatctaaacccatctcagatatcttcaacattagccacctctttaaccaaactcatcaaccacaatctcatgacactgacacccaactcaaattgtcagctcccgttgttcttgctggagtcctctgtttcttagctgcctctatatccagcgccggtggagttggtggtggtggtctcttcataccaatcctaactataactgcaggcttagacctcaaaactgcttcaagcttctcagctttcatggtcactggagcctcaattgcaaatgttatatgtaacttggtctcaactattcccaggtttggtgggaagacattaattgattttgatatagcacttttgtcacaaccttctatgttacttggagttagtattggggtcatttgtaaccttatgttcccagaatggctcattaccattcttttcgctatctttcttgcttggtccacctccaagacctgtagaaatggggttgtgtgttggacattggaaactgtagtgatggagagacaaggatcgtgtgcagatttggaaaatgattctaggaaagatattattgaaggagttcatcatgaagagatcaatagtagtgttaaagaaccccttttgggttcagaaagaaattgtgaacatggacttccatggatgaaactgggggtcttggtccttgtgtggtgttccttttgttttctctatcttcttcgtggcaatcgttatggagaggtacatactatgctttcactttattattatatcttataacttcattgctctttgtattacatcttttgctataacttattaattaaagtacaaaaattaaggtaaaatattttacaaagcacaactgactttttttatcttcattaattaatggtatttacacaagtagaatgcttgaaatcttatttggccagtttctctcagattcggaattttgatgtataagttagttcaatataagatatgtggatgtaaagtaggaggaaaaataattgtcaataattaaaagtaggaccatttcaaaaataaataaataataaataaaagtaggagttaacataggagaagaaggattccattttactttttctcttttttaccaattgagtgaatgtaattttagagtctaaggtcatcttatcttggtccatcagaaatacagaatagagatttgttaaacttggtgctagccacgtggaatttgatccataaagattctagatattttttttttgtctttcttcaaagaaaaataattaaaattaactagtggaaatttaatcaaaattaaaatcataggatagtcattatagtggatatcaattttcaatagctatata

SEQ ID NO: 239295 - DNA, 1674 bp, Cannabis indica
tatgatgagtttcaccttcttcctcaataacaccgagttgggtcgaggcacgatcagctttgctagagctgagtgattaaggttaaggctagggacatctcaattctcaatcgttggttgcaccagagatttttttcatgcaccatgcaattgacactattgagtaaagtaaggttccactagtgttggtgattggacttgtatcaagatcaacattaaactaatttggggcctctactgattgttcaaattaaactaattttagcgctgactacttttttatagaatttcacgtattatgttgatcatcctaaacatgacttgtacaagtccctaaatattgaatagaacatatagaattacatttatattctcagaacaataaagtttctaatgagagaatggttagaaagagaatcaggattatttatggggtgtgtatctttttagtattctgtgttttatcagaccatgtatttaattaatactaattcgattaataaaattttaaaataacatagaatatgtagtccaattaataaaattaaattatattgattaaatttgagtttaagaataccaaatattcttgtgaggcttttgatgatgattactttatggtggttttagtacgataaaatctcggtattgtttggtaatatgcagtcaatattagatgttccagatttagcccataattacttgtcggaattcaaggagtatgttcgacaaggttttcatttgggattatgctttgcaaacccagttgaaaaatgacattcttggtggatgccacctcctcctgattcatttgctcttgtgattgatgcttcggtggttcctgagagaagctttgtcggattgagtggagtgatacgggatgttgcgggtgtggttgggctgacttggtcatttggtgtgctaggtgatttttctattaatgtggcagagttacttgcttctactgtaacaattggttggattaataagtttcacataaattttatttttaagtttattttattagatattaattctttattagctcatgttggtggtggttcttgcagcgctatttcgcgatctatgaatggtgtttgctcacacattgattatctcttgttactagtttaggaaaagtatgcatggactaatgattttgagttctataacatggaatctatgttaatgaattatatttttcattccaaaaaaatatcatatatgaacattatagagaaatcaaaattttaagtccatatctttatttttatatatataaaacatataattaaaatatatatataatatcatatatgaacattatgtttttttgttttgtttttcctttgaattatgcaaagtagtgtaatttattttattgttatatatgttatatgtatttaaatttatttcaaacgagtataaaataaataaacgatttaaactctatttttgtgttaattttttttcaaattttgtagaatgtctcaaattgcactgcaaccataaaaaaaaactgctataagacacttatggtcttagcactttgttgaagtataatattataattgttgcaatttaatatcgggttacgtactaataatatattagtagaaattaactaatcaattataaatagcaactttatcgtagtgctagacaccaccactc

SEQ ID NO: 239296 - DNA, 1041 bp, Cannabis indica
tttttgaactcgcgtagtaaattaaaatatcataaactttattttttgtattataaactacttagaattttttaaaaaaagatgatactataactattatgattacattcataaaaaaaaatttgagaaagaatattccaatatatgatttcatatgtgaaaattgactaagaaattacaattagcacttatcttattcttaataaataagaaaactaatattcaactttctataagtctaataataaccctttctattaatctcgctataaaaaaaattgaataagtaataagcacaagtagtttctagtatcttatatcgttattattatataatttaatgtaataagttttataaaatatcattaattaattgtaaagtgctacctcaaagtagtattataaagagcatctccaatgaaaattgacttttaatagttaagtactccaaaaatataaactatgtattattttattaagtatttagaataaaattgtgtaaggaccaataagacaactattttttagatgccctctagcaatgcttaatttgaatttgaaaactgatctagtttcaattgtgggcccacatacaatttattaaaaaatatttttttttacaatttatatgaacacaaaaaatttggtgaaaggcctatatggtctcatctcctcatccatcacttttattattcgtatgtaaaatttcccctttcactctttttttttcttttttccctataaatccaagtatatgatgtgaagtactactatcttttcagacaaaattcccaaataaacatgtttactaattaattaataagaaaaaaagaaaaacgataaatgtaagttatatagtactgcatatgatttataaatttttactactcaaaattttacatgtatcttttaaattttttggattgttcagaatttttatatatggctcaattttttactatttatttcatttgggacaatatccacaacatttcttctcaagatgatgactattttttgctcatcaatcttgaaccgtat

SEQ ID NO: 239297 - DNA, 2686 bp, Cannabis indica
ttttttggtacatcatttaaattaaacaattataactcacagacatgacgacgctctttaagcgttaagtaaagcttgagagttggtcttgaggtaactttggttttttctcaagtgagtaaacactgcaacccacgaatcctcagataagtggagagtgctcacacgtgtagcaccactcaaaagtcatgacaaaaaaggcctagggggattttgtatggtaagtgaccaatcaaggcacttctttaaacactagggggcacatatgttatgttatgatatacgagagaaatatgttataagagcattcaaaaaatgttgcacatctatgttagtattctcagggtagcgataaatttaagtaaatagtgacactattcctagtatttgagtttttaagacatggtgtaatgtgcaattgttaaacgatcaagtggtaacagataaagtagaacaaaaaaaattataactattggaatcgaagttttattaagttggaaataatttatgatttaattaaaaaaaaataatttcattctactaaagcttatccacgttcgaaaggtcgcctgagaatgacaaactatcacactaaatcttaatgcttaaaacaaaaaagagagtggactcaaagaaggtcctataggcttgttacattaacaagagtctcctccttgccttcactctcagcaagaggcatctcactaatagaacgaggaatgttgggacgctcaacgttgtagccttcaactcctaaagcttctttgacaatcgctttgccaacatccacagcaaagtcaacttctttaaaagattcaatagcaaaaatgtctctgaacccgctcgatgaagtttggtacctcattttcaagaaaactagtattcttgaatgattgattcctaccattggcgacctaggcagtataaattgcattgaagcacatgtcattgtaaatcgtaacattaattgctatgatgtgtggaggcttagtgctaattaattgctacaacggaatgttctcagctctagcaccaatcagggcctcattattggcaagaagccaggagcctttctcacacaatttctctactaagtccaaacccaagtttggagcagcatgttcaaaatcataagagagaggtcaattaaagtcttctcatctacaccaatagtgtttgacttcttcctaccagagtcatgagcaagatgagcaacatgagcagtttaactccttttcttgacctttttctttgaagcaacagaggcagctagataccttgcaccacttccatagctggaggtttaggctccttcagcgttagaatcttcctcttcaagttggaacatgaacccatggcagccaagaaactcatattatttacaaaaagtaaagaccagacattagtacaacaaagaaaataagtcaacaagtgaagatccacaacatggagcatcagcaacctgctgattccccatctttctctggagcagtcctagcggaggtaacttctctgtcatcctggtctaaaaacatagatattctccctgaatattcttttctcctagttcaatacttacctccccttccttcttttgtagatgaatccgtgcagattctgggaaggtaagaaccgcatagacaaagattaactacaacttctctttaaagatcagcctaaactccatgcagagtatttttcatccagtataagcactacttctagttttgacgattgggaggttttaatcaacgaagctaaaccttccgtaccatctatgcaaaaccattactatctggatcacatcggtgggagcctgtacaatcaattcgtttgggaataaaacaaagggttaaggcagtacctgccttttaaatggatgtacgtagtctgtacaaatgttttgaacacccttccagaggctgacctagagccttctaggagacctatagtcaaagcaacaatagtagttatagctgttgatcatcctttgtccaaacatttgcctagctcaagaaacatggctcggactaagtaaacttcttttaggatcagcgtagaagacattctttcagacaccgatgttgaagtggaagaggtcaaggaaaagggttggcataataggttttcctgcatgttgttccatggctacaaaagtatactaaggaaaggcagcctatcaatgtgtggcatagtcctagaaaggggtctccactatacgaacaaggaacttgaggaggctcaaccatcatactattaggaggagtgtggtttgatgcggacttctaccccctcaaagttgaccgagaagaagttgaggaatttagataagaagggactgctcgaaaatgtggtggtcatccttcttttcgacaggaatttgaaaaatcacaccgaagaaggtttctgggtgtggtccagcctgcacgctcagtagggtgccctcctgctaattcatccatactccgtgaagttggctaactattacaaaattttctcgaggcaatttacacaaaaagggattaagtatctagtcgtgatgtacatcttctacatgcactatagatggagggagccttcaccctacaacataaattggttctttgatttgaagacttgtctaggccatcatcgttcgagctatttttatttttctcaacttgattgcatgtggctgatcaacaaa

SEQ ID NO: 239298 - DNA, 1764 bp, Cannabis indica
attagaaaaaaaaaagaatttcgggattagttttatttcaggcataatattttaaaattaaggtatttttcagtgacgtgacaaggtattattataattgagatttgttaagttatatttgtaattattttatattttacgtatatttttaaaaaaatccctttttaatattacaataattacattggactggtctaataaatattatacagcccaacaatttttttttttacaaaaatacctcttcctctacaatcatagccacaataaagaaacgaacaaaacccgctatggtaggagtttggcaatgatgaaacaacgttggcgacgaaaaatcaccattagttttggcaaatcgacatgagaggaacataaaatcaaaccgaaaatcaacccaaagcgattgaagaaagattctacaaaaaaacgaatctaaaacataaactcaaccctgagaatgaatccaaattctagaaaactaattattataaattcaatttatacttaagatgtagacatgtaagaaatagatctcgagttttccaaccaatccaagtcatgtatcatccagaaaatacatatcactacaattgctatattctaattattgcattaacgttgttttttagaattttaatcttggaattattcaattacaattgcgacaataaactaaattcgtattcatctcgcattatggatctggccatgtaattttgatattttttgttgtaattcagttgcattacaattttctattaattttatttacgcttagataattgacgttgcaatacttatacattgatcaaattacattgtttttagtgttatttgcaagtattttatgtatgcaatccaacacatgcctctcataaaaacaattataacatagtaagtttattcatattttaactttggttgagctgatgttgagttacaatgttcttacagttgtttcttcacaaaataacctcaaaactacaagtcgttgttcattagtctaataatagttggttaatttttagagaaatttacggagggagacgaaattttaaaattaataccatgattaccacttttttttttttattttcaatcataatacctttgcattttattttttttaaaacacgcgtatacactcgaaaaaaaatgagcagcacatcaacacaaatagactaattgtttccttattcttttctttcctttgttttttgctctttttttatttgttaaatatgaaacacacaaatgttaaaatattaataattttctttaatattataaaaactttctttcttctatttttatttcttttttaaaaaaaaaaaaattaaaaaagtttttttttagtcgcactagtaattatttaagctaaaaaaaaattataccatcattatctacttttttaatgcaatcgttttaacatatgagaagcacatattttttcttttactattatcagaaaaaatgactaaaattaaaagtaacgttttagtttcttttccacttaatttattgaaaaaaaaaaataaattttcaaatacaacaaaatttaacatatcaattataatttagtatgttactattttttttataattattttatattttaaagttactaaatcatattttaattttataaaatacttttcacaagtttttaaaatgacttataagaaaacaagatagtaccaattttttcacttaaacaaaattcaatgtaccaattaatttcatgagttactaaaaagtatttta

SEQ ID NO: 239299 - DNA, 2902 bp, Cannabis indica
accacctccaaagcagttcggtttttgctttgccattgcacttcatttcgagtattccaaatactccaacacaacatggcagcttcacaagctacagtctcactgccggcaacaagaaatgtcaaaaaaccagtcataaaactcagcatttgtaccattagctgactggtttatcgatgataaagcccagcatgatcgggagaaagaacagtccaccaacacatggacaattgtctccacatgcatattacacaaaggacataaaagatcaacattaacatgttaatcaaattttgatcaagttaattatattatacataatttcactcaaatgatcgtattgcataaatacagtaaagtaatatcataatttcactcaacgatttgttgttgttttcttttaataaaagaaagatataaatttagtgagatgacaccctgaaattattttaaaactattttttttttaatttttttaaatttttttaattctttattataaatcacttgataaacgtaaatatatatgtacatataataaataaaaaaaatcccaacttttcattattttgttttttattattttaaaatttatttatatatatttttattctactattatataatgttttgatgcattatccaatactttgactattaatttttcattgattttgagagcatttataaatgcatgcgtcataaatcaagttagtaattttcttttaaaatattcataaattaattatgttttgtcaaatataaattattgactttgttttgtttttaaggtgatgacttacttcgtatataatattttatctacttgaatcaatataaacaattgtaatatgtttaaattatcaaatatatttatttaattatattaatgatttattctttcataattatcactacaaaaaatagttacttttagttgacaatattttaaatcaaaaattcacaataaaatatcatttgtgactaaaatatagtatttagttataaattttcactaatttagttttagttacaataattattgtgactaaaaacacatttagtcacatcaaattgtaattttgtgactgatacatatggcaacggattttttaatcataatgtaaaaatagtgttttataattagtcacaacttttttattttaagtcacaaattttattgaataaaagtaaaattttttgtagtgtatatataatatttattatgatttatgaattttaaatagcatatgtaatatatattataataaatgaagataagtattgacacttgattggaatcaactagcatgtattttatttaataggctaagaaagcggtatatatatagtaacgtaatagaggcaacttaataccgggggtctgtgctattaatcctccagacatcggatttgactgctcttaatgagtttgcaacccttcattactgacggggcgattaccagcaggccctgctggtaataatcaagaccggtatatatatagtttttacaaggtatcactctcccaaagtctttctctctcttacaaggttcaactcaaaactgaactatattttacaggtatgtatagtttttacatatatttcaatatttagaaatctagggttaggatccatgagatgagatgtacatgaagttctgttatttctattgtaagtgaggttgagagtttgttattgttgtaaatctgtagttactgtttcatttagtcttgtaactgtttgtgccgaattcataatgagatttaacttgagagtaacttttacaaaatacaacacagtttttggtcattgcttcaagttttacactagtaaattaagaaaaatttagtctttatagtacgatgacagtctgacccacatgcattaaaggcggataaggttgcaagaaataattgtacgatacatagtcatctatttgtgcgtatcccatttttcagcacgttcatcacggatttatattattttgaattttagcaccatagaatgggtctgtacatttcccatttttttacttattatttatcaatgataagacctagatccttaaatatattatgtactatttttgtactgttctcctcgatggattactatatataacttctgttcatgaccgtaataacaattactctttttggaaggaaagactcgccttcctacctattacttattcttttttttttgatgaatgtacaagctctggatggaggcatcttcatatgaatttaataatgtcacgatggaaacatggacgcacaattataaataatgttacaaaaatcttttaccaaaacttggacccaataaaacagaatgccgcatatgacatgtaccttgcatgcacatgcttgctgctaatatacaggtgatacattttttttggtcctttttcttctttgtagtccacaattcagggctcgtggctgtttacacgactctgaagttccagcatttcttgatggcttgggtccactgagagggcagctctcgcgacagtctcgtaaagcacccaacacatccccaatatgttcatggaatgcggctcttaggtgtagaagatgaacatctgctttgaatgcaattgccctcgacaattcagcaattcacctattacttattcattaattagtttgaatgtctatatatatatatataaatataaactagaagaaaattaggtatttggcaggtatacttaattttattctatgtacaatgatacaataaataattgaataaaacaatttattaattgtattttgaaatcgagatctaacacttttcgagttatagttttattttagatcaaccctatgtgcaagacacatataagggtaaatactattttggaccatctgttttactaaaacgttacc

SEQ ID NO: 239300 - DNA, 1715 bp, Cannabis indica
tgtttttaaaaacaaaaacagttttttagttatgatgccaaatatgtactaactgttcagctgattcccagattattatacaaaagaaattaaaataaattcagacgaaaagattgcagcaccacagttaactttaagaacatctacattcaattactccaccacccaaaagacacaacaatattattcaaccccttatagcttgagcattccagtattgtgcaaggtacgtaattgcaccactaattagtctcagagaacttgttattctcaaccactaacagtaatttgacggtgagacatcgaagaataaaaaaacgaaccaacaatgaaaaaaataaaacaaaatcgtgtcaaagacacaagactaatcgtagtaattatctaaacaaaaggcactcaaaaccacatcatagagacaagactaattatcgtaatagtaaaactacagacctcgaccaagtcacacctaatccctgagagtgcccgcgggcctagtcggagaaaaaacaacctcaattagctaagaatttagaaaaaaaaaaattctaattgacaatataaaatatttagagaaactctcattaatggttacattattttcaaatagttatttgcgaaactttccacaaagttttgctataggaaaaaaaaattctatatatagaatattgggtaaatgaatctaacctaataattaatatcgagtgtagtaatataataaagaaaataaaactgacttaccaagaattccagaacaaaatatcattttaatcgaacaataatcttcacctttagtacgtggaaaaccaaattatataataaaattataatttaagagagacacatggaaaaataataaattattcatcaattctagttttattttttcctgtctttataacgaaataaaacttaacatgacaaatatagagattgaactttcattgcagacttgtagatgtagtatatatatattgttaagggacacttaaaggtgataaacactacatactcaaaatctcttggtagaaaataagattttaaaaatggactaattatattatgttaagaagaaaaatattgggaggcctctttggggccttgggcaacggtccaccccctatctttaacatagctttgattatcaatattcagatatagttgaaataattttaatatttttatataatagtgtatactaattacaatcattgacgaagtcagatgtagccggatggagcaactgtcccgagcttagttatattaggcattagtagtgtttaatattttttattagtggtactttatgaagttaacgatattttctaaaaactattttattaaattttacggtacctgatacgtacttaattacaccaataacatataatacagagaaagatattacaccaataatacttttttttagcattaattctcactaataatatactaatgagcccttgatggttcattcatcttatcatagattagaggcgccatttttgattcgacaatattttgttcattaattacaccaaattctttcatttctatgtaaagatcttttcctctaccagtacgttgccttatactttacttttattcagtctgcctttctaatagaagaagaatatatttagatagaagtatatatataattagctagattgtctaaagaatgaacaaaattacctttgttctgaaggcct

SEQ ID NO: 239301 - DNA, 3095 bp, Cannabis indica
cctttcttataacgtgaacgggtaccaacagtaatttgtacatcagaatcagaaagctaactaacatttattctttgagtagaaagcaagttgtacatctctatctgcaatattagaagaaaaatttattatttagaagaattagaacaaacaagttaatattaaaaatgataacagagcaaacaattaattgattaaagtgatttgttgtgagttaataagagtactgtatttgtagtttccacaactaattttctttcaaccacaaaactaaaaaccataactatagagcccctttttccaattaagacactaccatagtatgattcaattcaataatttgtatatagcgtttaacattttacaatctaataatatctatacttcaattttcttctctaaaacgaattattgaataaagctatagctattattaacaacatcgaacagtagttgttcaaaggttagtctcaattaatgtcgataaatattttgatatgagtacagatgttgaaacaatggcaaataacatgcatcaatggttgttagataatgtagtaaaaatattttcaattgcatgatgatatgattttaaacttacaaatttatcactttcgatttcatttgttcacccttttgttggatgtcagtgcatatttttgaaattttccaccaaaataggcatttgttttgtggttggatcttcctatatagtattataaatagctaatccagaaattactcacccgccggaagagtttataaataaatatagatcattggtatcatcctttatactgagatataccataagactaatatgttcatttgagatctcgctatcaactttttggaaaaagtaattttataaatattcaaataattagtatgcaaaatatagaaaaaattaaaataaaaaataaaataaatatttatcatattactttgctctttgtatgtaagaaataagactttgatccatgacgactttcaaatggcattattgaacgattagcagaatatttctccaatagttgttgtatttaaaaaaaaaaaatcattagactaaattaaattaaatttcaattatcttccaaattacacataccttctatttttctgaagagaagaagtcacaaagaaactaactaatctaaaagttttatattctctagtagttctgttttaggtacatttggatctttctctccatccaacaatttccaatatctttttacgatatgtctctatcttctaaatgactttatggctagtatttcaatcttatctaagatgaatatgttagatcgatcttaaacaaacttcaattgcgtaatctaatacaaataggtttgtaaatatactatagccaatgaattattaataagatcattttacaaagttaaactaaaaaagaaaatgtgaaaagagtaatgtgcttgcaatccaaatattattgctaacaaataatattaaagtttattatttatactagttagttaattacttacttgtagtgattttagaattaacgttttatcttcttttgacacatcatcccaacgaaatatactatgagaaatcacatctcgaacttattgcccaatcatattgttgaaagcttttctattgtctccataagattttcctgtagccgcatcgaattccaccaccaatgggtttttagttttcttaatttttttctccacatcagcagctttggattggtctcgtacttttattttttgagtctaaaatctattctcattagaacttttagtaggaatatttgctgaagaagacataagtctacaatgcaagatgaaaaaaaaaagtttatatgactttcatactaaattgagaatgcacaagaataaaaaatgtaaacatgcttattattaaaatagaaaagcataaaattaaaaagaataaaaaaagagacaaataaacgtacatgcttattattcataattaaatgtatcatcttttagatgactttccttgtcttcatattcttcaagtgtatcatcttcaaaatcaccatcatcaactaaaaacttcatccacattagcgttgacatcttctgttttggcatcataaggatcaaattgcacattatcaagcgctggaagttcaatccatttacaaaaattagaagaattatcttcctaaaatattaggatgttatagtaattttcatctgcttgagcatctacattaatatttagaatattccatatattttgatgattaactttgtatgcaactctacaattagagtcattcttatcatcattagtataaaataccatttgtgcttgtgacacaagtataaatagattgtcttgacaccattgatcatgaacaagcacactagtaaaatttctatcttgttggatatttccttttctagtatcatactatttacatttaaataatagtacagacacagtccatttagatcttttgatgtccccacattgagagtacaatgtttaatgccaatataaattgaaagagcaaatataacattgcctataaaattctaaccttagtcggccaaaggactgatacccgagtccccttgagtcataactggcacttggccagaacccgtgcacttttctgctttaacatatcagtctttcttaacaacaggtaggttcttttcacatgacccactaccccacaataaaataagatctggttctacattggctcaaatggcgcctttttttttgcatcttgaacactcaagataaggtcgccatttcttattctcaccttgattgctatttaggtcaccttggaacctttttgttctgtcccataattagtggttcatttagtttttgctccctgatctgctggtaagttggcttcatatatctcaccacacccagtggtacaacaaaaaatgttgatagtacaagaacagacacaagatgagactgttgttctttcatatctcggatttgttttctcttattgtctaatcatatcctgcatagcagaatttacatgtttccagtattacggtaataaaagattttcttccttaccgtttggcgtgagcccagacagctcgctaatc

SEQ ID NO: 239302 - DNA, 5584 bp, Cannabis indica
gtaatggtggtaacgttcttgtcattttttgttgtttctttcttgatttcttcttctgtccaaacggagacttcgagattggttgagttaagtccgtctttgttgaaagcgagctctgttttttggttttgatcgagtgagttccgatcacgagtttggcgtaaacagaggaattagctattgcgaaaatgaagaaagcagaagagagttttcattgaacaaaaatgaattaattacaaactgaaatgcagacaagccttaaataggcaaagacactcaaaaaggataacaacagaaagttgttataattgccaacaaacaaccgaaataacagaggacttactaactgaaataactaactggacaatcatattaatcctactgttgctatacttgttattcttgttaccccccctcaagatggaccatatatgtcatgtatgaccatcttggataagtgggaattaagagtagtagaaggtagagcttttgtgaaagcatcggcaagttggagattgctgctaacaggaatgaggcgtatggtagatgaagcaatcttttcgcgaatgaaatggcagtccaactcaatgtgtttggttcgttcgtgaaaagttggattgttggcaatatgaatggcagattgattgtcacaatagatgaaggctggtgtaggttgcgggatttggaagtctttgagaagatattgtaaccaatttaactcactagttgtggcagccaaagcgcgatattcagcttcagagagctcttggagactgtaggctgtttctttgttttccaggagatgagacaatcgccaaggaatatgcaaaaacctgttgtggaacgtcgtgtgataggacaagtggcccaatccgagtttgaaaaactgcggaggtgaagagaagatgaagttgagtacaatattccttggcctggtgtcccttttaagtaacgcaagagatggtggagagctgttaagtgagttgttcttggacaagacataaattggctaagggtgttcacggcaaaggtgatgtcgggccgtgaaagagtcaggtatagcagtcggccaataagttgtctgtagtgtgatggattgtccatgaggtctccttcttggtcagttaaccttaaccgtggatccattgagcattcgcaggcttgctactggtgtatcctgtatcagtgagcagttgcaaggtgtatttgcattgtgagaggaagagaccatacttagcacgggcaatttcaaagcctagaaagtatttaagggacccgagagttttgagcttgaatcgggtctggagagaagcttgtagttgttgaagaatgctgatgttggggcctgctaggatgatatcatcaacatagactagaagggcaacaaaagttgcttggatcctcgtgtaaatagtgtgtaatcggcatgggattgagtgaatccttcttggagaaaagcatcagttggttttttgtaccattgtcttgaagactgtcgaagactgtaaattgatttgtgtagtttacacaccaaattagtgcccatgacattagagggaactttgtaaccggggggaagttgcatataaacttctttgtctagatcacaattcaaaaatacgttgttgatgtcgagttgcaatgtgtgccattgcttgatgttgacaatggcaagtaaaagcttaaaagtgaccatttttgctactggtgagaatgtatcaaaaaaaatccaatccttcttgctgagtgtatccttgagcaaccaagcgagctttgaggcgttcaaccctaccatcactattgtatttgattttgtacacccaacaacatcctatggcgtgtttgccttggggaaggagaacaataatccaagtattgttaatgatgagggcgagtagctcattgtccatagctttcaaccattgcttgaactgggctgcttgcttgtaactttgtggttcgaattcagctgtgacagcaagaataaattctttgtaagcttttgaaaattttgcataagacatgaatttagaaataggatgaggtgaagaagatttatcctgtaaaagattgtaacactcaaaatcttgaagataacttggaggtcgtgtgactctaaaggttcttcgaggagcagcaggtggtggtgtgggatgttcttgctgtgacacctcattattttcaccatgggcatgtgttggtatgaaggtttcctgctgtgaagtagcagtatcttcatcatgaggaatgttgttatcattatggttttgctcctgcaatatggggttaggtgcagcatcacaataatcttgtggaacataatctgttatgtgtgtgttagtaatgtgttgagaaggcaaaaccagaggcaaaaaaggatctatagactgattgtgcaaattaagtttatgaaaaggaaagacattttcatgaaaaataacattgcgagaaataaacaattgtttagtgttaatatcaaaagccctttattcctctaggataacctatgaaaacacaggttcttgcccgtggagtaaatttggttctatgggaagaaatagttgaagcaaaagccaaacatccgaagcatctaaggtcactgtaatcaggtggtttccctagcagaatttcgtagggagttttgttcttgagattcggtgtaggtgttcgattaattaagaacacggctgtcataagacactcagtccagtattggataggaactttagattgaaaatataaagcccttgtaacattaagaaggtgttgatgctttctttcagccacggcattttgttcggggtgtctcaatgcaagtgaaatcatgtattccatttttggagaacaaatccttgaaagccagttcgggagcattgtcagatctgaatcgtttgaaaacacaattctattgagtttgtatataagaaagaaattcaggtataatagatataacatcagatttttgtttaagaaggtaaatccaagtgaatctagaatgatcatcaaccaaagtaagaaagtatctatgattagagtgagaagtaacatgataagggccccaaatatcacaatgaataaggtcaaaataatgattagtaaagttgtttttattaggaaaaggtagttttctttgcttagctaaaggacaaatgtaacaaggttcaatgctttgtaaatttttagttttacaattcaaagaatcttgcagcaagtctaaacatttattagacaaatggcctaaacgcttgtgccaagtttcagccgatgtaaaagcattgatgagaacgggtgtggtgtccaacatgtagagaccattagctgattcacctttgccaatcatcatcttggtgtgcgtttcctgtatatagaaattatcagcaaggaattttaaagagtaatcattccctttagtcaaagaactaacagaaataatattgtaatggaaagagggaacataaagaacattgtgaagagtaagatggttgttaatccttacattaccactgtgatataccaaaagactatcattattaggcaaaattagtttagttgctgcaatagaatgaacgttttgaaacagatgtagatcggaacaaatgtgcctaattgcacccgaatctatgatccaagatttgtccttggatagcattgcatagttggttaagataatacctgaattcccattagatgtactcggatctatagcagacagattggtggtttgagcaccaagaagattcagcagctgctgatattgacttggtgtgagttgtggcagtagagtgttgctttcacctggacccgaactggtttcaggaggtttggaactggtttgcagtagcctcctttgatttccctcctttgttgtatccaagtggatacccatgtatcttgtaacatttctcgatggtgtgtccatgcatgctacaatgagtgcaaaaaggcctgccacgttttggttgatgatttttgggtggtccttgtgtttcaccttttcctgaagtcttttctccttggaaggcaaaagccatattagagtttggatccgaggtgttgttttgtccttttctttggttctcctcttgagtaactagatgaaagaccctatttatttcagggagaggatccataactaggatattacctcttacttgagcataaagatcgtataggcccatgagaaaggacatgatatattccatgttatggtgttcttgtaatttcttgactcctccacaagaacacccattgcaagaacaatttggcctgaaattggacaattgttcccaaacagttttcagcttagtaaaatatatacttactgtttgattttcttgtctgagattcatcaaatccttccttagattgtagatatgtgctccatttttctactggaaacgtaccctcaaatcgttccatatggcagcagcagactcatcatataatatgctagatgaaatttcctttgaaacagagttaataatccaggaaataacaatattgttattgcgaatccaagcattgtaaatgatgtgatcagtgatagggggtttagagatagaaccattcaagaaccctaatttgtttttgacagatatagccagctccatagctctgcaccaagcaatgtaattgtcctgcccagtcaacaattgagacaccaaaacattcccagggttgtctccgtgatgcaagtaatacgggtcagagggatcctcgatcgggcttcttgatctggccatattaaaaccaggttctgtggtttgattttgatttccacattgttaatttgtgatgaatctccctcgattgatcttgattcttgctcatttgttgccatgataggaaaagaaagatgaaatgaaataggttagtaaaaaaaatactgaagaaaagtgctgaaaacaaacctgtgtcgatgaagagatgaattcttcaatgcagacactgctcgtcgtcggagaagaagaagattgacgcggcaatgaggaaggacagaggaaatcgagatcggaaggaagaataacttccttgctctgataccatgttgcggaaatgaagaaagcagaagagagttttcattgaacaaaaatgaattaattacaaactgaaatgcagacaagccttaaataggcaaagacactcaaaaaggataacaacagaaagttgttataattgccaacaacaaccgaaataacagaggacttaataactgaaaataactaactggacaatcatattaatcctactgttgctatacttgttattcttgttattagctatggacattgctttcagaactcgaacgtagagaaagggcattcgttcgatgaggtcataagcgttgtgacttcagtcactggctatgggtcgaagcttgcgatacagtcaaagtcccaccaccaccattaatttccgaagacgacgtcattttctgatctttgcttatctaattgatcataaattcaaaaaaaattctcaaaattcaaatacacaagaatgtaagcactggttgtattacatatgggaacaatcgctgattctgatccaccacaaagcatcatgtcctgcaaaatttgccaaa

SEQ ID NO: 239303 - DNA, 2281 bp, Cannabis indica
atatatatatacatatatgtttgatattatttggttaccatgtttatatatggtatttatatgagataaagataatatataatttaagaaaaaattatagtaacttaaaaaaaaaatgagtcaaataattttttcacagggaaaaggttttttaggattaattgtcaaatttaaaaaaaaaaattagtgaatagtttatcaaaaataaaatttaaatattttgtatgactattttttttatacatatagtaaataattatttaaactatagcttataaggatataataaattcacattatctaattttagaagaattatgtgatatctggtcagataattttttaaccaaatgctgaatttaacatgaccatttaagaaatgctcttatatatgttttcacactatttttccttaaaattgagttaaatttcaatatatatgtgtttggagatagaagaattaaataatatagtgtgtgaatatataatgaattggagaatacaaagaatgaaaacttattttgaataagaaattttgatgagtatattgaatagtattgttattattcattaaattattggtttgagaggaaatattcaaaagacaagtgtggcatgggaaattgaatagtttttataggtggaccatagcatggataaggtctattaattatttattttcataaatttgaatggaactcttatttaatataatttgtagattttgattaaagattattgttgattattgtatatgtacaaatagatcttgctctaatccatacgttaattaaggagatggtggcacgttcatatagttagtagttgtttgtgggcttaaggtcaaagagaatcgtaggtgttaccttacctctccttttctctttttctttcattttttttctttttccttaatttaaaaaaagtaaataatataatagtaacgtacgttggttaatttgagtaatatagagtgttattaataaatacggattgaatattttaatacaatacaaaattgacatgagattaagaggcacgaatatgattgggcacgaaaaaatatgattgggtcgagtttctgggtttcgggtggtcgggttcgagttttcgaatttcgggtgttgaaaatgtacaatcaaactcaattttcgggtggtcgggtatgtcgggtttcaagtcaggtatggcgggtttcgcttggtcgagttcagattttattgggttgaatccgaatattttatttttgggctcaagaaatttaatttttaaaaataccatctttttatttttaacatttttttcggtcttttttcttttataataaacatattatgggtctgaataatgaatttggttggaacccaatttcaattttaaagtaactacatttttcatgggtttcttttctctttcttatatattgacttactcattctcaaactcaataattctactcttcttttaccttaataataatttcagtagccaataaccaaatttatagtataatactataattattatataaatattaattaaataatcaataatatatataaaatattttttttatgaatcaagtgaattatttcattactctaagaaaatttgtacaacactatagcattctccaactagagaatctaaacaatctctaatatttacaaggtttcaaactaaattccatctatattggacacttttttttggccaaatacaagaaattctactctttgtaatattcttgaattgtgctatgattgtatcactttttacaactttttttctcccaaaaaatggagttacacctagcagccaaaacacctcgacaaaacttgcccaatttggcctttccaagccacttgatcacccctggtaggagtcttttgctcatactccagttcagccagtttttcaccttcagccagtttttcacctggttcatacaaacctgcccaacatgacagtcaaaaaacaagtgttccatcgtctcaatttcactgctacaaaagagacaagttttgtcaatttcaggaaggtatttagctatcctgccctttgtcttgagtcggttaagcatggccatccacataacgaaactatgcttcaggaagtttagccgattccaaacaatgctcggccaatgctctttatcttcagctgcaatgagtttgagatagccttgagtaatcacatacttgttgcacatactcttcctttcctctaaatcatagagatctttcactctctcttttaattccacaatctttctccaata

SEQ ID NO: 239304 - DNA, 2224 bp, Cannabis indica
tttctctacaggtcgtgtgcttcagttggaggactgtttctctaaaatgcgttctattattttgaacaaatttattaattaataatagatcttaccatttttattaaaaaaaaaaaagctttcttcaaaaattgatcttcacatatacatatttatagcattaatatatattaccaacaaattatgatgaaaattaaccagatcattttttagttactttttaactcaacacatatataaaactatttttaataattaaaaaaaaaaacaattttttttaccaatatattactaatatttgtttatatctataatatataaacatgttgattaatatgttaattaattatgaaagtagcatgagtaattacaagttactctatctcttttgtcacatatatatatatatctaaacggtgcgtttaatatatatactatagattatatagtactatacatagtctatatatagctagtaattattaggtacatatataatatatatagtaatatttttggttaattatttcaaacttaggaagataatatagtttttacttaaacgggcaataatagagaccacactatacccacacacatgtacatatatttatacttattttttttgaaagaatattcatataatatatataatgtcaagcaaaaacttggaatctggagtagactagtctctcttgatttgtttaattatatatattatattatcattgggcattagttcagtacattaaactatatatgagattttaacattaatacattttagcattaatattgttgtagtcttctagtatcaatttaattaatgttcaaattaataaccaagtgtgaaaatagcctgtttaatttatttaaataaataggataattaattaaattaattaataattaagaatacataatatgtatgtatgagaatcccaaagactgtttaatcaaatcttaaatatatataagagatcggtcatatcgatgcatgattaaatatatgcactcgtgattttataataacttaattaattaataattattcttattattggtaaacattcattataaaacaatatacaattaaattcagactgaatactgattgaattatttagctactaattaagggagaataaaattaagtataatccttattattaagtaatcatcaacaatataatatataattaatttatactatatactatatactatatatacatattttaaatgcacacatatcattatatcattattcgtaaaataaatagtattcctaatcacgacctatgatgagatcattagtagatcaatattgtagcaaaactactttttagattcaaaagcgcataatctatgtcatcagtgcccgaatcagatcaagctaagcagtcctcccgagccaatatatacagcacgattatttgacattagtactagtcagtgaataataatcgatatttcatatattataataaaaattatgcgagatatgatatttaattatatgtaccaacaacgaacgatatgtcactttataataatattagggaccaaatacttctataatgtactctttagaatgatataaaccctagctaactagctaggttgacataaatgaaaaaaaaactcaagagataaaagataaatatggggatgaggatcagatcaagccaatcggcactcctgatcagtcaatatatagagtatgattattcggcaccagtagaaatgtttattaatattttataatagttgtaaaattaaaatatataagacattatatttaattgtaggtactaataatgatatagcattttatgtagtaatgttaagaattagtagtacttcaatgatgtactctcttataaagatataaaccctagctagctaggttgacataatgaaaaaaaaaaaaaataatctagagaaagaagatatacatggggatggggatggggatgagatcaagccaagtgatgcatattattatgattgttgttaaagtaggtaaagctagctaaggccattaagaagagtactactaatatagtaccctaatatataatggacccacacgtttggggcttatgtcctaataagtagctaggttcacctaacatgattaattagtcttctaattaatctaaattaatattattattgttatttttatattatcattacttatcattatgtattctaatat

SEQ ID NO: 239305 - DNA, 1441 bp, Cannabis indica
tattatagagatacaagtaaaataattagttaaagtagtgaggtgggtcccaataggccacgtgtcgagattatccacacaagacagttgatgacgtggcaacgaaagtacagagagattccaaatgcttacggctttaatcctgcgctccaagttttgccaactggatcatccacactcatcaatcattcttacttgtgggccccactttgttatgtatttaaataatttttttaattttccaaaatatcccaaagaaataaataaataaaataattaattaatacttattactgtgttttatcaatataattttaataatatttttatatagtatattttatataatttgaaatggtacatattgctcaaatttgatagtataatataattaaatttgaatttgaatctcatataattaagaataattttattagttatgaaatttaagtttaaaatattaaatatggtatgattttaaattatagaataaaaaataattattataaaatatagaattttcaaatttcaataagattgaatatacgaaatgagcttaaaaatattatgaaagagaactaaaattaatgtagatatgaatagtactaaagttgaatggtaatatacaaaatgtagattaatttgtcaaaacaaaatttgaaattgtagtgagaagaagaaactcaaaagaaggttcatcaaataaataaataaataaaaagaagaagaaatggagtattatattgtgtaaaggaaactatactaaaagggaaaaaaaaactaggtttatcaaaatcatttggaaaaaaaaaaggctagtccttcaaataaagtttttatttattattattattattattattttcattaagcattattttcttgtgtataaaaataagataaaatttcttattaaaaaaaacttaccttataagcaaaattataataaaaatgctaaacttgaagagtttcaagaaatcagcacacaataatcaatttcgattgactacaaatatcattataccactgttaaaatttacatttacccgagtagaaaagatggtgattttagatttttgtaattttttatttaggatttatataacaactaatatcatttaatacaaaaaaaaaaggaaaaaaaagtgtgaaggttgaatatcacaacaattattgtttatagtatttaaatatttaattttaaattttgaggaaaaatatttaaagttaattactaaaaccaagatttacttttatccaattttgaatgtttgtaaatttttgtttggaatttatataacaattatattattaaaaggaaaaaaatgtcatgttgaatattattattttttccccgatatcggtatcaggggcggtcttgagttgtattagatcttagaaaaaataaaaatatttgggcctttattataagaatagatag

SEQ ID NO: 239306 - DNA, 2047 bp, Cannabis indica
caacttttttatattgtgacttgaaaatttttttttttacagttgtataattgtagtcttggaccgtgcatgtataaaaaatttaattataagtttttaaaatgccaaaatcataaatatccttatctgcatgcatggataaaagtggtgttcctaatcttgtcctatatataagttgcttaatattatatcaatgtagtgcgttataaataaatattaataactttttatattgtatttattaaattaaaaattttgtaaccccatattaaatttcaccaagtatgccacctcttaataaatgacacttagcatttctacgtgtatatacattaagtgtgcagattaaaaatgttaattatatgttttaagttattataacctgtgcagattgcaagactttgttaaaaggactgtccttgagcttttgcattccttcatcttctttaacgatattattcaactcgtctgtcagctgatgagactgtagaatcgcttttccctgaccaacatacctacattatacgtactatattcatcaacaacctataactaagaactagaatcatcttcatgatcaaaaaccaacaacattattgtgcataataataatgcattacgtacgtaccgagagagaagcgatacaagttcattgcggtgagctgcaagagtatcttgaatcctttccctcattataatatattcttcagagagagagagataagataggttaatgaagatgaagtgcttaataagataacggataaggtgtatttatagggaatgatggtgatggaagattagagatagaggcaaattaaacggtcactatactttttccattggtttattattgataaacgtgaaagtggatcggcacttggcaaattaagctgcatgcatgcatggcctactcaccttactggttagtataattagtatatagacgaaagagagtagtgatcatatgagaaatgctaaaaggcaggtgtcggtccaactaaatattagatatcacataacttaatataataatttttaaagagtatcgctaaccaatcacagcgtgacatgtcgagaaggtgctagacgtgatacctaatagaaatgttcgtgattatatatatataggtgtagtataataatataggtaaggtaggtgggcgtttatttgcattgggaggtacgaaacgcagtcgttttccagccggacgtatgagtacttgttgcagttaaggtgatgagtaggattaattgaagaatttggtgtttatgtagacgacgtaggcggagtttactatgaaatatcaaaaccactggataatatgcccacagaacagaacacagatttgaaccaccttttttcatttatatattttagggtagctaatagctatctatttatttatttgtttttgttgaaggtaaacataaaaaccaatactattatattaattaattcattattatttttaaataaatttattaattattttgtttaaagtttatctaacctttaattctttatttatttttttttattaaaatatcaacttattatataactattttaaaatattaataaaattaggtaaatataatttatatatagtataaattagtaaattgaccgcacgtgcaactatttctaaaaattttaaattatatatatggatattaattaaacaataaaatcgcattacataatttcaaatatgtttttatgtataaaatattaaaaaattaaaaaattaaaatttttttactacacaaaataagcgatctaaatttaaaataaaaagaaagacaataaatctatagaataatcatcatataacttaaaaataaaatgtctgtatctcacttgtaactactactacatttaaagttgatgtcatcaatatctcacttgtgatcatcattaatattattctcaataaattttctctgtacataaaataaatttaataataatcggtaagtacttacttttatatgtaagtgaatcatattcggtcataaattaattacttacatattttcaagt

SEQ ID NO: 239307 - DNA, 3036 bp, Cannabis indica
aaatttagagacgctgagtaagtttttggttttttcaggaacatgcaatagattatttagcacaaggggatgagagttattagcatgaatgaaagattggctaatgtttttaatagacagacctgatccatctccaacatgaagttgatccgtgccttcatactcggtgctgatattgagattttgaagattaggagtgcaatgattggaagcaccagagtcgggataccagttgctatcatcaacaggattggtgtgagctacattagcttgagcagtgggagagtttgatgtgggaaaaactcctgtaaagcttttatcaaagcgataaaagtagtcaagaacagtgtgtccaagcttgtgccaaagctggcactgtactcgacttgaagaagtgggaaacctgcctcctctactgaaaccagataaaccagtagaaccacgattgttaccatagtttggagtaggacagggattagtgaaatcacctccactgttattgttgctaactcgattcttgaatcctcgtccattgatccttgctgaaccagaataggatgagggtgggaatttgccttgattgggaaatctactgccacgattaggatagttttgataggcaatattagcttcagataactaatcaaagtcagtagtagcaacattaacactcagatcagtttcttgatctagatcagtcttttcgattcgagactcggaggcaagaaggagagcctcaatttcagcaacagaataatcttcaatcctggtattggttgatatgatgaaggtatcgtattcaggcagtagtcctttaaagatagcagctatgtgatctctcgaacttagaacctctccaaccgaagcaagaagatcaacatgctgtttgactttcaataagtaatcatttagagacaatgatcctttccttaatttatgcagttttgttctaaactccaggatctttgaggagacttgtaaagtgaagtgtttctcaagcgcactccaaatttgtctcgctgtgttgcatccgaccatgcgtgtgagaagactctctatcatcgaagagagtaaccaggaaacaagtagctgatcttgaacatcccattcaagaaaagctggattgtaggtgtttgaggcttgatctgcatcactcaagaattgaggaggaggagcatgatcttggatgaactttatcagtcgatttccacgaattgcagcaagaacctgctgtttccacaaaaggaaattgtgatcgtttaatctaatggacatattgtgattaaagtataccggattgaagccatcggagttgtttcttgattgactgagattggaagctccgttaggttgtgaaccagatctgttgggattcaaactgttctgaatgttgttggtagcagctccaacattcgccatgttagcagagagagggggaaagagctctgataccatgttgaatctcttcgccattgatgaacacttaagcaaacactaatgaccagaaagcagagaaaaacagagacgaagagaagattgaagaaagagagagaaagataaagaaagggaagattgagagaaagagcaatcttattgaatgagcataagtgttggcattatatagccaacgattacaatgaaggagaagaagttagaaactaacaaaaatcagttagagtgcaacagtattaactaactgatttaacaaactcaatgtaacagtcctaactaattcccctaacactagccataattctgaataagtactccattccgatcacaaagagaagaggtgacattaggtttccttgacggagtcctctctctttgagtgaagataaccatgaagtgatccattcaccataaagaaaagcgaggagtagagacaaatcataaaaagctccataaatttttttgggaagttgggagcttcaagaatttcttcaaaaaattcccaatccactatatcatatgccttctgcaaattaattttaaaaagacatgttgattttccagttttcctatcataacctctaaccatatcttgacaaattattatgttgtgaacaatttgcctgcctttgataaagtcactctgactttctaaaataacatctggaagcacatctctcagcatgttgcaaatcattttagtaaccactttatagaccacattgcaacaagcagttgatctataatcataaaccgactttggacaaacaatttttggaatgaatgtaacagaggtagcattgatttccttcagcatcttcctagagtttaaaaaagaaatccttcctagttattttccaagtgtcttgaaaaaaagcactactatctgaaattgagaaaagcgcatgcttaacattatattcagaatagtcttaatcagatggtagcatgtatctccggcagacaacaacccatcttttgttctagtagactccctagtaccaaataattaaagactgacagaaatcaagaaaagcttgaatcatcttatcttgctcatatctttactagaatagatggtatttaaatgtaattgataaaaataaaatattcgcaattacattattatcttcaacaaaaacttgtatcacattgtttttatgtatacataaggagcacatccttttttgccctatctgttctccactattctctttcacaaaattttatttccgtataagcattaaaaaatgagccaattaataaacttgtgtttcaaagtttctctctatatataaagaaaagtatagtatttatttatttattttgaaatgaaaaagtatagtatttataaatttaatatatatttaaataatagaatagctacgtcaaaataaaaaaaaactaatagaacagccaagtaattccaccccactcacttaatggattagctttaattccatataaacatataatatatttgttattgaattttgataaaaaaaaaacatatttgacgataaataataaataataattgttgtgatcgatgatcaccttgcaatcgagattgaacaataagaa

SEQ ID NO: 239308 - DNA, 2726 bp, Cannabis indica
ctatatacctttaacaaaagctacaatctgatgtgaacaattcatataaaaatatctaaaacacacaaataaacaaacaatcaaaccagcaatctgtatatcattacactgattctaaactctcctctccgggactctgtcttccttgctttggaggaagttgataagaccttgaagtgaaacttcagcattgtcattcttcatcagctctccaccaatttccgcaggagttgcgcgaaccttctccagcaatttctcaatttccccaaacagagtgtgcttcttaatctgtaagtagttatttgctagtatcttgaatccattgaaatcacagtaagacagatggagatgcagatccattcgaccaggtctcagtagagccggatccaatcggtccttgtgattggtagtgaacacaacgattctctcgtctccgcaactagaccacaagccatcaatgaagttcaacagaccagagagagtaatctgtaaaaggaaaacaacaccataccataccatggagttagcacaaactcttgtgtaaacaaagaacaattttctctttttactaccttatcaccatcttcaacgtgtttgaattcattatctgaattcctattttgcaactcaactgaacagtcaatgtcctcaatcactaatatggatcggttcccagtgccaatcaacaacctcctcaaatccgaatcgcattggacttcttttaaatccaagtcatagatgtcaaacttgagatagttggccatggcagcaaccaagctcgactttcctgtaccaggcggtccatacaacaaatacccacgtttccaagccttccctactcttctgtaatactcttttctcgatataaatctatggaggtcatcaatcaatgtcttcttcatgtcggggtccatggccatagtttcgaaggtagcaggatgatccaggtttatccaactccagtaatcactcccattataatccacagtatgaagcttcacactctttctttcttctttaagccatttagctttctccaaaacgtagggcaggtaagaatccagagccaattccctgtgttttttacgaaagcttagctcgtagtgtcgtatctccttctgggcaaatccgctactgtgatctcctcgcctgccactactagaaaacgaagagccgtttctggaggagaccaaaacccaactgaatttgacccccttaaacgaatcttccatttcttgatttatgtctatggccactgccagctgcttctctttctccaacttcttgactttgattctgtcagttgaggcatattgggtggcgcccaagtaaatggtggcagactcgaacaactggttcgctgtaagaccgtcgaactcgtcgactacgacggtgacgtggggtgataatcgggtgtgagtttgtgaacgcgcgtgatgaacagctcctggacagcgtctgggataagattctcagtgacggatcggagaagaaccgctgaggcggtgagtgaggcagccactgaaatgattgttttagcagaaggcactgtctccggcgacgaccacattttccctttttattttatttattttatttttgcggttaaggtttgggtttttctattattatttttttttttaaaaaaatatataatacgattggtcaaaaagaagaggaaaagcagatgcccgaaatttcgagaagagaaactgtaaagctattatatgcgacacaacctgtcaagcttagtgctgaattgggcctaaaatttgctgaagccggtttcttaggcccaagagatataagtactaattcgttttggagattatttcgaaaataaataggagaaattatgttgggattttaaagtttcttaatatgatacttttaaatttgactaatttatatggtatgtttttatggtatttgatatgccatgtatataaattaggtttttaaatcccatatttaatgtttttatttgtttaggtagttttatatgtcacaagtgccagaaagtcgccagagtttgctgtcggtgctagaaaaataattagagtagctgtcggtgccggaaaagtcgtcagaattggtgtcgatgccaaaaaattcgtctaaattgcattgtcgttggaaaaatcaataaaaaaatcatcaagaaactagtttcttgcagaagaaaccactttttcggtgatttttccgatgacaatgccaacgctgacgacttttctgacattagcagctactccgatgacttttctggcactgacagtaaactttaaaaaagtcattggaattggcagtcgccggaaaatatttcttcttgattttttcggtgatttttctgacgacaataccaattctgatgacttttatggcgtcagcaacaactccaacgacttttccgacatcgacagctactccggtgacttttccagtaccaatagcaaactccaaaaaattcatcggaattggcttttgtcgccagaaaaattactggaaaaatcaccaagaaatcattttttggtgatttttttagcgataatgccaattccgatgacttttctagtgctggcagcaactccgacgacttttccgatgccgacagcaactccgacaatttctctgacgccgacaggaaactctggtgcctttactggcaccgatgacaactccggcgatcacagtagtttcatttgttctattttttttaaaaaaaa

SEQ ID NO: 239309 - DNA, 2125 bp, Cannabis indica
ttctcaatcacacaatcgagcctctgaattgcagatttgtggctctccaatagagcaaataaatccacgacaatataaaagtacttacgagaaagatggctcgatcgatgttgaagttctaactgctggtgacttggtttcttcattagaaattgtgggtaataaaatgcaaactcatcacgaccaatcaaagacttgcagcgacacaacaatgggactacagattgggaagaacaggataatagagatggagaagcattgcaacggaaatgaacctccgccaattccaccatcattgggaaacttggagtcgcatcaatggactcacgctggaaccaattgcatattcgaaaggttcgaaggcgatggtgaaaaatattcagtgcaaccaggtcacgcgagggttaacgagaggttggaagcaacgtcggagaaggtcatgaacatcgaagaagaagaacatgggtgtcgatgggttctattacaatcggagccggcgtctggagatgatgaattcagacctaaatccatatgtgatgtttgtataaagcccaattcttactattcggatccggcccaaaagagtcaaattgatgtacatgaccccttaacgctttatgtttcaaatggaacattacactcctaccaagttaagcccaagcccatttcttcattaaatcccataattgagtggacccactcaagtagtaaatatataaagggtcacgtgcttatgatatgggatccagggaaggttccactatccctaacttctttgtgtaaatggatgaatcatattgggtggaatttctcagtcatcttctttgaacctttacatcttgggtacggtgctcggtgggtgcatcaagggaggcagtttgctaggaggaaggagagatggaagggacaaaagctcagatatctgagatggatttttgatagagggagaagtgttattgttcaacggtattcaccatggccaactgtgcacaacaccacatgggtacaaaggtatttccaatggctcaaggacaaatctcctcatattttcatgttttttatttggtttggaaacttcggtgatatatgggattgtctatctaattccaatcttggaaattttttgtcttatccctatttcatctctactggttttggttttatgggattgtccaaatatgagcagagatagacaaaaaggacttgttattgttgttattgtgaacctattgccagagaaaaaagtttcctctaatatttctctaatttttttatcaaagtcctggggtggtcataaggacttttttctcttgtcactctttgttagttgctggttgggaattaaaaaaaatggtatcaaattgtgagaaaatctctaaggatgattttttctagagggagacacaaagaacagcaactattggaacaaaagttgaccatggagagcactaacatccatttggggtcggaatttgtcatgtttcacctaacccggacagagtatgctgattttcgggtttttgacaggggcaaaataatcattccttggggatttattccgtggccgagccccaaagaagctgatttggcagcaagcttggttgtttgtcttcttcatggagagatagacgtggagatccaagtgatttgtttgattgtagtgcagaaaagattggcagccgctaggaacatgggagtgatgtcaaatttggcaaactcaaatgccttttgtgttttgaattggggtttcggagccaatttgaagattgttgttcttgctgccacatttatgcagtcactagttcagcctaccaacggagggaatacaactttgctcagctggtttttcgagcgaggccggcttgttgattggagtcttctcttccgcagggggaacaacgtgcacctgctttcttggttcttcgagagaggacgaaccaaaattgttgtggaggcttgtgttcttcaccttgaggacgaggtgaatttcgggcgaccgatattgttaggccttagggtaataaataaagcgggtaattgggtaattgtaatgggagggattaatgctatatatatgagtgagtagcgagggtaagaagggggaatgattttagttaagtgagct

SEQ ID NO: 239310 - DNA, 1523 bp, Cannabis indica
tggtccttgtaaaagtggttctcccagtaatccaaatccaactccaaacaatggtggttcggtatcttctcttgtcacacctgattttttcaatgggataatcaacaaggccactggggactgtcccggcaagagcttctacaacagagacgcttttatcaatgctgcaaactcctttccccaatttgggtctggttctgctgatcaatctaaacgtgagatcgcagctttctttgcccacatcactcacgaaactggatgtaagatactacctatcccttctctcaatttttcctttatagatgctatatgcccataacttacgactacttggcatactgttattgatttaaataaatttccacttccattcaaaataaatattgactgatccctatgtgtaatttatattaaaaatgttattagggtcggcgggtcttcagaaaaaaattattgaatggggaccaggcatggcctaacccgccttaacccccagatgtcatcttaaattacattaatactttatgttataaggtcttcgacccctaagatcatgttttattgcaatgcctttttgttttaattcattaattattacttctgtataaaatttaagtgtgtcaagtaagtaatttcttttgtactacagttctatgccatatagaggagactggaggagcaaatcaggattactgcgacgagacaagaacagattatccgtgcaacccaaacaagaaatacttcggccgtggaccacttcagctgacatggaactataactacggagcttttgggaaggccaacaacattgatgccttgaacgaacctgaaaaattggcacaggacgccgtcgtttcgttcaaatcagcattgtggttctggatggagaatgttcattctgtgatcggccaaggatttggtgccaccacaaggaagatcaatggtgctcttgaatgcgatggcaagcagcctgacaaagttcaagctcgaatcaactattataatgactactgcaaacagtttggtgtcgctcctggggacaatctctcttgctaagaatatgtttttataacttttaagtattatttcaaaataattatatatatagatggtgatcagctttttctggtgattccttctaatataaagatacacatatataccggaataaagaggtggtagcagccttgtttggattagtcgatacaatcagtactgtttctcatcaaaacggcttcattatgattataaattgtgaagccattttaacattaatatatgtgtgcgagaaaagaaattaataattagggatatttgcggcaaaacctccttaagtggccaagtttttacaactaactcccaattctaaaattttggtggtaaaacctcctaaacccaagttcccttagcaatttgccctttccatccatttttgggtgttaagtgccaagttggaatgtctacgtgtacacagtgtacacgtggcacagtttaattagtccacgtaataaatatttaaaatt

SEQ ID NO: 239311 - DNA, 2790 bp, Cannabis indica
tctcaatttgcagcttttgcagtttgagcaacttaaagaccgaaccgaagagcttcactcagaaggttaggacttttagctagtagctgactgaaatcaatttgatagggcctaaaagattgtattttttgggatttgttttttttagctaagaactcccagatcacaagtaatctcccaaaaccagaagaattctcaaaatccctctacacattggatagtggtcagaatgatcttcactatggatttatgaaattgacaatggagcagttaaacacatccatcccctacatagtttaccagttctctctatccataaaggttagtttgtgtccatatcagttacttattttaatatatatagcatacacaataaaaggatcagctatataagaatatgagctagaaatcatattgatttttgtcatgttgccttgactgtttactggaagatcaagtaagataatctttttttcggtactactgtttaagcctagatttttaatgaaactgattcagaaactctacgaaaaaggtgcgaggataatttggatacataataccggtcccattggctgcttgccttattttgtgattacctttccaccaaaggctgaagatactgatcaaattggctgcataaaatcttacaatgaggtggctcaagaatttaacaagcagcttaaagaggaagtgtccaaactaaggactcaactctctggtgcagctctttattatgttgatatctattctctcaagtattccttaatcaatgaagcagaaaaatatggtaaagacttcatcatttagctattaagtttcatatgtatatatatgtatctgttgataatttgggatttgcagggtttcttagtccttttaagtactgttgcaaacactatggggataatggtctccaatgttggaagacagaaatgagaaatgggactgaatattttgggacttcatgtagtgacccattaaaacacattagctgggatggcatacattatagtgaagctgcaaacaaatggatagccaatcatattcttgatggttcatactcagatccacctgttcccctctctaaagcatgtaccagttagttctggttcataacttgtatgaaactgaagtttatagcaaaatgagatattttggttgtacttgttatgatcattctacaatggctttgtcacaattgctggtattggtggtctcgagtgcttccaactgttcgagctcatatgattttgatggtatcctgtttaggacaagggttcaacctcagcattggtgaaagattctttcaagctattgttgtactagtgatgttgtattatgacattattgcctcctctactacaattttgaattttttagagaacatagcggcataagtacttaaagttttgaataattttttaacggcaagtactcaatgtttgtaaaacagtaatttttcagtttggaagtaactaatactttatgttttcgtcaagactcaatgatttagaatttaggccttatatgtatcatgtttaagacaataacaaagtttgtaatgacgaaattggaaaaaaattacaattttgcaaatattgagtaccatgccgctaagaaaatcattgagtttatgcagtttacaaacttaaaattttgggtactcatgttgctatttatttattttttatttttttaaaaaatcagattatctgatttgttaatatttttgtatttgtggtcaatataaaccctcattgttacaaaaaaaaaaaaaaacaaggccttgttttcttggtggtgtctgttagaacatcattagttttcattaaaggtcattgccattgttgttgttctaggtgccaagtcttttcagcttatggtcgtgtttcctatgatgtcctccctttagtgatagaatagagtaacatctaaaaatattatatatatatatatatttatatttataggtagtcagttttgtgtcaaattaataaaattacagattatgatacagctgagtaagacctaatgtattttagtattttctgctaatttattattgtaggtttcttccagttttaataaaggttttgccaattatactggtggatccatgttgtaggattaaagttatttttgtctttttaatttttcatattttttttgatagatttgtgaagtggtagttgggtacgttatattatgtatcaaatatatttatattttctgcatgatgtaataaaagtagaatacaaaatatctcgtgcttttatatttcgtattacattggctagtttcctcccaaacattttgagattcatgggcttagatttttttttaaaaaaactcatgaaagtttgtattgttatattatttttaatataataatatgtagattaaaatgtggtaatatataatattatgtgaataatatatattaagtgtatggtaaataaatgtgtaacctataatttaacctacacttttgtaacctacatagtaacttggagaggagttacaatttgttgtcatttgtaactcttgtgttgatcacacattattagtgtaataaaagggttgttacacaatttggtttaaggatttcaaaattatgatgatatagttgttacaaaatgtaatactcatttatgggagagaaatgaggtggtattttgaatcctaagagtgatcatctaaacactatataaaggagtctaatgtgctcattgagatgaagttttctatcaaaaaagcactttgctagaaaaccctaaggcttgataa

SEQ ID NO: 239312 - DNA, 1274 bp, Cannabis indica
gacaaaagtccttaaatttaacaatctcaatagttcagggggaatttttaacagctaaaaaaattcaggagatatgatttggtatatgtcaaagttcggagagataaattactaattaaaatatgtaaatatatttataatcatctataattgaatcacttcggttcaatttacgtaatacgtacattaattttttcacgtggtgaagacccaatctagaaagacaattctgcatgcatattaattataatatatagaactcggatggcatgcatgcatatagaataacatacatatcaattaggaaactgattaattaattaataaatgctataaaatcttaaaaaaaaaatacgagaaaaacataaagaatacaacaaagtgatgggtcattttgaaaattagtttaaaaattaatataggtgataatatatatgtatagtggattgtgatattatagagcatgcctgctgagtaatcaccactctaaagtacgaggtggatcatataatatatatacatatgtatatatataaaaattcaaggtaggattataatatattatagaaaagtatatgtattccttagcatgaattctccattgtaatgatttttacaggacacgcaggaggagaggagggggggcagtgaaaacatacataatttaatggaagagagaaaagaaacaaaataggattattgggttggatttgagagggtgtataaggcctttaaagccatcataactttccaaaacaaaacaagaggtggccatcatcatcatcacccccaaaaaccctacaaagatttattatgtctttgtataatagttggcctgctctcactactcccacaccaatatcatagcaacacaatactactctccccgccctccagtccacactcttatataaatatatatatatatatatatataatgtacatcacactgacgtcatacccacatcactcaattagcaataacttcaccaaaactttacaattaaactaatattatttacttaaagcaagttatttacttaattattattaggaaaaccaaagcaatatctattctatataaagtgtgtctatataactgaattcttggtttatgagaaatttatgggtgactttttatttatgtttaataaaataataaaatattatttatatataataaattaataaaataaaaataaaacaaatatttgaactgatattcaaattcatagtgtaatccgaagtatcatttcatagtggattagtcagag

SEQ ID NO: 239313 - DNA, 1768 bp, Cannabis indica
aaattagaatataaattaataaatcaaagtaattaaataattaactacaaaaataataataagaaaagtaattactttattatttgcatatatatatatatatatttagttatattatatttttatatttgtgattatactaatttatataattattaaaaaatttgtaaaatataatgtgcactgagaatcatgagattctatctcaaaatcaattagtgatgagtggagtagctcatgttcttatatatggttcaatactctaccatttattccatgtgggacagtatccacaatatgcacggtatatataattactaaaaattagttataaatatcttatttgaatttaaattaatatcttaaaacaccaacaattattttaaaataaaaataaaagtcaagagtacattttatattatgaaattattaatttattctggatcaatatattattattgtcaaatacatgcacatatttgttcttttattatatacagataaccacacaaactcaaaaatttaatacaaatagtcaaactgagaaaatatttgtaattactaaataaagaaaaagaagaaagaaatgtgatggaataaaaataaaaataataaataaagaattgcctctaattcacaaattttactactttaattagtgattttgtaatgctctctctttccacatacataaaagtactcattatgctataaaagtagtttaagagaaatttgtggtaaagtattaccatttgaaaaagaagatgatatcactaaagtactacttaaatattcatacatcacataaatcagaaaaaaaaaaattatcatataagacactcaattattctagcaagtgaaatattttagtcataaaaagaaataataataagattaattgttaattttttttagcaaattatataggtccaaaattgtttctatcaatgtgaatattacttttatttgtttgatcgaaccaaatacttaacataataatttattgaattttgtgcaattcgttgtccacccaaatcaaaaacttaaatttactacaaattcaacctctctctcaaatatatgtagagttagagtcagatgtattttatattaataaggaagatttgtataaattattttgtataaattatttcgtataaattaaataaacaaatataaattatgatatttggtttagtttctgagtcttgtcctatgacatgagtttctatattgttgattcataaaagtcttgtttgtttgctagttatttgttcccctatttttttgagtctctaatcatggatgaaagtatgaggagaaactatggtaacatctcattggcaaaagatgaggaggaagaaggcttattatttaataatgttggtattgataccccagaatttgattctcgatggtgccttgtagggagatttttaactgatagagctctagattttatggcgatgcaacacaaaatggcttcgttgtggagacctggaagaggcatgactgtgaaggagttagatcccaatttatatttattttagttctatcatgaaatagacatagagagggtgatagaaggcagcccgtggacctttgatagaattccattgatctttgctcgattgaaagaaggtgacgatcccaggtcagtggtgctaaataaaattgatttctcggtatagttacatagattaaagataggcttcatgtctgaaatagtggtaaagcaataagggaattacattggcacctttgttga

SEQ ID NO: 239314 - DNA, 1465 bp, Cannabis indica
ctattaatgtctaataacaattctttaatcaattataccccctctctcaacacgtaataatattattgaataaattttgccatgattggtataataacaacatatattatatatctgtttctcactactagaaagtaaaacaaagcatttagtgtatatataatgtttattgattgattacaagaacacactttctttttctataaccaaatattgcatcttcattcctttgttcaaattcaaaattattttttctttaaacacctttccatatcatctattaacctataattaattaacatttcatttcttgcttttcaagtattttttatttctttagtttaaacaaaattatgtgttatattcctatcctatgtattggattggttgcaccaaacgtagagttataaatttaatttatttttaaaaatatatatttattgatgaagaatgagctcattaaatccaaagcagatactaattattaaatgacatagtgaaggccaatttggagcaagagaggtaggtgctttatatgtactcaaaatcactttttttgcattataaatgataagtaagtattaattgatgtaactaattatactgtctcctctattattcttgcaatgaacgaaatataatgaattggcccacttagctctttttttaggaccatacttaacttttgtgaagtgaaattcttgttgttattataaatttataatggtcttttgaggcacttcttgtatatataaaagtatgataaaatataagaaagttataccatttttgtatttagtgtagattgtttaaaagttgtaaaacttattttggagctaatagaagttaagatttaccggttatgggaattaggattattctcggattattgatttaaggtatttattgaatgttgttgtcatgacacaggatccgagatcgtcaagctttgtttccacttaggtcggcatgcacgcttaatttctggactgaggtaagaaaagtttatgcaccactaaatggttatataagaaacgattataatcgttagtgtctcaattaagattgtgattaatgatatgtaaatgtgtgactcgactgtggtcgaggttgtgatgagaaacgattatgatcgtttgtgactcgattatgatcgggaaaaagacatggtcattatcgttattgtaaatgaataaaagatacggtcattaccgttatgagtaattactcgttgaaactgcgagtaggtttcttacttatcatttgttttatcgggaaacgatggtgatatacatagctcgttgataacgagtggtaagagtgctttatgaagcactaaaattatgtaattataataatgtgtaaatttgagtgctttatgaagcactgaaaattgagtgtttataataatatatgattagggtgctttacgaagcactgatattatgtggctatgtattgaacg

SEQ ID NO: 239315 - DNA, 1225 bp, Cannabis indica
tttttttacctagtatattaaaacaatatatgctatttttaagtatatattgtcaaatttcccttaaggtattaggtaacattatcaacttttttgttcatgtaattttgttttaagtaataatatgaaattgttttgatgtgtcagatttctgttgggagtttcaaaaaaagagattagtatgccattagaggagttaataccaaaagcaaacacatcatcatagtgttatcaacttcatattagttcttctaaatatttttttttgaaaacttagttcttctaaattagtagttagtgcttctttctataccatttagttttcatttgtctaaccaaagtatatatatagaggcttgacatatttcaatgagggttaatattaaaaaaattagataaattgatcattacaaaaatatctttaacatccaatcaactatattgtgggtaaaagtccatttaattatattatggataaaaaatttacaagaccgagttatattagaaaacgcgcaactcacaaataaagaaattcttaaaaagtaactagagtagtttttcattttccatctggagtccactccattaagagagttgatcgccacccgcgaattactttcgacaataataaaattgtactcattttccatcgtcttttccaatgtgaaacaacaagtagcaatctcgccacacaaagcatcaataaaatcaagttagattgtttttttgttggttttcttacatagctagaaagcttatataaaacagtcttgttctcctattttgtacagtttgatcattattaagatggtcttagtatagtaccttttatgaaattatatcagtctctctccattagaagaagctctaagaacaaacaaaataagcacaatttcattttaataaaatagatgcaaaaagtcgcacatgggaaatataaacaacatttaagtggtatattatagcttagaaaagagaactgctcgccgggcttagtaacgtgagcctgtaactcaagtgagggcatgtgggagattggacatttggtcagcccattgggccggatccagtgttatctacttcctggcccgcccgttccatcttcacagagcagcgaacacctcccgctctcggcagtggaaggataacgggccagtgctacctgggcccatcatggttcactgggctgactataatcataccatctctttttggatttcaaaat

SEQ ID NO: 239316 - DNA, 5393 bp, Cannabis indica
taaaaattattttttgtacaatttaaaatatagtcaaaaaaatggaaattaacatgtactatagacattaccctgtactatttataaacaagaataatgtttatatatgtatatctctttatatataaaatgtggctatctaacgattttaataatttaacataatatttagatataagatattctgttaatagggttagttttataaatatatataattaatattatttattttatattaattgatagatatataaatgttaatattatttattttaaattaattaaactattaattaaaatatatatataaatattaataaattatttataatattattatttttttaatattgagattatgttgaattttaatatttttaaattttatatttatttttctcaaagttttaaaactttaaacattatacttttttttttaaaaaaaaaaataataagtagtttttttttaatttacaaaattttaaaaatacataacaaaaataaaaaataaaaatataattaagtattgcaaattacaataacccaatatatattagaacaataataatgtaattttgtgcctataactccagatttattttgatgattcccattctccccttattttattttattttattttaattttttttttgaatgacccattctcccttatttgtgaaaagaaaaagtaaaagaaaaaaaaaaatgagttgtgcgtagtatctccatttatcctaccaaaaataaataaataaaatccagtagataatgacaatgacaatgacaatgtagggatatatttaaaaaattagtcattagaattgtgatggggcatatgacctatatttaaccaaaatataaagagtaatatatatatatatatatatatatatttataccattctctttattgaattgagggtccaattaagcaccattatttttcccaatgaaatggaattgtgattactacagataccattaaattaggaaaatgattgggaatacatgtgacagttaatgagtacaggaaaaccaaatataatggcacctatttttatctatctagtctcactttggtaagtttttattattgcaaatactacctttttttctttcgaaaaaaaatgactactttttttttttggaaagttttaaataccaccttagattgtattatatcctaactcttggctgctttactactacccttattttttctctctctctaaagaactctttctaattattttttttagcttcatgaaataaaaaaattatcccttattattagttataataataataataataataagttatcaatagaaattctcataaatatctcttattttttttttttgaaagaagtgttctttattaatgattcgagcaatcgctcataagaatagacatcaagtccaaaggaacattgttaatggaaaacatacgctcagctagagacacagagtgtcgggcaacatagtgcgcatcacaattcgcagaacgcttaacaaaaactaaagaaacattactcatactatggagaagggtcttgcaatcttctaccactaaaccgaatgctgaagcaaaaacctcagcactacggacagcttcagcacaaaccaggctatcagtctcgacaattgcgtgggaatgggcatgatttttcagccaactcagggcctccctaacgcccatgatctcagccaattcgggtgacactctcccaaactttaaaccagcaaaggcagcaactaactctcccactgtattcctcacaacacaaccgaacccatgctttgaagaatgctcaaaaatggcggcatctacattaagcttgatacctgaaaccggttttacccaaagctccaaaacatctccatctttgagaggagacaacaaagggatattaccctttccttgaacttttaaccattgatcaagacttgttgtagcaaatgaaactacatccttcatagtacgaacccgatgcttccatatgagatcgtttctagcagcccgaatagcccaacacaacattacaactctgcccgtggcctccccagaaaccagctgaaaagtatctgataaccacatccgaagtgaggtagcgtctctgctggtggcagccaaaccagcataattccaacaagcccaagcaaagttacaagacacaaaaagatggcattcagtctcagcaaagatgccacaaaatggacaaaggtttttcagttaacaccttcttaatacacaaattagatttagtagcaagacaatttgaaaccgccctccaaacaagatctttggctttgggaggcactttgagagaccacaaaatcttccatagaccattagaaggtgacaaatctggtgtgaacttcttgttgtgcaacatgttgtaagcactacgaacggagtagaaaccattcttctcatcaacccaataccacgaatcaacaactgccgaagcatttagaggtataccaagaataagagcagcgtcttcaggagagaaaaagtctcgcacaacgtcaacatcccagcttcgattattaggttgaaaaaggatgcttacggtgaagttttccaacccctgaacaaccgggtttggagttggtctgtcaagaatagggagccacgggtcagaggtaatttgcaccgttaaacccgtgccaatccttttcctcaaaccagatttaacaatatcctttgcagcatggatactactccaaataaaactaggattcgacccaagttgagcagaaagatagtctccttgcgggtagtatctcgctttaaaaactttgccaaccaaagagtcatgtctaaacaacaatctccaaccttgtttgcctaacatagcaagattaaagtctctcaagcttcggaatcccatgcccccatcaagcttatgcttagtcaatctttcccaactcatccaaatgataccacttccgttaccgttggagttgtttgatttccaccaaaaactcgccatcattcgctcaagttcgttacaagtgccgattgggaaaaggaaaacattcatagcgtatgaagggagggcttgaaccaccaacttaataagaacctcttttcctgcccgagaaagaaatttacccacccacccattgattctcttcttcattttctctttaaggaagcccaagacagcgtttttgttgcgtccaacaatactagggagccccagatacatactatccacccctgcttcttggatacgcatcatagaacaaatacgatccctagtaaccgtggtggtgttggaactgaagaatgtcgatgatttgtggagattaaccttttgacccaatgcagcctcaaaaagcagaagcagagagagaacatgattggcttcatcctccgaggcctggcaatagatgtaactatcatctgcaaagagtaaatgagagatagtaggggcactccttgccactttgcaaccggttagcatcctagaggactcataatgccttatcagggaagaaaagccttccgcacatacaataaataaatacggagataaaggacatccttgacgaatacctctagtaggggtgatcggccccaacttctggccactattggtactgcaccgaattaacacagctgagagttaaaccaatccatcgatcactaaaacccatcactcgaagagtagcctccaggaaaccccactcaacacgatcataggctttactcatatcgagtttaagtgccatataacccttcctaccattggtttttcttttcaggtagtgcatcacttcaaaagccaccatgatgttgtccgagattaaccttcctgacacaaatgcgctttgagtttccgagatagcgtagttcaaaacattcttcattctattagcaacaaccttcgaagtaattttgtagagaacattacaaagagaaatcggtcgaagatctcccatctgtgaaggatttttcttctttggaataaggacaatatgtgtatcatttattgattccgggaattgacccgaattgaaaaactctcgaacaaaatgaatcacatcagccctaacaatattccaatgcttctggtaaaatgctggagtcataccatcgggccctggggacttgtcaggatgcatttggaaaagagcattcctaacttcttcctcagaaaccatctccaaaagagctttattctgctcacggctaacagtaggccttataccttccaacactgaacccaaattgatactagaggaacgaaaaagatcttggaagtaacttgtgatgacattaggcaaacccgactcccaattaacccatactccattgctatcttgaagttggctaatacaattgctcctctttctagaattagctatagaataaaaatacttgctattcttgtcaccggagttgagccaatattgtttagatcgttgcttccagaacacttctttttgagccaaaatttccgtcaacctatttctcccttccttgtgttgctagattgataaaggatctctaccccacttagaattgcaaatttatttcttacactcatttattctcttacgaaagttaccagtaatatcccatccccaccttcccaaaacttccccacatctcaagatttttccttgaataccggtaatacccgattccccccaacaactctccacaatctgctcacagaggggttcgcggagccatgcattttcaaagcgaaaagagtgatgagagctagatggaatgttacctttgaagacaagaaaaatcgggcagtgatcgctagttgaaatttccaagttgagcagaaccaattgagtgaacaaagacatccaatcgtgggtcactagagctcgatccaacctttcttcaatccactccctgatgtcccttcccttctcccaggtgtacgggtagccgacaagtggtaaatccaccagattacaatcgtccaaagcaccaaggaaaccatctataaggcggtcaggatatttccttccccctttcttctcgaactgggacgccaagttgttcatgtctcccatgagacaccaagggaggctgctatcatgcttgagagaccgaaagagatcccaagtacgataacgaagctctcttttaggttctccataaacaccggtgaatctccaagttgaataccctatcatttgtatcgtggcatcaatatgagagaaagaaaagccttgaattacaacctcacttgcatccttccatagcaaagctaagccaccactatgtccccgagcctctaccacaaaagaaccttcaaaacccaaatgggctctaatgccctccatactagccttgttacaaagagtttcacaaagaaataaaacattgggcttcttttggaacac

SEQ ID NO: 239317 - DNA, 2715 bp, Cannabis indica
aattataatccgatctaaaagtgctacgacaaaactgtttacattttttgtatctgttcgtattaagcattgtcttcaagttggttgtattaaaaaaaaagttgtcaaaaattaagctcagggtcctatttttactattttaaaaaatacagggtccattttgtcatttaataaaacacagggtccaatctgtaacttttgtaaaacacagggtccaaaatggtatttaccctaattaatttcattaattatttttaaatttgaaagcaattgaaaataaattatatttagattttgtgatttaacttttaccttgactgaaatctaaatccttaccaaaaaaaaaaaaatactaaatgcaaagtgcaaagcaaagagggtgatattcattcattcagtacacgttttattggtttacttggtcacttttttttttcgttttttttttttctaaaagaagactttggtcagattttaataggatccttcgtctataaagtatagattttacacccatttgtggaatatgatacaacattacatacagttggaactttttacaaagtaactgaattttgacaagccattaatattgatcttgtaaaaatctatgataggctaagttggagattcattgatagtgtttatgattgttttggattcccccaacaatttcgcaattgggtttctcagtgcatctccaccactactctcaaaatatgtcttaataggggtcatgtcggcaagattatgccctcctgtgggcttcgccagggcgacccactatccccctatctcttcatttgtgatgctgaagtcttatcaagactcttggaagaggccattggaaaagggaatatcaaggcattaagctgagtaggggaggtccagttctttcccatatcttctttgcagatgaccttattctagttggtcgggccaatttgaacgaagttaattgttattgaaactgccttgagagattttgcatttggtctggcgaaaaagttaatgagcacaaaacgtcaatcttctttagcagaaatacccctaacgacatgagaagaggaatcaaggaaactttgggtattgattctccggaaggtgttataaagtacttgggcctacccctattcaaatcaagataaaaggatgttgacttcaatttcatccttgacaatctcacttctaaattgcagggttggaaggcaaaaacgttgtccaaggcgggccgggctacccttattaagtctgtgggtctgtcgctgcctatctacgacatgcaagccacaaaactctctaatcgtcttgtctattggattgatattttggtccgggatttttggtggggctttgagaaaggaaaccatggtcttcatctaagagctagggataaactttgtcatcctgagtctttaggtggtctaggttttcggaaaactaaataaatgaaccttgcttttctggccaagtgagggtggaaaattttgaatggctgtcagtctttatgttacaagatcttggaggccaagtatctagaaggaaaggattttctcaagtgtagatataaagactctgattcctgattttggaaaaatgttgtgaaagccaatgcaattttaagaaaaatggcctgtaaaatggtggctatttcgttggtaattgagttagggtctaagtatgttattgtggagagtgactcgaggctaactatcaatgctctcaatgggaaggagtctcattgggctcttgagaactatgtctccttttttattaagtcttctccctctttaattagttgtaatttttctaatgttagcaggacttgtaactatgttgcccataatgtggctaggtgggctttcacccaccagttgtacgactctattctgatctcctccttactggagaactttttttgtaatgaccgcgatgtctaattgttttttaattaatgaatgattacaattattttcaaaaaaaaaaacaaaactaaaaaaattgacttttgacaaaatggaagtaagtatgtgacaaggagagagttaaacattatatatgagtctttatttacaatgatatataagatacaactttagcatttcagttggaacccaagagatatctaattttcataagttgcgcgacatgacaagcgacatgttgcttaaggcggaacaactcttatttttcagttttttttatcatgttttgtttttcaattttgacatatatgtttatgggtgcttctacaatacactatattaacatatgtatattgatacaactcataactatttcggtatctataaaaaaattagtcgtgtatgttatagttatttaagacatcctgcaaaattttaaaatgtttggaataatttataatatacaaatcaatgtttaaaccgttcgtttcacacgagtataaaataaaaaagtcacttgtgcaacagattctttggacactattttcaatgtgttaaattttttgaaatttctcaaaattttatcagatgtcttaaatatatataatgtatacgaccataaaaaaaattaaactaagtatttttttagatactctaaaatagataaaagttcatcgatacactaattttaaggaaatttattgtagaatttttctatatttattattatctttgtgcaccaaaattatattattagtatttgtaaagtccttttttggcaagttaggtg

SEQ ID NO: 239318 - DNA, 1917 bp, Cannabis indica
agctgccagttctgctgcatttgaaagaataagtggtcttttactctctatttgattgctgcagaacaacagtcatctacctctgttatatgcattcttttaagcctttctcttgttttaagcctgtccaatacagccaaccaaagaataaaactatgcttgggatggttgagtctagaccaaacttgattacaccagtgaattcggtcttgaggttgctgcatcttcttgtatccatctgaaattttatattccaaagcaacaatctgacttgaatcccagtttcttttcatctcatcttttatttccacaagcttcctccaataccaactactatggatggaggccttgtggctccaacaatctccattcttcaaatagacactatggatccacttgacccataaattatctttctttaccgctagtgtccatatattcttcatcaatgctgctttgttccaagtacttacatttaaaaatcccattccaccttcagctttagaaagacaagttttctcccaagcaatagctccagctccactcatattgttagtgcctttccatagaaaactcctacaaattctttcaatctcagcaactaccctcttcggcaatattagaatctggctcaagtatgtatgtatagtgagtaatactaagttgatgagaacagccctacctgcaaaggaaatatgtctagtactccatgttttgattcgagatgtcattttgtcaactagagtattgcactcattctgtgagattctctttgagcagattggtatccctagatatttaaaaggaattgagctgcgagtaaatcctgaaagctgtgtcactctttggatctctggttcagacattcttgcacagtaaatagcgaatttgctattattttgccaaagacctgaggatcttgaaaagagtttgaagccttgaagcatcaatctaatgctttgcagatctcctttgcagaaaaggaggacatcatcagtaaagcagaggtggttaagcttcaattctttgcatctttcatggaagccaaaatctgctttattccccactttcttcataatccgactcagatattccatgccaagaacaaagagaaggggtgacataggatctccttgtctcactcctcttttagcaccaaaaaaaccatgcagcacaccattgaagtacaacgagaatctggctgtagagacacattgcatgatcaaagagatgaccttagagggaaacttaaaggagaaaaggatttcctctaagaaatcccagtctaaggtatcataagctttttggaggtcaagtttgatcatgcaatttggctttacagatttccttccataatgtctaatatgatcctgataggtcataatgttgtgagcaataaacctcccttttacaaatctcccttgattttgagcaaccagatccggtagtataatcttcaatctattacaaagaagtttggtaatgactttataaagaacattacaacaagcaatgggcctgaagtcacttacagtgttcggacatttgacgtttgggattaacgtaagcaccgttaagttcagctctttgagtagatgacctgtttggaaaatttctttaacagctaggcatacatcatcctccaccagttcccaattttcctgtaaaaaagagctactatatccgtcaggccccggggctttattctctggaatattgaaaacaatttgcttgatttcctcccttgtgcattctgaattgagtatatcttcatgtagtttcgtgatcactgctccttgctccatctacttttttattaactggcagtcttccttgcatctttgttccaagcaacccttgataaaacttcaaaaaagcttcagtaatggctacgggaatcctatttccatctcctat

SEQ ID NO: 239319 - DNA, 5699 bp, Cannabis indica
ttattgatatttctataaaaaattgaagatttttatctcattaaaaatggattgactttagctcttttttacttttaaggtagtgattaaaagaaatgttaaaggttacttatgatatctaacataatttaattaatgtgttatatgataattattgtaaaaattttgaacaacttctaagacttatctcatagtgcgaaaatataatataatataatattattacaacgtgaaaataatattatttttttgaaaaaacaactttatgtatatatagaaaatttttacaatatactatcttgaaatttatttgttttggtatttaaaaagatatttatgtcaaatttttttatggtcgtatatattgtagttatttaagacatctgacaaaattttgagaaattcaaaaaatttaacacatcgaaaataggatttaaagagtatgttgcatgcgtgactcttttattttatacacgtataaaatagacggtttgaacattaatttttatattgtaaattatcttaatttttcaaaattttacaaaatatctcaaataaataattataatgtaactactataaaaaattgggacttcatcatttttacacttcataacagtttttttttttttttttttttttttttttgatttttacgaaattctacatggaaacccttttgcaactagcggagcaacctaaatcgcaaccaaaaattatatatcaacccacatagaagtcaccggagaaaccagtttagaaacccaaaccgtaaatttgaaaacaaaaaggttaaaaaattaggtaaataccattttggaccctgtattttgcaaaagttaccgattagaccttctatttttttatatgacaaaatgaactatgtatttttcaaaatggtaaaaataggacccttaattatttttttatcaaaataaaatttaataataatccgaatgtgttatgacaaaactgtttacattttctgtatctgttcatattttcaagttggttatatttaaaaaaagttgtcaaaaattaagtttaggatcctatttgtactattttgaaaaatacagggtctattttgtcatttaacaaaatagagggttcagtttataacttttacaaaacacaaaacttaaaatagtatttaccataaaaaaattaatatatgaaataattcccctaaaaaaaaatttgaactaaacaattctaataatatagtacattagtttgctttgttggttggtgggcaagaggttaatacagtttgttgctttggtactttctaaaagttgcaaattacaaaacaagtgaagagcaacatgtgatggcggtgataaactaatgttatattttctcatcgatttaatacattttactgttttctctcttattttcaccacccacattcacttaatctttgtttctttctttcttagtttagtttagtttattaattaatttatttaacttttacttttgactctctactctctaattggttcttaatccttccattatttacccttattataattttaaatagagtattgatattggatattagtgctatttagcacattctataagtgtcacctagggatgcatatggaatggggcgctacggggaatgccgttcccgtccccgactattcccgacgggtaatagagcgaagaattcccgtcagtaatagaaataataacggggacctgtttatttaaaaataaaaaattcctagtactgataattttaagaatatttgcaaacatcaaagtgaaacaagtaaccacataaaaattcttcattccataatctataatcatgcacaccaattgcaactacaacaaagacaccaccttacaattgcaagaatataacgtagaagtgtgtgattggttaggacataggagagaaagaactagagaatcttttatcttggagaaagtcaaaacataaaagttctagatttctcttttattttttcggaatatcttgaatcgtctaatttcgagcaatatcgagagagttatggccaaaatattatcagtcgacgcagtagaaaactcactgccccttctaatcctaagtagaataggttttttcagcgttttttaatttttttttatcattttttggctataaaagaagtggacttcaatagttttcaagggagcaattcagtagaaaatcaaaagcaatcaaggagtacgaattttagagagcaaaatcaatattgaaggctttctcaatagagttttcaacattcttttcttctctattctaaaattaatatgtgtaaatttgctacaatgaacatgagtagctaaatagttcattagggtctagatagagattgtttgatattaatttatgattttaatatgattcaatgttccctcaatttttatatattttatttcattcgtacttaattacttttaattgcctggccatcaattaattgctttatgattttgatgcgagatctgagaaatgagtgtcaattatgctatagtgaaatagaactgaatttcgatataggacgagagtacctatatggtttagatagcttatagggtttctgtgtttaatgtctgctacatgtttaatttatcacgaaagtagaaaatttgcatgtagttaaggtttatatatctaagaagactacaaattaccttagtaaacctgctatgacatagaaattggtaataggaagataatcatttagcccataatcaatagatacaattgaaatcgagaactctaacttttatccattattaatttactattgcttcctgatttttatggttcttattgttttctagtttaattttatctaaaattttattcaatcaaatagaagtaagagtttaattttaacgtacttaactgtaatcctcgtgggatcgacctcactctttgtgagtaatacttgttaaaacgatatgtatacttgtgtgttaaaataccacaacaaacactaagaatggtactaaacaccaataatattttttttaacatttctcttttaaatattaaattattatttctttagcttaattgtactactccaccttttaagaagaaaaaataaataataaaaaaaaaccttaaagaactttaccttcataacgaatagttcgagaaaaagatcaaagatataagttactaattattaatgttatccaaaatgtcgaaataaatacaattaggctaccacactacataatattaggtagctttagaccggtaatgaaatagaaagaaaatattattttttatttgattgcattttaaagtattagtcgaggaagagtgaacgcagtcttgtttttttggagccaaggccatgcgcactttcaagatcggtaatttgcatcgttgaggaacgtagtcacctgaatgagggcagagtgatcatcaaagttgaggaagaaaggactagacacatctttgtgagcaagacgatctagagaggattgagatctacgtgagggctctgtggtgagatcgacatttgcaggtgaatcagaagtatcgtattcgatctaagatcgtggcttggaagtatgaagtcgtcttggagctattgacgatagaagaattggagcagaagtaacatctggagtaggttttgactgagtatgctcaggtgcaaatggagaaacaccatcttgagagcgtgtggaaggtctcaccatggaagcagtaggcaaggtttcttctgataccatatctatgtgtttgtgagagagagagaaaagtatttcttatctcgttaattgaaaaataaatttacagaatattaacaagctaaatgtcctaaccgaattcacaacaaactcttaactgaaataactaaagtactaataaactaactaatctccaaagcatcctgccacaacaggaagcactttctccaagcactaatataagaaatgctcttactcaaaaactaaacaaaaacaaaaatattaaactaagagggtggatagggtttcatgggatctaccctaatttaattagtaaagaaaatagattcttgaaatgtttattgttattatttcttgagggattgcttataacttcaacatctataaggtattttggttaagaaatatattgtctcaattcaagcaaaaaagtacttgtactgttttagtaagttggcatagttattttaacatacaaagcactatgtagctagatttttgttaaaatatcatatggaccacttaagtgagtgaccaacacaacagctttattattattttttcattgaaaggggacattattattattataattattattattattattattatttattaattgaatatatttttccaccaaccttctattacttttggtccactacctatacgtgttacatttatattagttcatataattattggtctgtttcgatttgttgagctctagagatattccctatttttatttgaccttcttgttaatatgtggagtatttattgtctattcagattcgattcaattatatattagattttaaattttatcatttgatccgatctaattaatttcagtttaattgatccaatatccattgaatgttagattgaaatgtatttcgcatatatttattggtttaatttataggtttatttaatattttagacttagtattttttggatgagattggatccatccaatattttagattcactatgtattggatttgatccatcaaattcaataaaagagttaaattttaatattaatttttgtatatacatatatattttacgtataataatataaaatctaattactcatctaaactaaatgaaaatactaattagttcgattggatgttagatgtattagatttttggatacctcaataaaaatccgatccaattcaattggatattcaaaaataacattcaattcgatccaatcacaattggatatccaatatttagcagtcgatcggttgtaattagatcgatcggttgtcattggattggatcgatttatgcacacttctaagtcataaatttggattgtcaccttacaatttaattacactataatttaaatattattactactaaaaattaatgtgaaatatttataacttaaattacttgtatatataaatatacctataaataatatttgatcttagaaaagaaacatatatacttgatacttttgtgtagggcaatatgttcatataggaaaatcaaataataatataaataaaaaataaaagtaaaggactttgcatttacacattgggcatttatttaagacaaaacattgtacatttatttaaatgttatccacttatacaatattatatttatttttttccaaaacaatagtgatatatttatttatacgaccccttgtttttgtgttagaaaaagataatattaatgtgtgacaaaaatatgcacatattattctaactattattagaggtaacgttttgaataaattaattattattttagcattcataagaaaatctcataattagttttctatttatttctcatctcatgaataaaaaaacttaattttttttttaaaataataaaaaatctcacttgttttttttttttttttttttgaaaggtaaaaaaatctcacttatttgatataaaaggaaaaaagaatattaagaagagttga

SEQ ID NO: 239320 - DNA, 2009 bp, Cannabis indica
agtttttcgcaacatagcttcgaggaagctccattcaactcggtcatacgcctttgctcatatccagcttcagagccatgtagccatctttacccttcctttttcctttccaagtagtgcaatatctcaaacgaaaccagaatattatcggagattaggcgactagggataaaagcgctttgattagcaaagatgattgtgtccatgaaaggcttcattctattaactataacttttgtaattattttatacaaaacactactcaaagctatgggtcgaagattagccatgggttctaggttctttttcttcggaatcaaaatgacatttgcggcactacaatcattctcaaaaaacttacccacactgctggtaacaccacatcccataatattccaacacttgtgataaaatgccagtgtcataccatgcagacctgggctcttatccagatgcatttggaaaggcacttttttcatttcttcgtccgtaattggcttgcacaactcagaattgatagagtcgggtacaatcaaatcaacacagtctacaacctctctacaagacgtacctgctgtatgaaacaacccttggaagtagttgaacacgacttcgaacagtcccgtttcccatgaaaaccaatctctagcttcatcacgcaactgaataatttgattgttgctcctggttgtagcaaccttatggaagtaactactattcccgccggtcaagagcttcagacaacttctttttaatatcttgatactgctggaccgaagcactgccacgtttggagtgtagaaatttcaaatcagatttatgacatttaatatgatgcttcaaagtgcatgtgatttcttttccccactgagacaacttctcaacacacaaagaaagtttgacaccgaaattctgcaactgatgttgctcccagcagtccttcacaatctcaaggcataacggatctttcaaccaagtattcttaaatcgaaagtgacaactaggtgtaaaattgttcgccactttcggttcaagaaagattggggaatggtccgaagtagagtattcaagattggtgaaggtagcatcagggaaagccatgctccatgaatgcgagaccaaagctctatctaggcgcacctccaccaaagtattggatccccgacctttctcccaagtgtaggaatgtccttgaagttcgaggttagtaagcccacattgtcgaatagtagcattgaagccatttatcaaccattgaggttattgtctaccaccacgtttatcttcatgacgaattgtattattaacatccccaataacacaccaacgcaactccgattggttggacaaagtgcgaagtagattccaagtgttttggcgcctattacgatctggttctccatgaagaccagttaatctcctatctctattaggaggagaagaaacaactaaattaacatggttatttgaaaagcccaacaaagacccttccttcttatttttccataaaagagcaagcccacccacatgacccaaagcctccaccacaaaaaccccttcgaactttaataatcttgccagtccctcaacttttgatttatgacacttagtttcacaaagaaaaatacaatgggtctctcttgagaaacaatttctcttaggaattgaatactccgttagttcccaagcccccgacaattctaacttagcacattcataatttttggcaggactggaaaccagtacccgccccattcgagttatttacatcgatcaaaaagtcccctataacaactttcacacagtcaagtatatccacacttcttgaacaagtgttatttttggcagtaaagcccacattattcttcgacccactaattcttttgacttctagaaaggtcagcccaacacttgaatctccctcaaaatttttctcatttatctcctccatcttaagtgtttgacttctctaataaataaaacaaaatacttatgtttttttttttttt

SEQ ID NO: 239321 - DNA, 1549 bp, Cannabis indica
ttggaagagtttaaccgcaaaaacctctaaactatatgggactcaatactagacgacaacgaggagggtacgtgttataatattactattgatgcaatttaatattgggtcttacttattttaatttaataaaaattatataaagtcgctatctaattataaaattttatgttatagctgtattagataccttggtgcctcatagcaatattcttttagattgctattagaaaccagtagtacttaacacttcactttataattgattgacgatactctttaaagttattatattatataatgtagaaactaatatttaattgcatcaataataacaataacaatcaatttctcaataaataaatatgattggttaaaataaaattgataccagttgctacgtattcaggagcagcgtaaccatatgtgcccatgatacgagtcgtcacgtgcgagttaccgtttactgggcccgattttgcaagcccaaaatctgaaagctttgcactataagcctacaaacaaaaataatatttaattatagggaaaattataaattttatggtttttttattttttttatgcataaatatagtttttcttttttttattaaaaaaagttattttattagaaaatttaaaaaaaattagaaaatatagaaaaatttgataagagttactagatactttatagtaactataggtaactaggtatcttatgttgtttttcttcacaattttttaattttttttttcctagaatataattttcttttatatttttgtaaacttatactttaaaaactgaaataaaaattccctgtcatctttaaataataataataaaacaaaaagagataaaagaaagaatgttactccatctagtaaaatgttggaagttttgaagtccctgtaaatgacagacttctcagagttgtgcaagaaggcaaggcctcttgctgctcctattgctatgtgaagccttgtgctccatggaagtggttctgccccttctgtaattaaaatcaaatatattaataatttcaaactaaaaatatatataattttaattacgtattttaatagtgtttaataattatataaaggcttatttaaaataaataattatattatggttaattagaaatttaatctcttcaactttgacaaatgccaaatcatgctctttaattttttttttactgttaaaaatctcccataaactattgagattgttagttttaagaacttttatccaatttcatttaatttactaattcggtaattgtctctgtactaaattatgcttcgtagactttgatatttactaaattatgtccttcaaactttgacatgtactaaatcatgtcttttgaactttgattcatgttagactttccttactaaaattggataaagtcattaaatctaaaaattttattagttcagggagaatttttaacgattttaaaagttcaagagacataatttggtacatgtcaaaattcgagatacaaaaagttctaattaatctaatataaatatatat

SEQ ID NO: 239322 - DNA, 1359 bp, Cannabis indica
atatatatatatttaattatattttttaggctttctttttgttttccaacaaattagttagtatccaaaaaaataaattactctacttaaaagaatagcacgcttactatcttttatttttttcaaaaatgcgtatgcacctggctgttttatgttggatttagagttagagctgagctaaggagggctgggcgccaatctagggcccacccagcataggggcccaaaaacaaaaaaaaaaactaaaaatacacatattttttagtaattttcaaaaataccatattttcttttgaaaattgcccaaatattttattgctacctagggcctaattagtctatgacctaattagtctcagggcatagttagtctagggtctaattgtctagggcatgaatctagactttgtataacttcttattattaaacaggtcactttttatgatttcatttattttttgtttgatttgagttacttattaagttttttatattattatcattttctcgtattgattattagtagttttatctttagtttaattgctttctagcttggatttcaagttcttttctaaatgtttcttggatcaattttatttgatttttctttctgattttcacaattctagttctaaatcagttatttttgtgtggaatttaattttgatttctttactttgagttttccagattttgatagctgtaaatactgcttcaaaggataaaatgcaggtttgagttcaaacttcttatgtttagtgcaaataggtaattcaagttgaaatatgtttatttgtgttatggtggctaaaatctttttatgcaattttacatttttaatagcatgttaagaaaagtaaaccaaatattatggctattcagcattctttagcatagattccctaacaatgaagttagttagggtaatgtaatttagtttggcttattttctataatgtagttacaaccttctatggttgaggctatattaattgattaggattgagtggtatatgtgattgtgtataggaggtgaggggttcaagttagggttggaaaagatccaatccgatccaacttgttatgctcatattttgatccataaatgtggacatgatacgtggaaagttagacacaaaagttctggaaaactcagtaataaatgaattgtctcggagagatacgtgattatgagcaatatcaatttcgcattacgcattggcagtaagacagggagacaagcaacatatggcaagataataatgataaaagtcttctcgggtgtaacggatcaatattgtatcgctggaaagggtagataatgagttctttaagagcatgcaactcattgaccc

SEQ ID NO: 239323 - DNA, 2421 bp, Cannabis indica
cttcatttttattttgagagagtacaatttgatagttgtcaaaatttagaggtaaagttgctaaataataaaatacgtcaatatttaaaagaaataataagatggaaccaaacagaaagactaaatttctgtagatataaaagttcaagagtaattcttaacaagttgtatattttaaggacagaatcaattttgtcgaaaatttaaagagtaaaattactaattattcaatatatatatatatatataatttagtattgcatgacaatatcacatagatgggactaatatattaacacaataacacacgatcctcaacaagtcattgagccagttcattaaaccaagataattttagctctcaattttgacacttgatatcccaataagctataaatttacttcttacgtagtgttaatattaatggacttcaagactcaaagtaaacttgcactcgacacatgtaaataattacactttatttagcaaacacatgatacgattcaaaaaataaaagataacacatgattctagcatgacccgacatattaatgcatctaatataattatttgactaatatatatatatatatatatattatatgttcacatggatatgtattatgatgtcaaatatatttcaagacaaacaacgtggtcatgtggcctggccacttgtcatgactcaaataataaatgtgaataagattgcagtagcaaaatacattattgatagaataaaacattacaatacattattattattattattattattattccatacgtttgtaaaagctcattcattacaagaaataagaatgagttctctccatgacttaataaccgaccaaatataaaaccaaaacggtaaattgaaataggaggcaacatcataaaactcatgatgatttaatccttgacaatggtgactgggcatgaagcatgagtaatcacatggttgctgacactccccattataatcctgttttattatttcaaaaagaataaaaaaaccaaaacccaaataagaacacagcaaataaaaactcaatatttgttttcttcatcactttaagaataattcacaataccaagtgaaggaattacctttgaatggttccaagtcctctgcttcccataaccaaacagtccaacttcagatcttcaatggattgaagaagcttctctctagcatcgccccagtaaatttttgacacaacagccacctagtaataacgatcccaaacaacaatttagtcatttcaatataaacatacacatataatatatgagtaaaagcaattgatgttttataagaaccaacctctttctgcctagaaccagtgtcgagtaaatcaagaacttcaacatctgttttaaggttgtacttgctcataacttcgggctctctgaactcagacaatggaataagagctacatcatcaaccaacaaaaaagaaatatcaggaaaaagctcagaacagatgatagaaaagagagctaaaattgaaaagggattatatgaatgagtgggacatatcacatacgagaaccagatttaacccagagaagatttcgagattcatcgagatcagagttatggcaaacatgaatgacataaagggtatctcctttatcagccaaattatcgattgcccatttcagagcgttcttgctgctctttgaaaagtccacagccactcctactctcctgtctttcaccattttttttttattattattatttttatgagagaagaagaaatggaaatgggggttttcggatatgctttggagttaagcaagaggaaagagaaagaaaaggaaggaagggtttttatagagaagaagacaaagatgccttaagcgagaataagtaaagtgaatatatatcttcaaagctagctttgggactttgtttttcgttgcttcgacacaacactcaaactcgttttcggctttattcattcaaataagccatcgtggccctacacgttcaactttttttttttttgatctgtatgaacatgcccaacaattttatttaggctaatttaaacattgtttgggacaccattttatcaaattggtgtggaatatttacactatttcattctaatgatacactaaattttgcattaacaagagccactagcttattagcagatcttttaacatgataaatattaatattattgaaagaagataataaaagtttacactcttgtacaatcagaccaaaaatagaaggcatatcctccgagctatgcaaagcttgtatagcaataagacaatgagtctcaataacaatgttcgaaagattagaggcttttatccaacttaaaatctctttgatgctcatcatttcagccattggtgcactagaagagccagccgagtaagtcgaagaagccaaa

SEQ ID NO: 239324 - DNA, 1642 bp, Cannabis indica
agaaaatataatattatataaaacatcagtagcaacaacaaaaccagttcttgcaaaaataaataaataaataaataagaacaaaccagttactagtattattatgagcattttcattacagcttagtacaatcgtttcagcttatatgttatataaagaaataataacctgttctctacaaagttttcttcatctttaataacttgcattgcttcttgtatcttgcattgtccttcaaagccatctcctggtataactacaccccacataagaaattccattacattattctctcttgataaaaagctctatatggtaaataaatgagtaagatagaaagtatatcatgtacctttttctcattgtgagagagtttgtaccacatttgaccaattatcttgcttgtttcaccaaaagaagatgatttgaccacaccccaagtagccataacaaagaaagcataagaagtacatggcttcacaggacaactacgccttctaaacaatctctcaaacacatcaatcttcttctctgaatttctcttccttgttttcactttctcaataggccttaacaaattctcagttgaaatccgaagaggataatatttcactggagataagaccccacttctcagcctcgtcacaacacactccctactcttaatctcctcagactcatcaccctcctcaccaaaacggcaattttcatcaactactggctctgcaaaacgactttgtctccttaactcttcagaagcatttggggtcacataagaagagaaactcgaatcttcaacagaaaagctttctgggttatatggaactgtcccaggagagttaagtggctgtggctcaacgttctcgtgaaaaagtttcttggcgatattcaattgaaccgagaattgcaagtcccctgcatcgccttgaacttggattgtgtccccatttaaaaaaccagataattgaagagccatgggagacactaatggggctggtgttgatggtggtggtggtgtattcattgactggtttagtccttgtaaatccatgtccgccattaacgaatgaagggaaatgagaaaccaaacaatataaattgaagttacatgaagaaggaaacgggacgtaaataaatagaatagtacttcatattagtggaaccgttgcaatctttgaaaatcaaatgtaaacgacactaccaatagagtcgttttgtacatggtttccaaaagttgcgaccactccattgtcactatcacacaacgaccgtattcgtttaatgcaatacactaattttgttttttgtttttttttctttttctttttcggttgacaatgcatgtttattaatgaaaactaaagtcgatcatcgttcattgctaattttttaaatatggagtgtgtgagatgttggtttaactagtataaagcttacattaattcttttcaatccttacataagaatagtaatataaatagattagctaatttagaaacacaaataaactaagttagaaaactacatcaatgatataacgcatcttgacatattgagacgaaaagaaaggtaactagcaattgatgtgtgtgtgtttttttttttttttttatgttttttagttaagaaactctatatata

SEQ ID NO: 239325 - DNA, 1765 bp, Cannabis indica
attattattattatttatttgaattatggagtaaaaactcaactaaaagtaatgattttgatttaagaaatattaaacatgtttgtttgaactttggagtaattaaaaatgctttcttttcttcttagtcaaaaataaaaagctatcttttctcatataaaataaaacaaaaatacagagtgtcttgtccatacgcattaaccaaattttctttattttattgtattttattatatgatttttccttgctagctaagtatgaaagaagttataataataataataaataatgacctcaactctcatatcataattcatatatctcaaaatataaatagtaacaataatttgtattagagaaaaggttgttgcattgcatttgcacctaatatttactactatgatggctttgatctcttcaatcatagtcaaaacatgatataaatatacatacatatatagatataggtataggtatatatatgataggaccaccaaattgtttatgcagaaaccctaaaaattcaaactttgagtctttctttcaccctaagcaaaaatacacacacctaaaccttggcaatgccaatcattgtttgcaactatatatagggcccactttaagtatagacgagctagacttgtacttaaagtctaccaaacacgcacaaaagctaaaaagaaaaatttctttaattatatttttttttaataagggtctaaaaataatttttgtcttatggtccataatatttcaagataagtcgtatctatatatttatatgcatgtcaaaatacacgctataatattactactaccatttaaattatcatcaactcaaaagatgaattaatgaaaagaaaaggatctaatctatgcaatgtgcatggatggttcaaaactataattgtgattataaaaggctcctttctttaaagctaattatactcaattataataacttttacttgattacaaatactagttgtaaattgtaattgtaaagtgtttgataaaaattaactaaattgaccataattttactaatgaaattgaaattgggtttcaattttcctctcttaaaagtggatacttaagttaaaacttaaagttcaatccttttttcttgttcatagcaaaacaagaaaacacttaataatatggagcttggacttgatcaaataagggtagtttggtcaacaaatcttatcttttgatcaaaatattcaacatattgacaagtataatgtaattggttttgtaaagaagaaataaataaataaaaaaggtaattaataaataatggttgtaaaatgcacttttctattacccaataaggcaaaaaggaatctttgcatgcaacacttattttcttcttttttttttaacacttttatgacttagtgttgtacatgtgaattctccaataataatttgagaaatttgtgttatataatacatacaaatataaatattgggtttgattttaggaggaataattaataaagaacggaagaaaaaaaataataaaatctaacaaattgaaagtgtcctaaaagcttttcaagtcttcaatatgcagagtcagcccttttaaggcctgccaaaaggaacaaatacatatcaatgagtaaggaaacaaatttactttgtaaaaatgagtattttttttttaaaaaaaaaaaaaactttaaaaatatcaaaaagtgttaccgttaacttcttattacaatctcttagttaatctttgtgtttgaaaaacac

SEQ ID NO: 239326 - DNA, 1987 bp, Cannabis indica
ctggagtgttcggtctcaggataacttgggctgggctgtattttgtagtcgctgtgcgacatgtctgcaaaagtattttgattatgattgtaaaagtttaaacacaagattccaatttatgtaaatatatatatgtttataaagattaatagtttaaatcaaaaatttaacgtggcacaattttcaaggaaaaccctttgattagcaaaggtggcacaataattaaaaaatcacatagcacgcctaagtatcagggcattacaagggtgctccaaaatttgtcctgaatgacaatccatgggagatagaccagtatgtaaatagatttagaatttataataatctaaggaagtatgaaacccaacaggggcttcaaagcattctaggatggttctagaatagaatttatgttcatggggagaagcctagtaagtgcgtggatgggggcttcagcatttggagctgggctcatgtagaaatgggtccacatctgccattaaggtgttactttgccactctctacaccttggccgacgtggcacctttcaaatttattcccaaggtgaaccgtttgttttcaagatggtacatcctttgtactcagcacaagaaatcgacactgacatcgaaggagatcttgtatttctacaagatcaaatctcaactcatgagaggccataaagtgaaggtgggttcttatatattggagcaccattctaagagtgtttgctattcatcaagttctacaaagtgcacgcaggacttctaagattactacttctacacttttggcttcccactgaagagagttcccacactcaagttagatcttaatatagcaagtaagtgttccttctttctctaaactttaaatcttattctccttccagtttttgtaatctgatacgcctcttaagtctaatagattgtcttcctcaatcatccctgaatctagagttgaggagaagtttaatttttataagtccctatcacccaaggacttaaaagtgggctagctcgtgaccactaaaaatcttaaaaaagtgtgcctcattgccccaaaccaagaagtggaccacatctcagtgaatgaaattgtttatgagtctctcgaaggagatccagaagaggtaaaagaggccatcacggtcacaactgttgaggatgccctaattgttgtgaaggtcgatgaatagtggcttgctaattggaggagacaattcccagagagcttgagtgatgttgaagcaatcactatctgcttcaaggacactgtcccaactcagggtgctttgggagcaagtacttctggtagcggtgagactccctttcatataattagagctcccactttagtagatttagattgtaacaccctaactagcataggcgtgttagcgtgattttaaacgtactgtgctgctcgtttctaatcaacgagattaatgaaaaacgtgattaattaaaatttgcttatttaattaataaacttaaagtaatacatatatacaatcctgggatcccatttacaaaatactttttaaaagtttgctacacacataaacaaaagtttgtcgctaagcgactatacaacaacaacctctatgtcccaaagatcgtacactccaggcctaactgccccgacaagtacaatctttacctgctcgttctcacggctcttcaactttagccttgcccttacctacacatgaaaatagcactgtgagtcgacagactcagtaagaaaagcataacataaacatacaaataacccgggttataacctggcgcccatacacccgatcgtaatcctaatgcccgtttccttcacgatactgagtctagaacattcatacgacaatactatcgaccataatgtcagcctatactcaatatgctagtcatactctagccatattgatgtgacaacataaattagtatttcagccaatatacatttatcagtaatcagtacaactctatgtat

SEQ ID NO: 239327 - DNA, 1350 bp, Cannabis indica
aaaacggtaaatttttaaaaaaaattaaaaaaataatatataaaataaatcccttcaaaaaaaaattgcaagagtttatgcaaattagccaaatggatcataatacttaatattagtgccccattcattttggatgccctatttatttttccatgctatcttcccttttaaataaaaacctcccaatttctcatgataaccccttcattcacccatcccatgtgatctcccataattattcacaaggtcacctttttagtcaaaattgatttagagtgttcaaaacttgtttctttttagttaggaaaatcaatttagagtgtttcataagtactttatttattatctaaagtttaattaattatgtactcatggcatgtttataaaataaatttagaatgttttatgtacacgggtggagtctatttatgtccaaaaacaactttttattacaattgataatcaaattataattcatataataattagtatttctctttccaattaattatcaagttgtaattaaaagtattttaatttttacttgagaaatgttaaaaagtacagtagtgtttagtattttttatgtattaatattgctattgatctaattaaacattgtgtcttatatattttaatataataacttttaagcagtatggttatccaattataaagtgatatgtctaaaggtcctagacactaccaatcacgaccaataacaatttaatcaagtaataattaagcacccaatctactcattttcactttgaagttacatagtattcacttctatattttattatataattgaaagtaaagacaaagtccttatttactttcatagacaatgcatgtgctacaaattattattgtttaataaaaaaaaaatataataaaaacaataaaagttgaaagaaaaaggcaatcttattgcaacctacttaaattggtacaaacaaacctttatatactatattgaaaataaatcacttcccatttataatattattacctttaatttatttcattggatcccttgccagtttgtgcatgaattatgaccttttttccttatttatccctcaagtacttgaataaatttaatttttgttgggagcatgtagggactttgaacatgaaaaccaatagagaagaatttttattttataattaactatagagaaggatcttaaatcttgacctcaaataccaatataactttgaccattctatactttttatataaagtggctaattgttagtgaacatctcatggtgttggtcatgtgggatatattaatttggggagctcaagtttcttatagttttttcttttgtatcttttta

SEQ ID NO: 239328 - DNA, 959 bp, Cannabis indica
cttcaccgagtaacgcccatgcgaattagacgaaactaaaatttggtgagcacttttcaccaaaaaaaaaagattgaacatcaactagacaaattcaagagacttttccccccacctagtcacccagtgacagctcctaggctattatcggcgcccaggacactctagtacacttttctagagaagtctcctaaacatttcccttatttttgtcaacaatgaagatatgagtgctttcaggaagaaaatgaagccatctaaggctcggatgaaaatatgggcgcccaacacactaggaaaacgtgccttgggtgcccaagttgacatatccacgtgatttgattgtaattctatcttgggcattattcttgttttgctcccgaaatgagatttgagacttgaaattagaagaaaatatcatccaagtggttgttcaacccccacgcaccaccagacaccacactaggcgcccaagttaatgtttaacttggagcttagtgttcccggacatcgatcttattttacggccaatataaaatttggatgcttctgcaaattaatatctcatatatatgtgtcacacacaagttcactgacacttatgcgcactagtgatcacccggtcgtcatctagtctcaatcgatgatcactcagacatctcctacgcgcatcgagtaaaattttcaagagacagtgaacaacttcaccagagtcaaagaatgaactaagaaaagttttcacatcatttagaatcttaaaatatgcaacaaaaaaaacccgaaaagcgcaagttctaagcgtccatgtggacatttgcgggaacccgatgactggcaaattagttttgccgaattttcaacattgcacaccgctcagtattttggccatactcactcaatttttatctaaatgacgcgattcaagtagcattggatatctctttttaagaataatctaa

SEQ ID NO: 239329 - DNA, 1449 bp, Cannabis indica
tagtttctttacccaactatatacatataaataaaagcaaaaattaattaaacagtactgagatgggagacatcatcctcatcatcattcaagcctcaaaaattacttgtcttcatcgtatggctttacatttttggtactattttggaaaaaaaaagaaagagaataatttgtaggggcaagcaagaccatttttgtttctttttgtcgagacgtgataagaattatggaattctattttcaaattgttcattcaacaatatttgtaataagacttaatatttttaaacaatgtagttatttaggatttcctaaaataaattctcacaaatatatataatagttaaaagatttgtatttgttgtttgtcaaatttaacaacaatgctatattttatattaaatttagccaatgatacactatttaacaagaattaattttctcaaaaacactaaaatataacattacaccgctattttgacttttattgtacataaacttacatgtggttgtacaactcgaagttgatatttttttaggggttaaagtaagagcattgttatggggttaaaatagtgctttataattaattaataattttttataataaaataaatagaaccagatattaaattacacttcacaaagttgcttgagtagcatttgtgttaaagtaaaggagagaagcctaaaagcagggctgttggagtgaattgattcgtaatgaaaaagcgacactaagtattgtcgttttgatgccacagccaacacctcacctgctgcaccacccacacacttccctactacgcatgcacacaatcattctctttcacttttgtttaccatgtttaattaattaactataaaattaaccaccatctttatagatgattaattataattattaaccgaattaattctctacctatatgtgactaccatgattgtttgtgtgttgtgtggtgcaaccaaatgtcacacacttatacacttaatggtggttcattattttcatcccttcaattaaataatgtaccccttaaaagagtttatcgatatattttaatatctgttttggtatctgttatttatgttgtagttatttaagacatcttataaaattttgagaaatttaaaaaatttaacacaccaaataactataatgcagacgaccataaaaaaaattaaactaaaaaattctaccgaaacaaataaaaaatgcatcaatagacccattatagtattttatggccatccacaattattattattattattattattagagtattgttattagacatggtgctatacattttttataagtggcgttctataatatagttattaatattctctaaaaattattttctaaattgtatgaaattcgatatttaattacactcttagtattaagcatcagtgatgtcttttattattattattatt

SEQ ID NO: 239330 - DNA, 2054 bp, Cannabis indica
taatgtccaagggttcccttccttgaattccaacttaaagtttcattgtgctcggcggccctgctccgcaaggctcgccgctttatcaaaagaaattggagatcgtaaatccatagatgtagaaatacttaccccattatctatgttggaattactaccttcaagaggaatatgagaccccatatctgctaccaaatacgaaagccgcatccccaaccacttcgtccccaacagttctcataatccctggccttgtagactgctcttcagcttccatagctgcaattgcttgatgcctatgccgagccttattcttaatggaaatcttcctacgctgccccacttgcatcttcccttccttatctccatgatcagctcttccaggattgaagccatcattttccccagaaacttccaattcaacaatcacctgcttccctttgttaaagttcctcttatcctgaacttctcccttcccaatcgcatgccctgtgttctttcgtttttttacttctatttcttcctcagataatgaatcagatagttgtctcaccctacccaattgcaacgaagacccactaagttcaagcccatccatctttccaccatgacccacttttaattggcccaaagtcttatcattaattgagcccaaatgctttaaatcatttgttcggcccaaagcttccccagccccactattctctccacaactacctaattccacgtgtcccactttcaaagcacctcccatagctccacaattcgtgccactactttccataaccatcacctccgcccgtccaccagccaccggagtactctgcaatcctccattgaggtccacactttcatcatcatgatgtgtagcattttgtctaccatcattagcaaacagcctggtattgctttgatcatgcaactccttttctcctccattgattctcatctgcaattgcttaaaggctacaaatgcattcggaagagggtcttcgtctctcaaccaagagccatactttggaactacctgaccgtgttcatccttttccgttagtgcaaccttagcacactctttttgttcgtgtccccataagccacacccaaaacagagcattggaagccgttcgaatttgaattgaacccagtgttgccttccatcactaggaatgaatctgcccacaaaaacatttttctgcagtggaaagccaatgcgcattcgagcatatccattcaagaacattctcttgtcctgactccatttgaactcctcaacttctccggccatctctcctagtttctgcacattccgttgcgtaaacattttcaatggaatacccttgatcttaacccagcaagacaccttatccaaccgaaaatccgcccattgtcccgagctcggccattcctctaacagcaacagacctccattaaaaatccatggctgcctagccaaaatagtttttgtgtcacccatattcttaaaggaaaaacccacaatagagtgttcctcctttttctcatacactttcacctcccagtctttaatccccttccacattctgctaaaaatattcagcagcaagcgttcactgatatcccttgtagagataactttcccgatcaacgaacatccgccaaacgagttaaccgcttctgaattctcctcccattcctctgcttgttcgactccaagttgactagtcattgtcacaatatcctcaacagcgtccgacggtgcccccatcaccatcataatcaagaaaaaccacaactccctcatcataaacaggtctaaaaccagttgctcacagcatagtcctactgaccatttattgatatttattataaactactaatagacttaatttttatgtaatttgtagtttcttctaaagagtttttaagaatttatttttaaaattaaaataatttatataatttctaatttatccacaaaagatttttttctaatgatatcaaaatattttataaaacactttttattaaaaaaaatcttcatataatattatccaaattataaaaataaattaaaa

SEQ ID NO: 239331 - DNA, 2613 bp, Cannabis indica
aaaaaaaaaaaacaaaacataaactatataaaagtttatatatatatcttatcgtatttttataaataaaatatataatttaggataatcttgtaaaaatcctgagaatttggcaataatttattgggtcaagtttgatatttcaaaactactttaaaatgaatttatttaagagtaatataccataaaaaaatacctaagttttacattttgtagcaattaaatgtctaaattatttttttgacgataaaaatatcttttgccacactttcttgacagtcgtaggtacttggcattaactaccacatagatcgtcaactgtcaacttctaattggcccaactcattataactaattcatattgttatccggaataatgacttgtacaattcaaaagcccaaatgccagccaaggttggcccaaacctggattcaatctcgtatactattcacctagatgaccaagtcacgctatagccctaatttggacatgagcacaactcgttgacctgccaaggccagatctccttaattcgaaaaaggccattcgacccataagcgaagagtctatcaagacaagtttagatactttcatgagaaaattcgagatcgggtaattgaagggtcatttatgtagcatctggacctcccttactcgaaaccctccaaacacaaggtcccacaatgttagaacatttcctttgtgtcatactggtagagcatgtaacacacggcacctgacatctttatctgcttgaacgaatagatctcgcttcgtgaattgggcctcactaaagtggcccaaagtcaataactattgtattttaccccatcagagggcctatataattgatccataaaaaccatactgggtccaggtatgcccatacggggtccttccctataaatagaacagtatcccttcatacaaagggttgaaaattgatttcttgggagaagatttgagaattagggttcttcaactagagcataaacacttgtaagaaataatttgaagcttttctagctcaataatattgactcgtggaccgagttcattaacactcgatccgggcaaaaatcttaatctcttcttctctaatttacttctttcttaagcttgtttattttataattagttttcaaaaatctcagtaaaaattttggtgctttcattgacagttgaggaaagaattgctaaagttatcatctagaacgatggttgcaacctaaaaagaagtggtcaaaccacctacatgagaccctgctcgagatggtgctagggatggcaaggaaaatgctgctaacgacaatgaaaaccaactcttgtaagcaattgttcaagtatttgtcgtgggggacagggaaacatcggaggtaggcactcatcctcattcaaaagacccatgtcatggggaacaacaccttgatgactctattgaccaagatgagcaggaggatcatggagatgacccgaaagatggtcataatgaaaattatagcaaagaatacgaagaagagtactacgagcttggtcccgaaatgatacatctggggtaaaaactcactgatacatagaaaaggctggcaaaccaggaggaattttctagaaaattgcaagaaactcttgcatagttataggctaaattcctagaggaaaatttccccattccaccaattaataaccctgaagctgggtcgtttgccccaacaaaagataaaggaaaaggcaccattggtcccctccgtaaaaacctgtaaataacataccacaaaacacaaaaccacagcctgccaatcccaacagagagaaatggatgctcatgccccagggttgggccacctgattggcccgtaaggcagagtcgtatggaacaatgggtcaggtgctaaggtacatagtcccaacattcagtttgggtggagagcctagatccagaggacaacatgtccaccacgaacatctgggcttgcctgaatgaaaaaaaaaaaggaaaaagcgaaaggtgagaaagtaaggtcttgcggaggcaatttgagaaatagtatcaatgatataatctacggacgagagctcccaatcgatcacacaagactgctagaggatcaaatagccacattgagaaaactaacaaattgattggcctagaaaaaaaattggatccgcatctgactcggaagacgaggaggtggaaccatgcgtcagaaaaatcatctaggcaacactgctgaagaacatccaaatgcctcaaatggaattgtgtgagggcaaaatggactctagggcccacttttacaaatataataggctgatgcaggtagcgcaagtcagtgatgatgtgcattatccatgtttctctttgacattatctaagtccgccaaagactagtggaagagattaccatccgatttcattcgaatttggaaatacttacaatttgtattctaaaagcagttcattgctgcagaagactttgatatggaggtcagctcactgaccatcatcaaatagcaacccagagagatcctcaaggcttacattaaatgaataatagaggcagtggctaagaccaaagtgaatgatgatatgaagtttgtgttggaaattattt

SEQ ID NO: 239332 - DNA, 1787 bp, Cannabis indica
caagtcatgaccatatttagccgttgatcattcgaagttcaatctagtaaaggaaatgatcaaagttatctgtaggctatgacataacaccatggtcgattcgatccgattggctctaaggggttcatgccatatcaattttgctcaataatctcagaagcataacagagttgtactcaaaagccgcgtgcatgcaatatagtgtaaaagattaacgagtccctttagctgttaaaagagttggaacaatttttgttgctcaaatgagtataagctgtaagaaacacattaaataaatgtatcattttgttacaacaccaagactgaaacgtcttgaaccacatttatactataaaaaataggaaaaaaaaacacaatcttttttcaatagctcactgccagtggcatcaacaatagtaagttatagatatttggaaaaagaaaaaaactaaataaataaatcactcttgtaataattattcttataagtcatatctttgttgaaccgtgggattttttcctcaattcttggctgaagcagggttggtagtagtagtgacaccacctgttgttggactagtaaacagaacaagaaaaactcgatcaattaaaccaaatataacttgaagaaattcccaaaacacaaatctaaagaaagaaaaaaatgatgggaaagtagagaagtaaaaacttacaatccaacaaaaactttaaaggaatcatagatacaccattgagcaccagttaaagttccaatcatagctatacgaacaggaaggccacgagtaaagagaccccacattcctagctgttttatggcctatacaaacacattattaagaacaaaagatgttaatctcgaagagtcttacattatgagttttgtggtttgtagttaagacttacatcagcagaagtagctcctttggcattgttgagaaaagagaccaagttatcagcagggtgtgaaatgagagcacataatataccagccaaataaccaccagcaaagctaactcccaactgcacttgtttactacactcttctttgggtttggggatcacttgtttgtacaattgctcaactatgttctcataagatgcaaatttcatcattgtatctgccaagtcccaacaatatgccaattaataaaaaaaaaaatattaaacaaggtgaagattagaaactatgagacaaaatcttgattaggaaaatcttacaaggaatctgacgtccccaaagtggaagaagccctttatataacctgaaaaatatcaaattcatggattaacaaacattattttgtactattatgatccctatcattcaaaatttagatatgtttgtagggaattttttatttttagcactaagaaaagttattattttaattttcttatataatattatgtacttttagctataacaacttacctattttcatacttatggagtggaaaataaaatttaaataataagttgcattgttataaaaaagaataaataaataaataaaactaagtacatgtgataatttaatcttatttttaggtgctgaaattattcaaaatttctcacaattagtcaagataccatatctactattataactatataactataatgtacaatattatataatgtttaatactctgattaaatgtaatattattattgtgcaacttaatatcgaagttcacttattttaatttaataaagaattataaagaaccgctaactaattatataacgtcatgttatagaagtactagacattttttttttg

SEQ ID NO: 239333 - DNA, 590 bp, Cannabis indica
ggcaagaaatttctatcccaataaaagcggatactcaccacaggtagaatttccatagctaatggggagcttacttcttttttttttatttgaaaacttaatagtaattacctggaattataattcatgtacttttctatatagagagtgattatatatctcccctaaaaagattccatctgtggggattttagatagcgagtaatatattgtaacatttggacaacattttaaaattgagaagtagttgattatttccttgtattgttttttaaaggaaaatttcatttttttttatgcaattctagaacgtaacttttttttattcaacatcaaataaatcaaaagcacgattcacatcaaccaaacaaaattgtggtaaaaaaaaaccaaacaccaaattcaaaaataaaataaattattttattttatctttctctccatcttctctttattcactccacctttttcttcttcttctttattttttttttctatttctagtgttgtttcttttgtagtttattccaagctttattttcttaagctttggatcatggttggctctaatatggatctccaacagggtc

SEQ ID NO: 239334 - DNA, 1992 bp, Cannabis indica
agtctaattgtgcgttgtatgcaatttgttctctcagttgcttttggttaaggaagttattgtttttccagagaataattttgcagaagaaacattaatgaagaggaaaagaaatattattatttttatacttccattttctatgtttggtaataattaaggatactatagtctatatcctttattcctttgttggtgtaagggactatgagctgtaatatttcaaatcattttttgctttttcaaataattaagaaaattactcctctttctaagatggtattactattagacgagagtttctctccctaagaaaaccagatccagttttcccgcttgaccagatccgactttttcttcctccacggcattcgcacgcgcagcggtcttcctccggtcacctctccatcatctggttctcttgccggcgattgtccacaatccattcaatgtcgtcgcttctaccgtacgtggtctccaacaaaatctgctttcaatgagaccaacaaactcttataaaatataccataaagtattattatcatacatgatgaggtaaattttatataacacattttcttatttatataacacattttcttatttatacagatatgctattgtataattaacaataatatatttttggtcttattttaataaatagataattaacttattttttgttattcatagtgttaaatatactttataataataatatatagactaattaggatttttgcccctcaactttgacatgtaccaaatcatgttcctgaacttttaaggtcattgaaaatgcccctgaactattgagattgttagatttaaggacttttgtctaattttattcaactttactatttcaatgattgtttatgtactaaaccatgttcaccagactttgatatctacttttctaattttagtaaaaaagtctaacatgaataaaagttcaggggcataatttagtgcatgtcaaagttcaggggtcaaaaatcctaattagcctaatatacatatatatatatatatttgcattatataaaatagtttgcatttagaatgtgtttattatttagtactgttattaaaaatttgcttatataattataatgcccaaaatttttgttaaaataaattcataacacatttataaaatccaacagtcaacttaattttcaaacaacaaaatagtgataaaacatttaaacttataattagcaatccaactaatagtctcaaagtaccctctgcctaactacatcaaaatattcatcaaagtggtcaatagcatttggtctactaaaatgtgaaatgaagtcatcatattcccctattagcaaagcataagtccacttcagttcatcttgtacacctgttgttaaggagcttctcttatattctctttactactccctttgtaactaagggtgttcattagatcacatctaatggatttagacccaaccgattcaatccaattatttattagatattaaattttgtcatccgatccaatctaatcgaatggagtcatccgatccgatccaatgaatgcattggattggatcggttccaaccatattggatgcattgactggttttctattagattagatttgatctatccaatctattttaattaccatttaagttgatttcattaaacaatatagagaaatttagataataaacattagtttagtccaatctaattctcatgatctcataataaaaccaccaaaaaataaaatttattaaatacgcattgataattttaggaagatgagaattaatatattagatataagtttttttaattaatataatgtgttaaatgtatattaagtcaatttatatatatttttaaataaaatatattaaatgtataaaattataaatgtattttaaaatatgtaaatataattgaatgaccattggatgataattggatcggtttggtcggttatccattggatcggatgt

SEQ ID NO: 239335 - DNA, 2096 bp, Cannabis indica
cgagtttagaaataactcttaacaaaaagaaaactactcagaacaagatattataatgataatcataataaatagtaagagtttaatgagaagaaaagaactatgatgaagaacactttgaagctgcgatttttgtctcttccttgctctctctaagtttctatctcaatttggtagctctagggttctgaaattcgcagcctaaaatgtcctctttatagtgcttgaaaagatagatgaatcctcttaaaattaggatttttttaaaaaaatgataagtacgacgctactaattagtattttgcccataacttcttcaatacaactcagaattggacgatttaagatgttttaaaaatctaagaacgagatctgaaactttcatgttgagctccaagtctagatcttcctctaaagtcataaaaatttgcaattaagtttcaccttgtaaaattgagcttaccgacttctactattttctaccaaaatatgctaacatccctccaaatgactataactgcataattagtctttaaaatatccaaagcaattaaaatcacactaattaataatttaaagattcaatttaagaatattaatacataaattgatcatatttataagagaaacatggactcatcaaaatctaaatcacaactcaactggtattccctttatactcgtcttttttcctaaaattgtattattgttttacttcctatcttttaactttcttgattctctatgtgttgcgaggaacactctatctctctttacacttccaggtttggatctctagctttgcaagtcaactgggaaagaaggttttgtacccttttaaatgttttgagatggcgacaccaagtctaacggtctgagctaatgagagtaacgacatctgccagcttagcttgttctttactttgtttctattttagtttaactgaatttgttgttgagttatttgtaagggagagaaatattcttagagtattaattgtatttaaagttgtgatttgtaaggggatttaatcgaaaatttccacctcaatcctcttacagatcacaacctaggatagtacagtttcttcctgggtctttgtccactcctgtaatggtcatcctccattactaatccctagtaagtttaacaatgtttgaacttgtttagggatacaactttagtacccacatctattggattttcttctgtagagaccttctatattagaacttcttctcatgtgaccttttctctaatgaaatggtatttaatttcctcatgtttggttccgtatttaatttccacatgtttccccttagatagcttcaattcatctagtagtccttttattcatattctttcctttattgcctctgtaactgccacatacttagatttagtagtagatataatgccactactagttgtaactgtactcttcggcttacacagctcctaccaattaggtagaaataagtcgatgtaaactttctagaatctttatctcctacataatctgcatcactatacccctccatgcatgttgcattagatgtctcagtgaagattaatctagtgtcttgattccccaataggtaactaagtacccatttcatagcactctggtgttctttcccaggattagacatgtatctacttagaacacttaaagcataggcaaggtctggcctattgcataccattagatacataactgacccaacaaattttgagtatggcacattactcatagcttctatctttgctagtgtcgtgggacactagtccttgcttagttggtattggtttttaattggttgttttgtgatcttggcttccttcatagaaaatttatttagaattttccttatgtagtctttttgtgttagggttagggtccctttatttttgtcccttttgatgttgatacccagtatcttagtttgtttccctagatccttcatttaaaaccctaatttcaatcatcccttcatcgggtttactttaaccgtttttctgctcatgatgagcatgtcttccacatagagtaacaagtagatagcttcctctatcttagtgcctttgaagtata

SEQ ID NO: 239336 - DNA, 1995 bp, Cannabis indica
aggagttacgagaattggctttgcgatacgtgtatctgtaagacttcattcactttgtaagattgacttggaatatggtggatttggttactgaggagctcctctcagctttattcctttttttttaggccgaaccacataaatttctcttgttcattctgcttgcttgttttcttttcttaaggctgaaaatgtatgtatgtatgctcacaccaatgaaaatgttcacatttaatagtctcaaagctcctaccccttgatccttctaattaaataacaattatgaattctaagcattatttcagattcagagtaccaataactaaccaaattgttagaatatcactactgaattcaaagaaaacaacttttagttcttttgtcaaaatgccgcggctaaatccgttgatcaattaaattaatctgatcttatcttgtagaaataatgtaccaataactgaatgtgataataccaagcttaggtcttacttttcacatctttagaaatttgataactaactcacaccttaagaaagtaacaacaaattaaaagggtgacttccacgtattagaaaaacttaatcgagctgccttgaaaattgaaatacttgaaaatccagatatatgtgaatatgattggcatatagctacaagcatacaatgttcatacactaaccaaaataaaataaaaaaggagtagtggtacacaaaagagttttccaagtgtgtgacttctcttaactttaattgaaaaatagaataaaactcaaatatgcgattgctatacaaacataaaaaaaccatttactaatcacaaacgcgtcaagtagccgttgggaaattgacgtggttagtatattcataacttgaagaaaagtcttaactggagaatggttctgttttaatagtattacaataattaggtgcattgtttactataaaatgcagctcttcaattgtctcaagcacacaactgatatcagttatctttggtctattctcaaagaaaaaaacgcaggctttgctctttttgatcttgttttagttttttagtatttgcaatggaagaaggagctatcttgagtgcggctccaaccatcattagaacataggctcctttggcacaattgagaaatggaaagaagatgagtgtgtgtaaacaaacacacagctcttgatattcatcatatataatgcagaaaagcaagagtacaaaaacagttagaaaggataagtcacatgtgagtgtaacaaactcacttaactactacagctgaatatattgtaactaactctaattctcttcactaataccccttataagttaatatttgttttctaaatatgattaatttatgtattattattcttaaattaattttttaaattattgattagtgtgattataatttgttaggatgttttaaagactaatcatgcatttatagtcatttggagggatgttagcacattttggtggaaaatagtggaaggggcgagcttggtttttcaaggcgaaacttaattacgaattttgatgactttgagaacagaaatagacttggagctcaacataaaagttgtagatctcgttctcggctttctgaaacatcttaaatcgtccaattccgagttgtattgaagaagttatagccaaaactaatcacgtgacataaatttttcggcaggaagtcatggccgcggcgaatatgtgatttctgggcaaaattcaaattttttttatctttttttaagtgagatattgccactacaagaaatgtcacctttgctagcgcagttcgttactgcgctggtaaaagtaacttttaccaatgcatctcgcaaattgcgctagcaaaaaagtcaaaattttaccagcgcacatttgcagcggtaaaattctaacttttaccagcgcatttacatgctgaaaaaagtcatttttgtcagcactttttattttgcgcaggcgaaaattctaataccaacgttgat

SEQ ID NO: 239337 - DNA, 1554 bp, Cannabis indica
attattattattattttggaggtgtaatgaagaatctgttatgggatgaagtggcacagaatgatagatattattacgcatcattaggaggaaaatgggatctccacctgttgattcggggttgtgtgaagtttcgaggaatcatcagacggtggagaaaatcagtgggccccacatgcaagaacagacgataaaagtcaactcaacttctgaaacaaaacctcccatgtgagtgactgaagtaggggcttcatttactgggcccccacaagcccagcccatcaaaaaacgcacaataccatctcaagttgcgcctgctggggcttgatctcctacgtcctatgtatcgtactcccactttagcacgcgtgttcacagtgaaagaaagtgctcaattgagaacataaagtttgtacaaatctatatgtaaaaaattaatatattttcattatacgaaatcacgggtaatttaagatcaaaggagacattaattaagatttgcatgtctaaagtaatatcttatgaaatgattgcaacagaccacatcaattttttttttttaatatcatgatttatggccattatgaagttgtattgtattgtatatacatgtctgtccctctcaagtattttattttattacgaagtagtttattttatttgatgaattatagtttattcaagactacataattattattctcacgacttttttctttaaaagggctcatggcttatatataatatacttttcagctcatttgtctattgttctacttttttcccttttcaattagtcagttgtcaattgttatatttacaaagttgagttatggcagaataatgtgtatttttaagaggtttgtgtacacaatatctaattggaaacaattataatagaggtgtcatttttgttcttataatatatatttaaaatttagagaatatatttttaaaattttaacatgaaaaatataaaatcacataatgtatatggttttgaaattattgcctgaaaccatcttggtcaccttattgcagtataggccagttgccatggtagaagatatacagatgaagtcattaaagccatgaggattaaagaaactctcagttggttaaagaccaataattggcaacatgtttaaattgagaccgacaatcttacttcagtacaagctattcgaagtaaccaagcaatgaagtccactttcggccttttaattaaatactgtcaacttttgttatctaccctcccaaatgttaatttatttttcattatacgatcagcaaatcaagtagcacattatgttgctagacattctcggtatcaatctgatcgtagcatttctaatatttttatttctggtgaactcatacatcttttgtattcagaatactaatttatacaatgaagttgatatttcatcaaaaaataaaaatacttttaaggtgacaatatttaactttttatgtatttttaattactaaaatatctcttacactatcacgtacacacacaatcactatcatttactgtgtataccacctatt

SEQ ID NO: 239338 - DNA, 1769 bp, Cannabis indica
tttatttatttatttaaaacagtgggctatataggaattctattgtcagagtagtgtgatggatgggaatcttgtagtatgagtctatgagattgttcaatgttgatccacgaatgttctcgagaagataaccttctttcattatttattgttcaaatattttagtagatgtagattcaaaataaaagtctaattagtggcaagtgatatggatggatgagttctactgtcctgtgtttatttaattaagaatttcttttttcaattttgatatgtactaaatcatgtctttaatttattaaagtcgttaaaaatattcctagaactattggaattatttaaggatttttgtccaattttagtaaaaaagtctaatatgaatgaaagttcaaggagcatgatttagaacatttgaaagtttgagggcatgtttggtatatatcaaagtctaaggagcatagtttagtacataaataatcactaaaatagtaaaattgaatgaaattagacaaaaatccttaaatctaacaatctcagtagttaaagggtatttttaatgaccttaaaaattcaaagaacataatttagtacatgtcaaagttcagagaacaaaaatcataattagtcatttaaataattactatatattgtattattaaaggatactaatattggacattactgatatctaatactttttataagtggcttattacgattagttaatatttcataaaaattattttcttaagttatataacactcgatatttaatcacattaataacggtataacacaaaaaataatgttagaaactaataacattttttaacatttttcattattaataatatgatttgaagaggttagaatgtgagtatctatatgtcccaagagagagtaacaaagtagggtaaggagagtttgatatgttgattgttgagtgagtagaggaaactcccacgtgagattgcttcccattttacccactttatacattcataattcattgcaaacatgcaacctcccactctctcactctatgggaaaagtcaaattcaaattttaaaacaaagtgataatgctttaaaatagatttttttttttaaatatttaaaacataataaattaaaaatacggtacattatattttaaactcttctattttaattttttaaataaaatttactatttatgctctacatttatagaacactattcattcctctaaacatattttactaattgttcgaaattttaatttttctttttatatggggatatgtgaaaatattaatataatatatttgaatgaatagaatattaaattaaaaaaaaaagtagaattttagtaaatttcaaagaaattgatgcatggtgtgatataaaatttgaggtaaaatagagaaagtaattttaaagcatctccaatggagatgtaaataaacggtgaaaagctatatagctcatttaacaaaaagtgtgctttaatggtgtgccaaaaagtgatgtaaatttgacacatagaaaattttgtgccaaatttggcataatatttgctatgatgtaaaatttacattacaataaacgcattactttttcatttacattcatgttatttttattattttattagtcttaaaagtaataaaaatttaattttaaagtttatttaaaagctgtatatttttatggaataattacataagacactattttttgtaaaatatttacatttttacgttcaaagaatgtttttttttacattt

SEQ ID NO: 239339 - DNA, 2453 bp, Cannabis indica
cttacattctccccactgatctcagttgctgctgcaactgctgctgcaacagcttcacctcttcctagccctggatctcatagaggccgaggacgtcctcccaaggccaagcctgatcccaatgccctgcctgccgtgcagcctaatacacaacctattacccagcccgctgttcaattcaatggccacactgaccagccggctgctcagtccagttctcagccagtgctggttgctcttgggctcgttgacgatcccaatccttcgtcagtcaagaaaaggcctggacgtccaaaaaagggcatttcagctggggttgtagcacaaggtagtcctgtaggacaaggtactcctggatccctgaaaaggggacggggtcgtccaccaggttctaaaggtaaaatgtctgggcctagattgtctaagaagagcccagggcgtcctccaaagcctaaatctgtttcggcagtccaaggaccaaagagggggcctggacgtccatcaaaagcagagcctaagacgatgatcattccatatgctagtaatgagcctattgttaatgaagttgatcataacaatactcctactgtattatctgtacctcctagatccagggggcgaccaaagaggtttgcggatgctgctggtggccctgctagttttagaagcttgtcaggtaggcgtcgtggccgaccatctaaggttgctggcatcagtaaattgaacaattcttctggcaggcctgtgggccggccaaaaaaggtatgtgtatcaaattatttgaatccttaaaagcaaattttttggttattttttccccttgtatgaggctcttcaccatgtcttcacattcttccttgtagactggttatccagattgatactcaagtcaattttgtttgcactagatatagtaatggatttaaaagtcaagtatatttagagagattaaaattattgttcaagctaaatttgctcatagaatttctttagtgcctaattttagaaagtagtatttttttcttttccctctctctgaatatgttgtgtaaatcgataaatttgtaaaacataaattggattaaaatcagtatgctgtctaaagccgtgatgatggttttttcttttcttttttccattttgaaactgaccatgtgtttggttataagattaaattttaatagtattctatttcatttttataaaaggtgtatactatacagttgtaaaatatattaagatgaagttctgccttgagaactaaagaatttacgagttaaggtgtataatatacagctgtaaatatattagttgatgcattaatgatgaaataatactgaatgttttatatcaatgtacattcattttgatctgaacttaccctcacttgtctgtgtttgtccatgatattggggtaaagagcacaattgtggcaactgaattgctggtggctgcaaatgcggatctgaagcgaaaatttgaatttgttgtaagttgagcaattgtttgggcatttttcttagccccttttattaatgcaatgccataaggtggtgattgtgttgtaatatcatggtgtttttgcagcaaacaaaaatcaagcaaactgttggcatgctaaagcctaacttatctcatgaaagtcctgctactttaattgcggcagtacaagaactagaagagctcgctgtgctagatgtcaatgctcccttaagagaagaagttcaacagcctctgtgagaaacctaagattctcgttgtgaagatcgaaagaacatttgcaggcgcaccaaagtgaaggaatctgtaaagcaaataggagggtagcaaaactaaccgtctctttcggtgatgacttttgcacattatgtctgttgtctgtacaattagaatttgttattagtgacttgctttctctttctctatctgtctcttttcatctttgattgttatttttatctagttttagaacgtatttgataagatgtctgaactacatgatcacaagctaataatgtcatgtttgtgaaatgttgttaagcttggctaaaatctctgctcttgcgttttatggcaagaggttaaattatgggtttgcagtcatgctcttttttattatttattattattattattattttaatttttgatgggatgggaggcatacttttatatgaatgatgattgatgatgcattgtccaggagtaaaagattgatacttgattttgttttaactcacttaattgacttatccaataaatcaattcatatggattaggttttgtgtgtgctttactgcttttgtaactctaaggtcctttgttgcattggactaatgtttgggattggattaggttgtccaattctatgtttgcttctattttgggaatggaataattttgtccacactccccacaattgttccttggattaaaatagtgtattttttttt

SEQ ID NO: 239340 - DNA, 2124 bp, Cannabis indica
aaaaaaaaaaaaaaactcaagcagagaagaaaccatcagaagcagcaagaccaatctgggttttgggttccaacaaagtcttcaaaaactccaccttctgctgtccaatcttctccacgacagattgagccaccattgaaacacatgagaccatgctaatttcttggtttccttccttcctcgaatgactcactcttctctcgaattcctctgctacaagaatagcaatgtctgtcatcttcttcttcaatatatatataagtaaatgtgttttttttatctgttgtgtcacacttatttttcttacacttgatgaaaaacaatgttaatttggtaggaatatatatagcattgcttggagtggtgaaggagttaaaacagagtttggataaggcttacagatgggctttttttaattattatttattcaaagtactttattttttaattattggaggtggtattggttggtggtttttcatacgtggggcttagttagatccagttttctctgtggacttgtacccttggaatctgtcctagacatatgatacccaccatatttattttcatagaaactaacccaaacacaaccatatattttacttgagttgaagggaaaatgcgccatctgtcccgttattattattttttgaaagattcatctgtcccattgttattataatgaaaatgaaaactatttcatacaagtattttttttggataattggtaggattagatgtttctcggcaaatggtaggaaaatgaaataatttaattaaaaaatgcaacgcagttttcaaattattgttcaaaaatatttaataatgtgagaaaactttacgtaaggatcaagcaatagtagtttcttttcttgatcttaggccctagggtataaatcaaaaaagttagtgataagagatctattagctagatacggagttagtatacgattattattgtttatgaaatttattattataaaagtttaaccaattaacttaaaggtaaatgttaatcatggaatgtatgttttatgttttagtgtaaaatactacacccttctagaatgtttcttcttcttttcctatatatcactcaaagtttttataatgtttttcatggcatttgaaataattatatggtacaaacaccatgtcaaatgataataaaactttaatttacaacattgaaaaacatgctgatccaaagtgagatatttgcatgattaaagaaaaaacaaattgaaagggatcctatttttatttcaataatatgaactatgtggttgcatattttattcaaaatccaaatcaaagttgtggttgtggggttatataatttatggggaacttataaagaaactgtaaaatagaagaaagtttacaaaaatattagaatatggagttttttttttacatttttattatactaactttacaaaaatgttgtattttagtaaaataaaaataaaataaaaaaaaaataaaaaataaaaaaccccaaaaaaacaatcttagaacaacttaacaaacaactataaaacaacaaaaatataactgcaaagcaatagaaaaaataattaacataattgcaataagcaaaattatataaactcgtcgatatgtttttatattacgattttttttacttagttttgacagcttaatttatctttttatgctattacattagccttttcatggaaattattgtggcaactttattctttcaacttattttttttttctttccttttatagttattaatagttaaaaaataagtataaacacagataaacaacataaaaataaccaaacaaatgtatatatacaataaaagattgtcttggataaactgaaaatatacataatcttagaaataatttcatgaggatacgcacttttcattttattttcggaaatgtccttatttatattaatataaataataccgtcagttttttaattaatttgttacgcacgcataccgaaacaaacaactttacttttaaagtaagttaaaattatttttactggaaaaacacaaaacatttttttttgttctagactttttgtattttttacctttttctttttaattttttttgtttcagtatttt

SEQ ID NO: 239341 - DNA, 1821 bp, Cannabis indica
gtggaattgtacatgtcaaacagactcaccctttaagtaaagtttaggcaaagctcttatattattccttaaacgggtaaggtaggaggcatgcgaccttcatcacagaacttagaaacaccacacttgaaaaaatatgatcaaatctcccacaaaagtaacaatagttttgcaaaccctcatatttaaaattgagccatttagttgtccctagcttcctaaaaagacttgcctgcctctacgaataagtttcataatatctagaaggacacgaatacgaagaaagggccctgaaatttccaaaagggtggttttatgaatctcaatcagatcaccaatatcattggcaacaaactgggctaggtgagatgacctaaaaccaaagggaatagaatggacaacacaagagaaaataaccaaaggaagaatatgatattgcattaaagacgttagttatatatatatagacataagtagtatacctctgaagagagatcctctgcagatagtggagagatgccaaatctatctccacataaatgttttcctagcgtgacccctcgagaaaagggatagaattaaaatacatttcaccaaatttttcttaatacatttcaagagagtgcatattggtgtctaacatatttaattaagtgtcatacatacttattcacaaagttattaccaacatcaatatttgagaagacgacatacaagatcgaaatttatcgattagaaaatctccacgaatgcctaaatgagggagagttatttttcactgcactctttttcccttgactaagtatttgacccaccaagttttctgacaaggtttttgagaacctataatggacatccaatacagagtgttataaaattatatatggatgaccataattatggaaaatcaattagttacccaaagacgattatcatcataaatacttaactgtattttaattgacttagtttttcattcttttatctatatttttgtataaatagcggttcaccccattagaataaattactgagaaaaatatcattcattctctcactgtcttcttctctttgtcttctctcttcacttattttctctattctatattattttataacaaatgtaaaacttaatgataaaatttttattattttataattttaataaaaatattaattaaacattatattttgcatcaagtttcgtaatagtgtatttgatcacaatactaaaaattgatataaatatattataaagttatttttttgtaccaagtataacataatttttacatatttcattagagatggtgttattatattgatgcttgacattcttttttcatggatttttttttctagtgagctgtaagagattatatatataaaattttaaattattattattattgagagaaaatcattactttaattatatccattattgaatatgtatacatgaataaaagtaaataaataataaactagatagagataaaattcatttaaaacataaaataaaaatgatagagattaaatcaatgagtatatatttagatggaaagcttttatagaaagggattatgtcaaaatatatatagttatgattaatctacgatgatgtttcgaaataaattttactgttactcatattacaaatatatgtttattagggttgtgctatagatttttcttatttattatttttttttagttttgttcttaccagtggtgaacccaaaatttaaagtgagggggcgtaatttttttttttttgtcaaggcagggggcaaaaaaaatattaaaaagaaaaaaaacaac

SEQ ID NO: 239342 - DNA, 2220 bp, Cannabis indica
gtaaggtttcttgaactttatacgtgtttgaattctattgttttagaaattcatatttaggatgttaaacaacatacatggtagtaaatttagatactggtaaaataatccccaacactgtgaacatttattgagcacaaggaagaggcgtcttccacgaggggtgaacggttcctgtcacccaccgaagaggtacctgaaggttgggtgaatgggaggttaagaagatttatcgactcccaaagattaacttccatcattgcatgcttcgtgaaaagtgttcaataaatgaagggtctgctcaatcggctcgccgctgttttggcacctccccaaatacgcgctctggacacgcacgaattgcaagagtcgacatttaaagtcatgttagtaagcagaagaagtgataccttttacgaagtgacacttcgattggcagctatttgcatgacataataagtagctcggatttatcccacgtgtctggaacaaattatgaggaagcactgcaagctcccggatcatgttacgtcgtgaaagcttggggggtacatgttgtccatatttttgtaagtttgacacgtggatcctagtcaggttaggataagtgatgattagctggtcaactctcttgaccattgtccagtaagataagggccctagctcgcgaaaagggcctctgtgacgggactccctcgtaaggcaatgatgtaggacaattaaaagtctctcctagtcccgagaattgagaccaactactcccgcgagactgaagttgaatgcttctgcaaaatggtatgaatttctcaccaagtgcccgaagttgccttggaaaaacatctagctgagctataacctcgtttcgcggaggctctgctcgtacatgtcaaactacgaacttggtagccaggcttcttcaggtacgacgtctgagtgtctcccacgctatgtcatggtacatagcatgaacgcccagtcgtacctatctgaatgatccaacggtcattgataaggggaattcaaaaaggaagaccctgagacagcacgtgtataatgtccagtcaataccatttgacaccctgaaaagtcacgtaattttgttggcatatacctgattttataattacttaataataatctattaaaataatattataataaaaagtttatacactaaattcaaggaaaaaaactaattgagaaaaaaatttcaataaaatattggtcaatgaaaataaaagttatgaccatataaagtaaatctagaaagttaagaaagaaaaaataaaataacttagaaaaaagtttcataatacttaataatggttcatgaaaataatagtcaagagaatataaattaaactaatatagaaacttacaagatgctagatgaaaggtatactaaaaagattggaaggagccttgtgtggagggggttggaaagtttgtgtcatttcttgcgtaatgatgttcctacccgagaggcattctgacctcaagtgacacgttcgcttattatggtcccaacctccgcaaagtgtgcatcataggctgccttgtatgccatcatttggttttcttctagaattgtttgggatgcccatgcctttggtcctcaccctaattggatcgtgtacaatatttagattatcatgatgtgttctagttattttttgggtacctatttcagtactttgtctctggtcgtaagtccggaacattttttaggttgaaaatataaccttattgcttcttgcaatcacaaataagcatctcatttgatgatcagagtctatcgttagtgatttgaccactttgacactagcagttgtagtgagtactgcaccgctagcattacgtctacgttcaaaagatgtcagacatcattctggaacattttgaggttgaaaaacaaccttatgtttcatgcaatcacaaataaacatctcgtttgatgattggagtctatccttagtaatttgaccactagcactcgtagtgagtactacgctgctagcattacgtctaggttcgaaagatgtcggacatcattccaaaacatttttaaggttgaaaaaacaaccttattgcttcatgcaatcacaaataagcatctcgtttaatgatcagagtctattgttagtgatttgaccactttgaccactagcactcgtagtgagtactacgctactaacattacgtctaggttcgaaagtatgt

SEQ ID NO: 239343 - DNA, 1927 bp, Cannabis indica
cgggcatattaggggaggagctccgccgctaatgtgcccgccgctattagggggaattcttgtagtgatttcggattcaccttactattcgatacaaagaattagaagtcatcctccaagaaagccaatcttttattttcctttagcagtcaaacgagaaggggtaatttgggtgttttgattatattatattttgtaaatttttattaattgttaaatttaagagatcaatattattttcaaattaatgtttaataatcagtatattttaattttataaactctattttacttaggcaaaatatatatgtataaactctattctcacaaggatgctttcatgctctctcgttttgagaagagccttctgttcaatatgctgaaaaagcctgtagaaaccatggatgatcttcttgccaaagcttcaaactttactgtcttggatgaagatggatgggaaagtaatgccgctgggagctctgtagtcggcgaacattgtgcgaaggctaggatctgctcaaaccgtccgatgagccgtcctctgctgaagacaattctaggtcgtgtttggggcattgctgataacaattggggagtggaaatcaaattcaacaacaaccattctagtttcttggtcttttctttcaaatcggctgaagacttgaaccgtattttaaataaaagtccttggttccttaattatggaactctaattcttgaaagaatggtgaatctgccctgcgattgggaacaagaactgctccgatttccaattattgggagagttctccacctaccctcctgctcgattacaaaaggcaacttggtcagattagcaactatggctggtgaagttatagaggtccaatcccccgacatcccgaaatcgcaactaaaggttatttcaaattcaaagtttggtgtgatataacgaaacctctgtttacagggctcttatttcctacagaaggcagaaagatatggcttcccttcaggtatgatcgcctcccctttatgtgctttaattgtggttttttggggcatatactcgggtttgtgcagagacgcccaagatgtttaacgatggccttggaaactggaaaccgagttatggaccatggttaaaggttgatgacaaacgtgatactaaaactcagaagaatgctgctatggatccccctataaagaccacatgtggtactggttcttttgttcaagagtcccccatacctacggtcttgtctcaagatcaaggtcagggaggttatcccattcactcttcgacttcaaagcatatgttagaactcagttcgggtttggcttgtactgatacaaataagactgctttgttcgagaaggaagtggaaggaatgaaggcaaaaatacagggtcatagtgagactatgaatgtcaacagtaagagaatgggcttatggggtgaagacagttcaaatcatcaaagagctacagctatggacatggaggttggactcaattctggtctgggaaaggaaagcacagaggcttatatgcataatcttaatttgatagatgtccctataacttatgcagataaattgggtaatgacactaaggtagaaggacctttaaaacgaaggaaggtgaccccaaaaagaatcaagaacaaaggaaaggagggcatgatcgagaaaaagttaaaggaggtggctaaagaagatgggggtaattcatcaaggggaatttctagttttgtggatttgaaccttgacactacaatggaaacggcaaacctagatgttctaggtcgccgagcgccatgattgccatgttttggaatgtccaaggccttgggaatccttggacattaaattccctaaagtcccatgtcaaagattatcatctcgggatgatttttctttcggaaactcgtttgaatagctgtggt

SEQ ID NO: 239344 - DNA, 1415 bp, Cannabis indica
attgatggtgatagctaggctttatgtcttttttcttaaatttatatattatataattatataaaaaatgaggtaataatggtggttactttcaaaacccacctgatctagaatcagtgaaatgaccatttatatgcagagagagagagagagagagagtactgttcaacaaaagatgactatgacccactatgcaattggccagttttattttgttttttttgctccttcttcctttttttttttatcaataaagcttttaattttttttaagtttaagttggagtgatctgctaggctacttttaaattcatgtcgtttttggttgatccactttttcgttcaatccatttatgtcattgttgtaaataactatatatgcatttttgtgtcactaaatagtttccattttggctttatatattttaaaagtatatttatattggtgttgttgtaaattatgcatgcgtaatttttctttatgatcatattattatatattaggttaaaatcgtaataaataatggagatggatctagagggatgagatgaggcaattctttttgtaattaattactttattttattttataattcataatattatcatagctctttcctttttcttttcggatttttcccttagccacacacaatatcatttttattttttattattattaatctttggcaaaataacctttatatatatatatatatatatatttatatatatacaaatcccgtaatctcagcacacatatcatataaattataaaaatggttgaattattaaaattgggaaaaagagttaataaataggatctccctagttcccactctaagctattgggttttcggttaataaatatatatttctagtttattaaaaaaattatttgtacctcaaataagtacatttattatttaaaaaaataaatttaaatcatttttaaaaattactttgaatattttttttttcttatattgttttatgttaattttaatatttattttaattttatttacatatattttgcctaaattatgtatatatatatatatattttttttcttagaaaatattatataatttttattttatttttgttataatatttaaaatataatttatttttatttggtaggtatattctttaaaaatataaatagaatataaattagaagaaaaaagttaaaaaagtttaatacaattaaagatataaatttgggaaattactccatatttattatttttttaattttttttaaatttacggttggtgtttttaaagtggttgcagcgctagttgcaaaatgggtttctatacgatttgttgttataaattaggttgcaacactagttgcaatatgtattttttatgtagaattctgtaaaaaatgcaaaaaaaaaa

SEQ ID NO: 239345 - DNA, 1397 bp, Cannabis indica
aatataaaattattttataaaaaatctagaaattaaactagaaaaagattatgtttagttaaacaaatttagattttcggaggaaaaaaatagactcaatttgttcttgtaaaatttaatttttacaaaaataaaattttaatatatttttttatatctaaatgaattttttcataataaataaaaaaatttaaattacttaattagtttaaaaattttaatttctttattaattttcttaattattgaaattattttttttaagatctaaattaattttttaagatttattaagagaaataatattaaatctttttcaattttattcttagaatatatgatttgatagttgtcaaataagtttaggggataaaatatctaattaacaaaaatacgtcatcacttaagtaaaataatatgacggaagctaacacaatgactaaatatgtaacagttcacaagattcttaacaaattgtatattttagagtataaaatctgtattattaaaaatttaaaggacaaaattactaattattcaaaaataaaacataaaaatcatttataaatcatagaaatagaacttgtgcaataatttagcttagctacaatacataaactcataaaaccatatgtctaatatctgacaacttgacaagttcaatcaaaatatttgcaggcaactaaactgtgcttcttttataaagagcacataatgctcgttaaaagttaccctcttcaattcctatatattacggcatgatcctttttcttctttttattcgtaaaatctggattgttcctttaatacagtatttacaagttacaacgatccaaattgatcgttttgcgttatcaaaaaaaaaatatattgatcgttttgatcttatcatgataaaaaaaaaagaggataagagagtactatattatacgcttgttataccataaaaaatctgtcagtcagtctttcttgtaatatatataggccatcgatttaattactcaccactttttttattttttttttcgagactggtcagtcactaaataaaattcatttatttactacatttaaactttcaggaattaacttatatgtatgtagaacaatatattcacagaaggagtaataatttatatccaaagtaaatattatatactcacgtactaatattttatagttaagttagacatcgtcttattatatactatcactgcaataaaatttatcaataaccgcaatattattagcgatgggcaaaattcgcccctaatagcagtagcatcagtggcggaaccaaaattcgccataattctacttattatttttttttttttaaaaaaaaaaaactattagcagtagactccgccgctaatagtattagcggcgagccccac

SEQ ID NO: 239346 - DNA, 2443 bp, Cannabis indica
tctctctctctctctccatttttcaatctctcagcctaatctaaacccaaaggagcaagagcaatttagaccaagttcttcagtttttgacaaagatttcagctagactttgaggtggatttgttagctaagatcaaggtaaaaccctagacttttatcttgttattagttttggaagagaaagtttgatatttgtgtgattttttaggtattcaattccgtaagggtttaggtaagctagaaactgttttaaagtttgtattttgattgtttaaatttgtttttgaaggattgtagcatttttggcttggattgagtaagcttgaggtttagagctcaaagtttgcttaacaatggtgaattttatttcagggatttattgttgcgttaagctttgaattatttttaaaatatgtttatagggtgttttggaaagtttgagcaagtttggggtagaattgatattgagaagattgagtttggaaactctgtagaaaaatggttaaccgcccggcagactcctagtaaacagttaaccgtttagagtgattttttgggtaccctagttttcctgttttcttgatatttagggtatttctacgttatttattgatagatatgtacatgtttaccgtgcgtggtttatgtttgtcaatcagataacatatccgtaagagcagttttggtgtacatagagttgtacctagatatcaacgggacatatgtttggcaatttatgaagtacaaactaatgctaccaatactagtacacctagagtactaagtggatgtggtttatggttagttgtgcttttagagagtacgaactagtgctacaaacactagtacacctagagtactcagtgcatgtggtattattactagttatacttatagtatggattaatgttatcacacgatcagtatgactagactgttgagtataggttgatattatggtcaatcatactatagtcaagaacattcgagagtcagttatatgcattggacgcggggttataaagtcacgatcatttggtgtatggacgcttaattataggtcgattatatgtttatatttcatgctattcttactgagtctgtcaactcatagatatatttttatgtgtaggtaaaggccagggttgaacagcggtgagtttggagctcagtgaagattgtacatatctagatgattaaacctagagtgttcagatcttgaggacaacatgggcttagttttgatcgttaggcggtacttttgtcatatcacattatgttcatgattgaaaaatagattttaggatcccaaattttgtaaataattcatatttacgatgtatatttattaaagcattttattattataaagttttaattaaatatgattttatattaaaccttttagtcaggaaatgttagtacaataattaaaaaatacaataacgtacttaaactagtagaatgttataatattaacataaaataccaaataaaaccaaaaaagaaactaaagttatatatctactagcctaaatctagccaacagagtaagacccaacaggtgcaaagccccattattatacataaaattaagggattatttcgtaaatatacaaaaataataaaaaattataaaaaaataataaaaaaattataaaattacggattcatgggattttaaaattttttatgatttttttatttactgaaaatatgatatttttcatattgtactcttgctaattaagttgttgattttttcttacctgtatgttattttttgttgttattttgatgttatatttttcatgttacttttatgtgttgttttcgtgtaaaatgtaattttttacaaaaacaaatatgttttatatgtaattatctctaaaatcaaaaagaaaaaaaaaaaaaaacaataatttaaactaaaacaataccatataaaggtgttgaaagacaagcaagcacatagccaaatgaattgcgaataattgcatctattctaattgtttgagttgatttatctaaagaagcattcatatttagtttattaattctctcccaacataggaggaacccactcctaaatagtttgacaactagttgaggcacttggaatgttcttttctgaaatgaaaagtaatcttcaacaaaaaaaaaagtcctccaataaaatggataacaactcctgagaagcattacccctaccctagtaataagacaatcgcacgtgaaacaagaattcttaacattacataaagaagaaaataaatgtttgattacttatagtattgtaaattgtatatcatacagtatcctggtaatttaattatgtcaaaaaaaaactaagtttctttgccccatacaaattattatatgtataattacagatattatacatagagatatatgtactctcaatcattttccccatatcatt

SEQ ID NO: 239347 - DNA, 1650 bp, Cannabis indica
tattattattattattattattattattatgcaattactcacaaaagttgtttaagagtaaatcagtgttttaagaaacaaaagttataagttaaggatgatgatggtttcttaataataataataataataataataataataataataataataataataataagttgttgtatatattaatttttctactaattttgtatcttgcattatttaattatgacatgattttagaggagactaactcttaattagtttattatagttgcttttttgattgtttttatataataattcaaggttcattataagctgagtcttttcattataaacatggtcaactttagatgattacaaaataaattatttacataatttttcatacaaaattaggaaatattttttttcaaaaaggaaaataaaaatattatcttttaaatcaacaattttttaaaaaaaaaatcaatttaaaattatacattgcttccaattttaataataataaaaataaacatgatttaaatggtaacaatgtacaattttgatggaaattgaaagtatgtaatatgtatctataagtttttttttatataagatatatattataaaaattaatgtaaagaaataaatcaaacaatattataatacattgttcaatttttgtctatagggatgctttatttttagtatttacaaaaataataacagacactttacatattttggaatttagaataattaacagtgtcataaataaatttaaaacatttagttgcactcatgcacaatattttagtgttataaattattagaatttttttaaaaataaatgaaatatttcctgtaactataatataataaatcgtcatataaaaataaattaaattacaatatctcttatacaatcatgaccattcatttcatgattgatgattatgataaatagtataatttattgagtaatttatgagtaaatacttaaatttaaatttcgattgtagataaatatataagtttaatctttgacgataataatacttaagttatatttttaaaattttggtagatacctagccattaagtgtcaaatcattatccacgtgtcattttatcattggtatatttatattaattttaaataaaaataaaatttaatgacatagatcaatcagggactgtcatgtagctattgacttgacacttaacgatcatgtacatacagaagttctagaaatataacttaggtattattaccgttaaaaattaaatttagatatttatttacaattgaccaagagttaaacttaagtatatttataccgcaaattactagctataatttaaatgaatagtgtttaaagtaagcatagtaaaaaacaagtaatgttaggctagaaattgcatgttaaaaaccaaaaagtagttcccaaattcagatgaattctaaatattttgattataagtatatatgtatgtgtagaagaatgatgattaaattaaagtgatgagattggttaattgaatttatttgcttttgatgtcatttttcaacatgatactcagatccagccaagtacctaacacaatttgccacaaaacctataattaaattcattagttaattttgaatttatatttttttggtaattc

SEQ ID NO: 239348 - DNA, 963 bp, Cannabis indica
ttaaaaaaaataaataataatttcttaaaatcttttaaatgtaagacaagataacaattcttgtgaatattattgttgatggcatatactgatgttataatgctttgacaaaaataaataagcaaagacaaaacaatatactgatatagttgttgttgttttatttttgggaaaaattattactaattgatttttttttttctaattcgaaacaaaaagaaaaatgaaaatgaatttatttaagataactctcattacaatagaatatatacaaacaaaatataatatgtttatgtttgcaatttttttactgaaacaaaaaagagtctaaggcatcaaatgcttattcttttccaatctctctatcctcagttagtgactataccaccttttaccacgccacacatcttgatggtcgacgccttactcgttgcttatcgctttggtggcgttatgataaatttcgtggttcaattccttagtttattgttgctctcttatcgacaatttactatgttcgtcggacaacaaacccctaacctaagccgaagtatcattccctctctagccatcgggggttctatttttgtttacttcaagattattttttgaaccttgttttgtaacgctctaatacctaaggcacatatgtattttttaatcatcgtgctaacttttgctaaccaaagggttttacaataaagcgtgatttactcgacattttgtaatagttaaaactttcttaaaaacaattgtacttaaaagtttacaattgagatcctgtttctaataaaaaatacatatgcatactgtaatattttgagaatgtcatctaacaaaaaaaaatctagttacgctagctgatctctcatagatctcaacccttcgggtctagtcgttcagatatgtacaatcttcattgtagctctcaaaccactgccgatcagttttctttcacataac

SEQ ID NO: 239349 - DNA, 1379 bp, Cannabis indica
aggcttcttgaactcaacaatttcttaagttgtgcttttcaacagtctatctagaattacctctctatgtggaaacttctaaactccaattcatatgaatggtgaaaataatctctagtatttttcttcttcatttttctagataaataaattatcccgtaagaatgtgaaggaaaacacaaatcgatcgtcttttcatgctctcttcttggtagaacagatgctacttcccctatccaaaaagttcattttctcaatcatgatgatcccatgacaagtttgaaatgccatgaaatattgatgatttgtatgtttgcatgtttgtacatactcattgccatgaaatattgatgactataaactatatatttacttaccttttttgcttcctggacttgattataggtgtttagattattgcgatacgattctcgtttcaatgttggttttggcagcaatacctgttgtaagttctactccctgattttgcctcaaatgtcatggaaaaaaaaaatcttggagtacaattttagttggggatgaagaaagatagttcagttttaattgtttctttgttcacttggtacttcggttagaaaaaacttgttatagtaatattcaaattttggaaattagaaagtctgcttctttgtaattcattgcaattcttgttagctaaactttgttttatagtcttttcactatatttgtagttgtaacacatcattagcaccaccaatcacacatggaaaatttgttagtcactagaaatacttaggatgtttgtgtaattagaaataatcacagcagccatatcatctccaccaataacacaatgagcacaagaataagagcccagtgggcaacctttaataagaacaacaatcacataacaatgatcaaagatctatgcatgaaccacattagcacaatctgattcttcttacttgtcacctttgcaatttcaacactgacttggcttggtttactaacttgaaccgcctctagacatgaaccagactaatctcgagcaaccatttttaaatgtagtctcgtcaacaaagtttgtacaaacgaaattggaagaaaattacagttttacaaacattgggtacttatgccgctacaaataaatattgagtttatgccgcttacaatttacaaacataaaattttaggtacttatgccactatttaccctaaattttataattatatatttctctcaaaaattagttatgataaagtaatttttttgtaagaaaataaaaaataaataaacaatgctacatgatcagtcctcattttagataatgatgttcctaaagtttgttcgaaatgttaatcaaaatgcacatgtgttaaagactactttatgg

SEQ ID NO: 239350 - DNA, 2347 bp, Cannabis indica
ttttaatcttaattttttttatatgattagtatgttacacacatacttcttttattttatacactgcttaagcccactttttagagtgcagagtgcccattatgttttgtttctttcatgttaatggttgacttttctggacagatttattctcttgtcggcagctcttttttttcctcttgcatatgatattttaaagagtgattattacatatctgatattaaatattttaacaaagctcatcacttgacacaaactcattctatatatatatatatatgtataaaatgaaccatccatgtccaattatataattagataacatgtcttattcttccttaatataaaactcagaacaaaattaggtactactataatgttgttcagtctattaatatataattacattacactactaataaaagtgcacacatatgaggaagttggattattgcattattaataagaagtaaaacaaaaaacaacctgaagagcttcaagtgagctttttaactcacaatgttatttcaatgatgattcccatgttaatgaactgctcaaagcttcagaaagaagcttcacaacttcctctatttgcggtcgatttcccgggtttttcttaatgcaaaggtcaataatttgaaccacaaaatgaacaagttcagaagggtacttctcttgcattgaaggatccataaactgtttcaaactctcttttccatcattgttaagcacaccattgtaaacatatgataagtccctattctccttgtacagaaaagatacctcttttcctgtaagcatttcaagtaataaaactccaaatgcatagacatcaagttttgtagaaaccaatctattttccaagtactcaggagcaagataacctattgttccaactatgtgatttgtcaaagaaaactcattctcttgagcttttgttgaccttactagaccaaagtttgcaactttagccctgaaatcactgtcaagaaggatattgctgcaatttatgtctttgtgaacatgtgaaggagttgtgaaacaatgaagatagttcaaacctgaagccacatctaaggctatttggattctctgagaccaacttagaaattttccattgttgtttccattgaaaatccaatcactcaaggctccatttatggcatactcaaaaacaagataccaatgaccctcattaaaacaaaccccagagagatgaatcagactagaatggttgatcttttgcaataaattgatctctttggatacatctccttccattttcttgattgctttgagatttccattaatctcaccgcggtaaacagaaccttcaaccaatgaactaaggctaaaatagtttgttgccagttgaagctcttcaaaactgtaaactttgattgactgagctatatcagataagctctccaagaactcctgtgaaattttcactgagttctcctgatgatcaagtgttgtagtagagcttgctgctgggacagaacccgagtcgggtttcttctttcttctccagaagactaagcagtagagtaaagcacctaaaactaagacaaaacaaccacctccaagagcaccaaaaagggcataaagccatttttcatttgagctcgaattagagaaagaattggtggcggtagtggatgttcgaggagggggtaatggcggcggtggaggccttattatggttgaagaattggttggtggggtttgaagaggaaccaaaagagtggtatctggataaatagtattgtcattttcagtaagttgattagctttaagaagcaaaccattatctacatcaaaatcttcactaatggttgaatcattatcatcataatcaactaagtaactcattagataattcacaccatcatcaacttggctctttgtgggacaagcacatctaagaggaacagtaattttctcatcagtttcaagctcaaattgattaggattacctttttgattctcaagagcttgacaagttgtgatgccttggaaggtgttgttggcaatgactagatatgtatcatctggtttgatgacataagaggtgtttgattggtagtagccgccataacaggaacaggttactggaattatgaccaatttgtttgtatcaaaggttgtcttattggagtttattacagaaatctgagaagggtctgcagccaaaaggtttgagattgctgccaaggttgtgtaaggaggcacagctctgaaagtaatgaaagcttgacatattctgtttagaccattgcagaagtagccaagagaagaggttgaattatcctttttgtcacattcagttgtgtcttctct

SEQ ID NO: 239351 - DNA, 2558 bp, Cannabis indica
aaaaaaaaaaaaaactattttcataatataactaatcttttaagtttatcatattgcactaattaactaattattttaataggataatttaaaaaaattatgaagccaataaaaatagtcaacactctagttataaaagaaaagtgatataaatatttataaaatgataaaagtaatataaattatcaaaatttaacatgttcacattaaaataagtaaaacgatatgacatataatttcaaaaaataattaaaataatgagcaagttatattttccaatttccaaaaaaaaaaagaactatatatttcaatcctttagagtacattaaaaggcaaaaagagaaataaaaaaaaaaaaagaaagcaataaaattattcataatataagccatcactcaatgataatatggagaaaaatatgatataacaagacaaaaattgagaaacaatatgacaacaataaacttgtacaataagacaaaattaaagaatgttttttttgtttttttttttctatttttctatatagttatataattatagatatagagttatagcttaacagaataaataagaattagcctcgtcttcgttagtacacaaaatttcggttatggctgaccgttcaattgaaacagagtccagtagttagttaatcacatctttcattgttaaaatgtacagaaacacttgtcacattatctcccttttatcatataggtggttcatatcctgtattacattatcagcagagccttccctttatatatgattattatttgagatcattctctcattgctatcatggtgttttggtatttttacttattggcactctcttttcaaggtacgtcaagaacaagattcattcattatgtataaataatgcattgccatcatcattaatcgacaaaactaatttcttggcttccatttttcttttaatggtgttttgaatgtattaggttcggatgcaactgttttcacattagaaaacagatgtaagaacacaatatggccagggatccaatctggagctggacatcctcaactaatggacggcgggctaaagcttagagccggccaagccgtaaacatcaatgccccaaaaggatggtcaggccgattctggggtcgcaagtggtgttcctttgataaatttggcaaaggaacctgcgtcacgggtgattgtggaggtgtgctgaagtgtgtaggagctggtggaaaaccacctgctacactggcagaatttactcttgatagtcccaaggatttctacgatgttagccttgttgatggctataatatgcctatttccattacccctttaggtggttttggttctaccaattcaaagtactcctgcaagaccattcggtgcatttcggacttgaaccggaggtgccctaatggcttgcaggtgaggaaaaataatggacccattgttgggtgcaagagtgcatgcatggcttttaataagccagagtattgttgcactggacagtatgggggtcctcaaaactgcaaaccaaatcattactcaaaaattttcaaggctgcttgtcccacgtcttatagttatgcctacgatgatcctactagcactttcacatgcaagggagctgattacttaattacgttttgttaaacttttctaccaatatccccacttacgaataacaatatcgttttctggctgaagaatgagccacggccagccacctccacgcttgtttattcaaatgtttctagcaagcgaatgcctcaccatttgtattatagcaaaacgcaaaactacaacccttcgtaaaaatatatatcttgtctcttatatttaagtgtgactaattcacgaaaattgttaatttaacatttttttttatttttccattaaattaaattaatcaattaattatatatttttatataatatatatttaaatctttaaatttaatttaacaatataatttagttaattattatttttatataaatcttaatttaaatttaaaaaagaccttaatttaattaattaaccatattttatagcatatttattagttatattatttaaaatatctaaatgtatttatttattttattgtttaataaaattcattaaatatatttttttagaaataaatttaaaactagattaaatgttgtatatgtatttataaaatataattgaattgtattagatttaattttattattattatttaacttaataattagataagaactctaatacaagaaacatgtattgcatattactaatacttaatcttatattaaatgtggctctttaagggaaattatgttgggctttatgccttaaataaaactctattttaatgtaatctctatcatttaaatatcaataaagaggcagaagtattttcatcacttatttaatgtgtcatttggttcatgttatcatttatatgtttgtttgatttataaatttatctaaacccttatcacatttatcttcttgtttattgtgtcgtcagcacagtgaaaaatcaagattgtgtgattaaatatatattcc

SEQ ID NO: 239352 - DNA, 966 bp, Cannabis indica
cgtaaaatgtttaaaattccataaaccgtatttttgttgtctttttgttgtttttgtgcatttgtgaaattaaccctttataaaacccaaaatcttaacaaaaaaacccccgaaaaatccactcaatgtgcagtcctaataagaactcttctactatagagcataaagaaactatgaaattgaacattcatttcacattttaaacaaaaagaaattatgaaattaaacatccatttcacattttaaccaaactaaacaatcggagtttgaactggagaacctataaatataaacttcaaaccgagtagaaaccaatgatatgttaggcatttgtttgtgaaactacaactttggcttgcatatatgttgtttaattaaaaataagattactttgtttttaataataataaaaaaaaaaaagtaggtaataaaatataagacttgatgtgttagtggtttttaaaagttgcaaactcgaataagtacttcccaaaataaataaaatataattctaaagtagttatgtcaaacctcatgatttgcatgtgcttctcatttctaatgtttttacttttatttacccatctttgcatgtgcttctcattctcttaccttatttttttttaattaaaaaatcattctaaaattttttagataaaaaagataaaatttattttttaaaattaattgaaataattcttaatttactcgtttttttaatattaccaaacagtttggaaaatattttttattaaaaaaacttatataaacaattatacaaatagtcaaaataagttaaaaaaacttatagctattttatactttagtattaaattaaagttaaaaatagccaaacaggacgtcatataagatataatcccaaccaaaaaaaatgtacgtataataatatgaaagaataaatcaatttagtatcatatatacacatatcaatttttcttttttttt

SEQ ID NO: 239353 - DNA, 2145 bp, Cannabis indica
gataacattgtaaggctcactccaaatattaaaaactttctacaaaagtatgaactatgaactatgaagataagaaactaatttagaccacaaaatcaagaggaaaaagagaccaagaaaatttttgtttgataaggttagacatatatataaatacgataccaatcatgttgaaagccagcaattgaatcaaacacaagtacttaaaatgaatactgtactgagaactaacagagcactacagtatagtcaaacacataagttatatccacaatacatattagctaatcaaagctaaaagcctagaaagaaattcatagacactgctccattcatgttaagttattcacaaagaccataaaagtcatagaaaatgtcaggccaatatgggagaaaattgacaccattgttaagaaaaagattaaatgagaatacccaaatgcaatataatttacatatgaaatttcaacttctcaaaaagcagtcttcgttttcaattgatacatattaatagtcatatatatgtaatgagattgcatatgaaatcctgtgtcctctttataggggatggaattcattaaaagtcttaacctttagccttgagctctgcaaggcgcctggagagattgtcttcgtcgaccttctcggtctcctttgtaggcacagcgtgcgctcccggctgcggcagacccaccgagacctcgaggccgtaatcgtcggccacctgttgcataaggctgttgacctctccttcgggagtggacaacgaagtggacccagccatggcgctctccatgaactcggcctgcacctccatgttcacaaattgcttctcgaactgatccatagtctcggacatcttctgtaggtttcctgtagccaaagtagactccagagacttgacgatggaacccatggacttgctaatggtggacatcttggcctgggtatcgaggcgagccacaacggcatcaaggcgtgaagacagcctgagatagttcatctgctcggttcgcttgcggatggcgttctcagcgtagattctagcgccatcgacgttgcctttctccatggctttcttgatcttgagcttctccgacttctcttccttctcgcactttctggcctggcgttgtagcgacttggatgtgaatttcaattccatgatctgattaagcagcttctcggtgttccccatggcgatcgttactcaggatttcaaattgggattctaggtttctgttgaagaaattgaaattgaaattgctgagaagagatgcgattgtttgttggatatgtgaatattgactaaatagtatatattctaattgaataggagaaacgcggctaagaaagaaatgacctaatttcgaatcacataacgcggtcgataagggccgtcatctactgtactgtctatttcagctgttaatttttttacaaacgatttttcctcaatgaccgccgccgtcgaaaagtccgatggtctatcaaattttcggaaccaccaccaccaaaattttaatgtggtaaagtagattatgtctataaattttgataaaagaattaggtaattactataggatgattcaacactgcaccatttggtgttcaccccatttacctatttggtatgagagaatattttagtcaaataaaatttacacaatgaatccaaatttttttaaaaaattacaatcatttttgtttttacttttttactttttaatttatagaaatacatctccagtaacaataataaactattttttagttattttataatttatttatagttgtcataaagttaattttttgtttattgtttttttaccttttgtcgagtaaaatttatttttataattttaaaattttacaaagtatttttgtaattaaaaattttaagtcgtaaaattgtaaatgaaatataaaagaaatgtatttttgcaaattcttcttttttatgttcatctatggtataataatttaagacattctgcaaaattttaaaagatttaaaaaaatttaacattctgaaaatagggttcaaatagtctattgcacgcgagagtcttttattttataaaggaaattttatttacaccccaaaagtttttaaaataccccattttaataatttttatt

SEQ ID NO: 239354 - DNA, 2378 bp, Cannabis indica
tcttcttcttgttcacatcacacctataaaggtataaaaggcaaaggaaaaagtggttgcctttacttatgtgtaatttatatatatcttatcaaacttctgtgatcatggtgctccttcagttcttgtaaatcttattgaggatctggggagttgtttggatttctataaacaataacaagttctcctctatatgtgtactaaaggaaagtaaatatattacatgtttgtgtgtttggtcaatttttacaactactctcatacacactatatatatataactggcctaagaaaatagtgttatgtaatccattaatatagttgttacaatattacataatataagatcttccaaataatgccttttatgtctttttttttttcaatgaagtttgattttggtagttgtgattttaatcaagttacacgcccccaacaaaattgttattgttaaattagtgctagattgacataaatgaaaatttaaacttaaagggataaaatttataatttaggactgtaaaaattattatatagagatgtttgtagcacttgaaatgcttaactgaactaatttgacgacaaaactccccataattaacaagtgttttagttggacattgttgttattggtgaaattgctttagagcatcccaatttccaatgcatggttaaatagctagttgggcccaattttaatgtttttttttttgggtagtttaataaatatagaaaaaaagtagaaataaataatgtaaaaaatataaaaataaataaacaaaaattaaaatatgagaaattaaataaaagaacataaataaagttataaaatttataataactattactggaaaaatcgccagagtagatatcagtcctgaaaaggttactgaaaaagtcatcagtgctaaaaaaatcgttagaaaagtcatttgtaccgaaaaagttgttaaaaaaatcaccaaaaaattcatcgatgccaaaaaaattaccgaagttgtcatcggtgccagaaaagtcactgaagttgtcattatcgtcagaaaaataaccggaattagatgtctcgggtataaattaaaatagaactaacacagaataactcaaaccgattataattaaaatagaattagttttatagcataatgaataacataaaataatccaaaccggttatcattaaacagaaccggttctataacagtgatataatgaaaaataaataaataacacaaaataactcaaacagattataattaaaataaaacatgttctataacataatgaataaaaacaaagaacacataataactcaaacggttataattaaaattattttgccttaccattttgtgaatcttgtgttttaggaaaataaaatgagttgaagtagacacttgaatatgtgcatggtgatctttgggggccatacaaggtgtctactcacttcggtaactaatattttctttcaatagttgatgactatagtaagtgtgtttggacctatttgctagcaactaaggatgagtgacttgaacagtttaaaatttagaaaatacaggtggaaaactaaatagatcttaaaattgagaaccttaggacagataatgggttggagtttataaactctgaatttgaaaagttgtgtcaagaatttagaatcacgaagcatagaaccgtagtgaagaccccagagcaaaatggtattgctgaaaagatgaattgaaccctattgaacaaaggtaaatgtttactgttcagttccagattagaaaaaatattttggggggaagctttagcaactgcaacctaccttataaatagaagctcaaatagagttatagacttaaaaacaccttatgaaatgtggtataacagaacacccaacctaacgcaattaagaatattttggcgtacaacatatgtacactaatctattgacaagctggaacttatatccgttaagggaattctcctaggctatgccttaggtaccaatgggtatagaatttgcatttttgaaaagggtaagccaaagatagtgattactagaaatattattttcaatgagttagaatatcctcatttgacatccaagaaaggtagtatgtctccttatgatgtaggaaaaataagaaagaaaaacactacaagcatggaaatggatttcgaacgaagctcccaaaagaaggtccacagaagaaagctagtatggaactggaagacaatgcgcagatggaagcaaaagcgaagccaaaagatagttgttgggtccgcccctttattggtgggctggaccaataagggcttcggcccattttatttgaatcaattaaagaaaaaaaaaaaagaaagaaaggaagcatgagtgcttcgtg

SEQ ID NO: 239355 - DNA, 2160 bp, Cannabis indica
taatgtcatttagtgaatgatagccggtgatcacgttgctgtcatattcaggcctcttaaatgggtcccctaacctcatcatgtgaagagcttaagtcagagtcggtgtgtgagtgaggctgagacttctcaaataatcaaaatatatcaccactatataacaaggcttcaagcactccattctcttgtcccttaaccttaatattttataataacaaggagtgagttttctcttctacactctctctattggtattatattctttacaattcccaatgcggattttagcactgttgtgcttttgggtgtctttggctttggtagttagcttttgctacggtgatgatgacaagacagttgaggtagttgggattggagaatgtgccgactgctctcagcataacttcgacacaaaacttgccttttcaggtatataatgtgtaacacaaaaatgtccaattgtattgtatgagtatcatgtcaagatcaacttcaatcttacatatccgaaaaatgagtacatatgatcttttttgagttggtctgtcaattaagcccatacatgaaaaaggtgtattttataattggtttgccatgcacacatataaaacatgtggcaaatgaagaataataatcttattaatttttctcattgttttgtcattttcaggtcttcgtgtaacaatagactgtaaaacaccaggtgggcacttcaaaacaagaggatcaggggagttagacgaagaaggaaagttcaaagtgtcactccctaaagacatcttagataaggaatcaaaacttaatgaagaatgctatgcacaactccatagttcatcatatggaccttgtcctgcccgtgatggcttagagtcctctaaaatactctcccaaaccattaaacccccttcaaccaatgacaacaatgatcataacaaacacacttttggactagctaagggaaaactcaagttctcacctataacatgcgcttcagcctttttttggcaccatttccacaaaaaacacccactttgtgctcctaaaacccctgaacaagccccccaaaagcccccaccagcaccagcgccaaagaaagaactccctactccttccccccaaaagaagccaaacccttcaaaagagaaagctccaaagaaagagccttgtcctccaaaagccaataaacctccaaagaaagaggtccccaagaagaagccttgtcctcccaaaccagaaataaagcctcttccaccaagtgttcctgtctataataaacctccaacaccagtttattacaagcccaaacacccttttttcaagcaccctttttacaagcaccctttctttaagcatcctttctttaagcatctcccacctttccctaagatcccttatcaccctcttttccctaagctcaagctccctcctttctttgaccatcccatgtttggaaaaatacctgccacccaacatccttagtgtcgttttgcttgtaattggggatgaagatatgtcgttttttggtggagcatgttctcttgttgttatcctaattaataaagattgccaagctccatatatatttttattttttaagaaaaaagtgacttaatgagagacatatagagttgggatgaagttttagggaataattgtgttgattttgattttcattatttagctggttcatttgtgtggagtcagattgttctttaattaattataattatattatatttgttgggggatctttttggttttgtttatgtaaaggtttaatgacaaatgcttatgaatttggaatcaattaatattgttattcttttttatttgcaatatataattaatattgttacctttttttctccaatcaatatctaaggattagtttacaaaaaaattacattttatgaatttacagtttttttttatattttattaaattttaatagatttcaatttttttcaataaaaatataaagtgttatttttctgttatttctaaaacaacgttgtttttacgttactattacgggaaagtaacgtaaaaacaatatttttttatacaaatgaaaaacctgtaaaaaacaaaatttattaaaaaaattataaaaatattttaaaaataacaattttctactaaaataacagcttctggt

SEQ ID NO: 239356 - DNA, 1243 bp, Cannabis indica
aactgtactaccaaaaaaagaaaaataataaacaaaacgtggccaattttacacgtgtgatcaataggagaaaatgtaattaattaagaaacttatacctgaactgcgtttttgatatatcaatctcattgttgactgatgaaaaaaccttcattgctcatcatctctaatactattaatataaagatcactatacatctatatatatatcatatgaatttatacgtacatacatattaatataaatcttagtatttaaagtggtttgggatcttatttaattttgcttcttaaatgaatataagcagcctttttcctgctatataacaaagaaggacgagacatatatttagttgggcaagcaaagaatttaacttaaagaagcaaaaaacagattcctttgaacttcttttggttaaagaaaaaatattcttaatttagaacaaaatcagagcccatttatattagatatataatattttgtacaaatgaataatcatattatgcatgcataaaggaaaaatctcactgggttctcatcaaagaattcaaatcacttctgattataattaaagttatatataaaaaagaaaaaaagggttcatgagctcaaagcccaagctgaaaattatgggtatagggttttacaatggcggtctgtttgagattttagcctttgcagagtcctagagaatcttcggagcttttggtttagcatatagtattatttacatgttgtgctattttgattgtagttttaaaattaaactttccaatattacttatagattttttttttggaataaaaatgataagatatattaatataaattcgttcaaaacaatatagaacgcacttcagaggaacagttctccaactgaagcacacgacctgtagagaaacaagagtctgttaccaaacaatgagccaacttatttgcagatcattttacaaaacacaaattgtgaaggcataaaataccgctctgaatcgcttaaacacacaccaagttatctgtatccaacatgactctatcccacgaatgagttgcaatccaactcaatgcttctttaatgtctattatctaagcaatttcaggttgtacacatccaatcttccccttcttgaatgcttccaccatagcatcatgataattctgagctacacaacccatgcaaaagacaacactcgaaccggaaaaaactaaaaaactatgtcaaaagacaagactaaagaactatg

SEQ ID NO: 239357 - DNA, 2438 bp, Cannabis indica
aaaattccgtaaaaccgttattttgttgtttttttattgtttttgtgcatttgtaaaattaacctttttctaaaagctattccaaacaggtaagatttttggatttaaagacttttatctaattttaaatttaggaggcagaattttgtacatgttaaaattcaaggggcatgatttagtagatattaaaattcgggggcatactttagcaggacaatcgccacattagcaaaattaaatgaaattagaaagaagtccttaaatctaatattttcaataattcaagagaaatttttaacggcttgaaaaattttaaaaacatgatttattacatgttaaaatttgaggacaaaaatcataattagtttttaaaataaaaataaacaaatcaataatcgtttaaaattaatatatatgataaaaaaaaaaacttgaatcggtaaatataatggcacctgacctaggcacccagacagaattcagaatccagtgatgaattttaaggggtttatgttaataatgtagtattgagaagaactttaattaaggtgatgctacctgatgagtttacatggcttattaatatggattctatttcaaaatctaatccaacgagtcatgaattgaataagtaatttgctcacaattttctgccatttatggacggtgggaaatgttgtgactgatgactaccataatatatgttgggacctttgaaaactggttgacccatggtttgatctctaattctacctatcgaaatgttgcaaagggaaatgtgattttggatcctctcaacattacttgggaaaaatatgattggatctatttaatgaaaaacttaaaagaaacgatcagtgatcgatgttgagaacttaacccttcgtggtagggaaacgagaatatatataaagaaatagggttagaaatttagggtttcattagtttctatttatactactgttatttttattttttatttagtttttttatttaaaatttgatacaattttataaagaaaaataataaattttataataattaaaatatttaattattattttttattaccttaatctagttaacttgatatgaaaatagctattgcataaaatatatgattttctttagagaataatgtttttaaaaaatgtaccaacttgtaatagtttccaaaataaaatattatggataagtaatatttattaaagcccgacataagcctatattataatttaagaagcttaaattttcaaaaaaaaaaagaagcttaaattttaaattataaatttaagatagagtattgttaatggttaattatatttttagatggcattatttgttcatgtggacgtgtggaggtgattaatttagtggagtttgttatagtatataaaattgataagatatttaaagtataaatagatatataataaatgaatttcaaatgattgaactgcttggagtcctatctatgcttgtggacttggttgtgaaataattagtattatgatgataagttatacataggcgtatgatagcttacgtgtaggttagtgggtcataggagaattatatgggttggttagtatagcataataaacttagttcaaaaaattattaactcacgtgagctcattattctcaattatatgagcaaatcacgtccatattatagcttgggaatagtctagaagttcttatgtgttattatataaaattaagtattagttttaaatattaatcatggttagtagtgagataagaggggacatgaatagggttatattttaagcttataaatactacccattccattcacttttcttttacacctaaaaagcatagttgaaattcatttgatatacctcttccattctctttcttttttcataatgtactataaagaaccaagactccaattatatttttctagctttagcataatcacctcctataccaccagctcaagccacaattatcattctagaatctcccataagccacgtttcaaccatacattacttgtttctataagttctaaatcatcatcatcttgttttttttttttccatatcaagatcatctaaagttgttgataagtttcaaacctgaaactatagtctattgtctttaattatttgatcaaactctcatgtctttgttagtaagggttgaatcactaggtgagttttcacattagttttggactcaaagctaaggttctttatagtcacaaataggaatctccttagaagctacagttcttaaggatcattctcgcaatcaaaataatttttccacattcgaaataaaaaaattaagtagaaacttttacattttttgtatcaaataatgttaaaaaattaaaggagtgagaatgaggtataagatttatgccctatttttgtttgttcattattatattatattgttt

SEQ ID NO: 239358 - DNA, 1770 bp, Cannabis indica
atttttttttaaaaaaacttttagatttcctatttttgtttaattttccttactaagctaaaaatgtaaaatttggacctaaaatgtctattatagaaaaaacctctttaagtaatgtccaatttggtttgacaaatgcacttttgtaaatatgtgcatgattatagaaatcataatatttttatttagaaaaaataaattcactcaaaaagaaaatattaggcaaagcctttttaacaatctcctaaaaacaaatatgtgatgtggatggtgaatagtgttagttgttaccacatttcagaaaaaacatacaatattatgttgaattttaaacttggaattgaaataattaatggacaattcatgtgtttaagataaagaatatttaaattttaaaaaggtatataaaacaaaaaacagttagctaacaaaacaagattaataatgaatgaagaaagaagaataagtattgcttatattgttaagcaaaaaaatttaattaaaatttatttatagaaataatatatctaagtaaaacaaaaaagaatgatggagggatgtgccgataccaaacaaactaacaaaaattgtaaccaagtaaaataaaaagaagggtaaatattttcagtgaaaaaaagaagaagggtaaaatataaagttcttggaaatttaagtcagtaaaaagagtaaaaatgaaatttaaccaaaaaaaataaaatataaaaaataaggaggagaagtagtcttggaaagacaagaactaaacgacatgaattacttgaatacaaatataataagatctatgggatttgtagaagacaaaaaggaagagaacccttaaattatttttagcaaatgacaataaatttatataaaaaagttggaaaaaaaacaacatatttattatggtatttaaaactaaaataaaataattaaagccatatttcatcatatagattataggtatggatgaggttccaattgaacctaccaactaacccgagtcacgtgattacacatggttggtcgagaacctattgcttagcaatttttgcaggtgttcgatcaattttgtagagtcacatgactatgattaaactagtgaatttgataaatacctataactttactgcattattatacattagaaaaacaattttaagggatttttttatttatttttgttattatgtgacttttgagaatagtttgataggtgtgggaagtggtaaagtagaaaatggtacatttttctttagggttttttctgcattgaattttgtcaaaaataattcatggcttttgtaatgacattcattccattcatgtttgggacaatgtgacatgtgacatgtttgttggtggtggtaccacattttattatgcttattggtcccaacaaataaataaataaataaatttcatgaacattaaacatatttatttactgcaatcgtacctatatcacttgaatgtctaaggcacaatttaatttaatttaatatttttcttatattaaattgaattattttatttttatgctggtttgtttaataatgttattttaagaatatgttaacatgtaattgtttaaataatttgagaaaaatgatggagatgataacactttgagaaaaataataacacaaactatatagaaattaaaaaaaaaacaccaaaaaaacccaaatttgaaccaaaagacttgtatgcgatgaaaattttcgtctaataacgactggagttataatttaaaatcaattagaaata

SEQ ID NO: 239359 - DNA, 2344 bp, Cannabis indica
gaacatattaccgtattttttgtaaattaagttttaagaaccgtaaaaatatttaaaatattatataattgtatttttgtaattttttattattatttttatgtattttataaggccaactccaatgcggcttgcattgatgtggcccatcaaatgctctcacaaagataaactaggggtggagtgttatacaatattggagaattttaaatagacaactacaaatgtttaccaagagcaactataacatttgtcttttttcgaactctataaattaatacataatctttcattacaaatgtatagttttgttgatttattaatcagtttctgttataaaaatttaaggagaggtagattaattagtaagttagtattgtactattaatttataattatttctaaattattatatgcaatatagtatcttaatattttataaatttttaacaatattaataatgtaattacttttaattaacaaataattaaaaatgaacacatgtactattatattttatttaaatgagatcacataaagaggattagttggtcccaatccatatatatgtatatgtatgaggaaccctagataggtaggttgtgcagcctgccccacccaccaatttgttctcatgaagcaacaaactaatatatgcctttcaatatgtctgtcgaatacttagggaaaaagcatatcacgatgggatttatgtagataatacagatggtttatatcaaatatgatatctatatatatatataaacatattaaaaaagaggaatctgtatccaataatatacatgatatatattactcaaatctcgatatacttatcatatatatagatattatattggggtgttgatgcatagaagatatatttattatattattattgttattattataatttggatacttttgaatattatctaacaattgagaagtttccttcaatttatttctttttttgaaaagcctttagatttgttaataataaattggtaatgtcccaaccaaaaaaataaaaataaattggtaatgttaaatttgtaaagagtattaattatgccatactcatttgaattcacataataaaattacaatgtatatatattaatattgaacacaattatatgtaatataattgaactaatttcctaaaaattattttaattgtcaaaactaacagttgattgctagctattaaattcatttggcttaattagcgacccataccacactatatctttgtttaaacatatgactttttttaacaattttttaaacatatatatatatatatatataataaaataagatatatgattatagcgcatatattttaacaatgcacatccccacatctagtatatataactcttttatcaaaaaaagagtatttagcctcacttgatatagttggctggctccactctttactattttttcttttatttgtttaaactgttcacattgattaaattatttacactgatttttttgtccgatctcaaatagttttgtgatctgaaattacaaattatataaattacactgattggggtttagaactatataaattacaaattatatgaacaacctaattaatttaatttttaaatgagttcatttgaccaataaatttttcgttttttccttctttatttggcgggatggagttacattttttgtaacacgtactcgtatattaagttgtaaatgcatgtttgttgtactaactcgatcttatattttttggctttttaaaatatgggtcgtgtcaagctatagaaaaatatggactatgtcatgccgtgcaataatttataggatatgctttccgcggcccgaaagtccagtaatttcttatagtactttattcaggccattccgtttttcttaaataaaccaacctgtgttcttatatgggctcaaattgacgctctatatttttatatttttattataaaatctaaaatatatttgtattttatagttttaattacttttatatattaattttttttaataatagttatatgataaaaataattataattataataatttataatttataattgatatataaatagttattattgttagggtaaattgcggcataaatacttaatgtttcaaattttataaatttaaatacctactgtttatttttggaggcaaaaatacctaatgttacaattatcttacaccgttactaccacttccgttaacttatcataaatgtggagggctcaaatacattaaatttatttattttattttaaaatttaatattcttaatatcaaaaattaaatactacttgtttaaaaaaa

SEQ ID NO: 239360 - DNA, 1231 bp, Cannabis indica
gaaaggtaaacaaccagagatcataaaatacacatggataaaaccacaagctaattaaccaaaaattaagggtattaaccggacagcctgaagatggtgtatcattaaccgattagcctagatttgataggccaagaatcgactagtttaaaattggttctacaagaaccggccagcttaaaagtggttccataagaaccaaacaaagtttctatatggatctaaacaactgagcagggtctctaacagacccaaagtaccaggcaaggtccctaatcgaatcaaatagtcttatttatacatttgaagttcaattctttgtgatcttcaaacctcaaagttcaaaatgtcaaaacaaagtgcaagattcaatctttttcataaaaattcatgcattctacatcctaaagttattgcatggatcacgttgtataaagactactctaaagcatgaaaattgagaagctcaaaagcttgaaactcaacaaaggcagaactaaaaaacttgaaaaagaaagaaaagttttttgaactcacctactatgaagacttcgctagagtagcactaatctactaggcaatggcaatcctttagcaaacatcaatcgagctcgtcaaaggattcctaggttgtgggggctttcggtttgagaagtttaaagttacgtgagttctaagtttcaaagatactttgagagagttttctaagttcaaagaagtttaaaggtgaaaaatgagaagaaaaagagtgagatacttatataggttctgaaaattaatttttctcccaaaaaatttaatagggagttaatgccacaaaaataggcatgcatgggaaagacaaagccaagagtttaaacaagggaaagtgtgaagtcattacacgatttcccacattgattgacagaaagttgataactaatgatgaatcaatcgaagagactgaagggtgaccatgcatagtgttgggattttatgcccaaaataaaatatatttcaatataatcaagtttactagttaataaaagattaaaatcattttatgttgcatggttcacataattactttcatgattatatgtttaatctatagattctattaaatcataaatatatagttattcatgattatagtgttgtctacatagtagaaaataatcatgattaaatgcttcaaattatttattttcacgatttatcagtgcgcttttatactgacgtgataatcaat

SEQ ID NO: 239361 - DNA, 2042 bp, Cannabis indica
agagagagagagagaatatgagatctgaaaaatttgggtatataaaatgcaaattaaggatactcatcgatttataagtactcgtagctgtaggctaaagtatagttgactgttaagaatgtcggctatacttttgcctataggtgtaaaccattgcctataatgggtaattttaattcgaattgttgttttcaaccgacactaatacataacgattgtttaaaattgatgtgtattctcaactatcatcgattttaaatactcatttaattttattagtgatcgtcattgaaaaaaagctaatttgaggaccgacaagaataatgccttttgtagtagcttatactatttttactataaactcaaccccagtcctggattcggacctcgtctccaaaacagaacctaagaccgtttctatattttatataattgactaaataatacatttagaggttttgtttaaaaataattcgaatccagtaaacattctttgaaattcacaaagactcacatatcaataattaacaaaccaattgagttaataagaacaaattaaccattatgagttattaccatttgacttgttcttttcattaagtaagaagagtaagaagagaacagacatagaacaaaggtgacaaaagtaagattataaagaaattatagtaaatgacacaattgcaataataataaataaagagaaatacatagatgatagtgtaaatatataaagcacagtagataatgaggtggtgcatggcagattaaacattggtcacatgcacagcaacaccatcggccatggtagttcctgtggcattgagacagtcgtgcactaagcctatgatataagccttacaatacttgtcgtttctcacacaatagattaccttttcatttttgctttgatcatccctaagactgaacaacgagtcattggtcaaaccataaaaatcgtctaccaatatcgagtacttattgctgcagtcgagcctccaatatttgttggtcttcttatgcatacataaccgtcgtcgttgccagggacggtgatgatatcaaattgtgcattttctattttctcaggaagtgggttgcctaactgaacatgtgtttttttatcatcatcattaacgtgcactctgagaaaactattatcctcccctcgagtgaaatacacatgtcccttgctcccttccattgcactccttttgattgttttatcaactaataactactaattcttgaatttttcatcatcttattttagttttaggagagaaaatgaatgaaatctttaatgaatggatctcaattgatgcaagttagctcgactaaacttatgtactactgaagcaaaaaatacaaaaaactagtttcaaaccagtagtaacaataagaacaaaccagcagctgtcaacaacatttctaattaacaaactcaaccaattacaacaaagcaattcttaacactccccctcaagatggagagtagatatcaatcaatcccatcttgtctttaaggttcttaaactgtccaagaaacagagctttagttagtagatctgcgattttctctttggttgagatgtgagctgttttgattatcccttgttgcactttctctctaacaaggtgacaatcaatttcaatatgcttcgttctctcgtgaaagaacggatttacagcaacgtgttgtgctgccttgttatcacaatgcatcaaaatcggtcctttgtgttcaattttaagctctttaagcattgacaacaaccatatgatttctgaagtagtattggccatagctctatattcagcttcagctgaagatctagaaattgtatgttgctttttgcttttccaagaaatcaaagatttctgaagaaaaatacaaaacctgtggtcgatcttcttgtatctaggcaagcagcccaatccgaatcagtatatgtttccaatttgatcttggattgagctaaaaagaagatcccttgacctggtatgcccttcacatagtggagaactctttgagcagccac

SEQ ID NO: 239362 - DNA, 2378 bp, Cannabis indica
tctagattagttgctgtccttccttagatagttaatcagaatcaaagggcatttgtcaatggtagatccatagttcataatattctaatattttaagatctgataaagaactatggaaggaaagctatctccctgagatgtgctatcagatagacttgagtaaggcctatgataccgtagattggaggtttcttgaggatcttcttcaagcattatgctttcctgccaggttaattaattggatcatgatatgtttgaaaaatacttcttactcgcttttgatgaatgacaaaattcaagggaacttcaaaggtgaaaagggtctacaacaaggtgatcctctttatcttttactttttgtccttgttatagaatatttgattagaagacttcaactagcatctttggatgctaacttcagatttcaaccaatgtgcataagtttgagaatcattagcctttgctttgtggatgatcttattttattttccaaaggttctttagcctcggtaagggttttaaaggatgttttggatgaatttagtgctgcttcgggcttaatggctaatgttgacaaatcttaattttctttggaggggttgaagcttcaggtagggatgctataattcataccttgcggttttctgacggatcttttcccttaaaatacctttgtgtgcctatgagacctactaaatggaaaaaaagaggattgcggtattatcataaaaaaaaattaagtcgagattgcattcttgggctagttggcatctctcttttgtaggtagaacttaacttatccatttggtgttacttggtcttcgtaactactggatgagtatatttgtccttgctcaaagtgtcattaaagaggtcaaaaagctttgtaggggcttcctttggggaatgaaggataataggagtaaatacatgtttcctcgtgggaaaaagtgtgcctccctaaagtttttagtggtctcaggtttagagaagggcctcactgaaataaagccatccttgctaaattcatctaagctctttctgagaaacatgacatgctttgggttagatggatccattctgtcttaaagggccaatccttttgggagcactccttgaagtcggattcgagttggtattggaggaaactttgtagactttggtgcaaagggtaaattaaaagcctccactctttacaatagtaatctttctcaccatcaacgtgttcactatgacaaagttgtttggagcaagttaagtcttccaaaacacaggtttttattgtggcaagccattatcaatcaacttcttacaagggatctttttacaaggtttggtatccatatggacaccactttgtcctgtgtgtggcatctttaatgaaagccataaacatctcttttttgaatgcttgctttcccaaaaggtggttgattcagtttttcattggatggggttcaaagtttggtcgttggagattgaaggctagactgtatggttatctttaaagagaataggaatcgtggctgctacctcttatgctttacttgctgcttgtatccacaacgtttggatgaattgaaacatgtgtgtttttgaaggctattcaagaagagaagatagcctagtcaaagagataaaaattgtgattattcaaagattatacattgtaaaaaatagaaagcattcaatacaagatgagagattcatagggaagtaattatatagccaagttgcttgtttttgttgttgtggcagttttgtgttgcccttgtcttgtatagtttggttgtattttgcttgtattaatgaaatctttttttttcttgataaaaaaaaatatatcaaaacaacttgtaataataatagcacttttaattcaaaactaaataatacaaataagtatccgggatcccgtaaattcttttcaaaatattacaagtggatttcatataagccaacttaagtggcaaaatgagatttctatacaatctctcatgtaggacctaaccgttatggcttagcttggctataacatgtacaatccatcatcaagcccttaaactcatggttgacccgataccgcttcacctttgcatgcatattagagcacttgtgagccaaggtctagcaagacagtaataacaaatataatatcaatatatagcatacatatcacatatgatatgtaacgctctatccaacagggacgccacgtgtgtatttttataaaattcttatttaaatactatatgttgacctcgcttttagccaacaacaatgagtcttatttagtaagcgataagtgatttatagtgatcgatatatagtaaagcaatgtaaagatacaagaattttatgttgagttttatgcccta

SEQ ID NO: 239363 - DNA, 3675 bp, Cannabis indica
taatttatttataattattgtgaggttgatttcttgttgtcttttagttattttcttactatttacttaaaaaaattatattttgtaattttaaattaaaaaaaaaataggccgtaaaattattaaaaaaaatatttttgaaaaaaatcccccccttcccccttttcctaattaactatatttttctcataatatcatacaattaattttaagaattaattcaaatattcaaacgaaaatattatagcatctccaataaaacgttataaaatatgatttttataaaattttcaattgaggggcaaataaaatattcatttgttaccaaaatcccaccatcactaaaaaaaacaaaataaaataaagactataccaaacaaagaaatatgtgaaaaaaattatgcaaagtaacaattactttacaaacataattgatcaaataggttacatgttagtgtagccttcatgtcccatataacatggtacctaaaactcctttaaagatggagagagatacaaacatatttatacacacaatttgatattataatagtgaaatactataagaaattactacttttaataaaattattatattaaattatatgagacttaatacgtaattatactaatagtaatatgataatttaaatgatattgattagtgttgcatttttatatttttgataatatagcttttttttatttaaaaatatgtaccaaaatattatacgcagtcttatgacaatgatttttaaaataatagattccaatttagataaatttgattggttaaaaaaattactactctttataatattggtttatcggtatatacattataaattatgtgcttgatcattactcgtatttgtgtttatttattttttttcaaaaaaaaaagtaagaaatatagaaacgtaataagctcgctctactcgatgtctataaatatgttaaagtttatggtatgatctaaaaaggtacttgtttaaattgagtaaaatgcaaggataataaagtggtaaagcttatgtaagaaaagaaaataaaataaaagaaaatgagaggcttaatgattacaactaaaaaacaaagtgaaaaagaagaagacaaacatgacattttattttcctaagaaaattgtaaactcaactcatcttcattcttttcctatgcatatttttcttctttgttacctttctttttcatttttattgggattctcttaaagaacttatgttgtacattacattgttatgcatgtacttttttcaaacaatcatcactcatgtaatgcaaaacactagaaaacaatgttacataaataatatattatgtccctttgtgaacactaaaaaccaatcttaattataagtttggtgttgtaataataatgtttgataactcaaactcaattttctcaatttattcatttttaattattagtagttaatgcttagcatgtaagtctctctctctctctctccatatgacccattcattatttaagtttagggttaattgaagagcacatggaatggaactattgttgactattttggggagagtccaaatccaagaggattttatattaaggctccacataataataaattgataagcatgggaacaccatggtataacaaatttataatagaataataaaaaatcaacattttttctttttatttttcacttatagtccccaattttattatacttatattaaagtcacaaatcaaaaagtgatataatttatggtgtcatataaatcatacttacaaagccctaacatgtgtaactatatcataaattatagttacactacatatttgtaatgtcatatttacatattggtatccacagttattctaccataaatcagtatacaaatccataacaaaccacaactatagttagaaattcatagtggtttatacttttgttaaatctgttagattatatcctaattgtcgttttaacttgaaatttgttttaactaatttactattttgtttggtggcggaactcgatgtttaataaagcttaaatttctattaaaaaataggtagaaattcctaacaagcattaatagataaatcatagttacaagtcggtaactaatttataagtatgcgataattcataattatcaaactaggtaaatgtgttgtaaatgatagttactactaaaaaagttacttttattgacaatcttttagtcacaatataaattttttgtgacttaaatgtaattcttagtcacaaaaaaagttacttgtgactaaaatatagtatttagatacaagttgttactaatttagttttggtcacaataagtattgtgactagaaacacatttagtcacaacaaattgtaatttttgtgacaataccttaaatcacatattttttaatcacaacgtaagaatgatgatttataattagttacaactttttcacttataattataaattttattgtaactaaaaataaaaaaaataaaaaaaaattagtactttaccataacttacagttacaaatttgtaagtataaatcatagatccaaaagttaatgatgttagttttgagatgagtaacttttagtaaagataaaagtaaattatttttctctttctggaagactaactaattgtttgctctcatatgaatatatttgcttgttcaaactaattttatcactagtaacaaaaactagattatgcttaaacttcttaaccaaccattttgaagtttgtattttgatcattttctaaaaaactttttggaaaagttccaaatataataggaatttttacaccacatactaaaattttttaactttttttttcatttttactgtggggtgattttttaaaaaaaaaatattgtgtttttcttcaaaaatactgtacaaatatcatactttatactatgttaagttttcattgttgttccacagttgctttttagttattctactattacttttaattattctatattgttgttttacagttattttaggttgttttatagaaaacagtatttttgtaaaaaattctatgtggcaataaaattgtaaatttttgcttaaaatccaatatttttgtaaaatcctcaatataacaagagatataatatatgaattaacaaaatccaattcatgtgtctcataaactagtagaaatgattcataaaatcacatactagtgacaagtcccaaattttttattcaaaaaaaaaaaaaaacaaccatgtgatcaaattattccaaaaagaccttaatttgtgactaaaagtacataattactaatatttgtatatttgtgagaacttatatccaaatagtaattttagtaataagaaacttgtatttaaaattattttaaaataaagttgtctaaattaaccaaatcttatcttattggactcaaaagcaattttttagaaaattttatgaagcaagatattttttttcatactattagtaggaattactttggaaattcaatttgaatgatatttttgtaaatagtctattttaggtatagtattaaaaaactcttaaaattgtatgttatgactaaaaaattcactaaaagcccaacattttgtgatttttgtgtagtgagtgaatgtgtaaacaactatagaattcataaaaaatcc

SEQ ID NO: 239364 - DNA, 2110 bp, Cannabis indica
atttcagcctaaataagagctaagtaataagcttatgttaggatagcttccactcaaactgttataaatttataataaaagattttataaattcattcattagaagataatttttatataacttacttaatcgtcctttggtttggagaatgatcaatctctcagtagctttttctccacaagtctttaaatgttaaaaccaacattacacatacaaaactcaagcttatcccaaatcctaattcctcttattgacaaatgccaatcagtggcccagcttaagcagattcaaactcttctactcactcatggacttcaccaacatcattccctcgcctccagaatcctttctttcttggccttatcccatctgggcaatgtcgattattcctttcgaattctttcccacctctccaatccaaccacttttcattggaacatagtaatacgaggctactccaagagcctaaatcccaaccgttcggtttcagcttttgtccaaatgttacgagatgggatcaagccagaccaatttacttatctttttcttaccaaggcctcgtcttccctgttgaagagagagcttggagagacagtgcatgctttggttgccaaacatggctatgagtctgatatttttatccaaaacaccttcattcatatgtatgctagttgcggttatattggatgtgcacgcaaggtgtttgataatttgactcggaggaacttcgtttcctggactgccatgttagatgggtatgcaaaatgtagggatatgaattcggcaagacatgtgtttgagctgatgccggacagggatgttgtgtcttggagttgtttgattgatgggtatgttaaaaatggagagtatttggaggctttgaccttattcaagagaatgcagaatgtgggaattaaaggaaatgaggtgacaatggtgagtgttttgagtgctattgcccacttaggtgaacttgagaatgggaggttgatgcataattatatagttgagaatgaattgcctcttactttggtgctgagaacatcacttgtggatatgtatgcaaagtgtggggcaatagatgatgctttagaattgtttcttggaggaacaatgagaaaaactgatgttttgatttggaatacaatgattagaggattagccacacatggtttggtaaaagagtcacttgatctgtttaaggaaatggcaatggttccaattgtcccggatgagattacgtatttgtgtttgctgagtgcttgtagtcatggaggattagtaaaggaagcttggtatttttttgaatgtcttagcaaaaatggtatgacacccaagagtgagcactatgcttgtgtggtggatgttttatcacgcgcaggacatgttgatgaggcatttcaacttgtctttgacatgccgatgaagcctattgctgaaatactgggtgctcttttgagtgggtgtataaaccatggaagactagatcttgcagaaatagttggtagaaagcttatagaggcagagccagatcatgatagtagatatgtaggcttgtcaaatgcttatgctactttcgagcagtgggaagaagcaagaaggatgagagaagccatgaataagagaggagtaaagaagtcacctggtcttagttttgtgtaaatctccatattccataatgatcatcaacatgccttattgatgttaaacaaaaaaaaaaagaaaagcatgccttattgattaagcacttttcgattattgttgtgaaccaaattgtcctaggttttcagacaaaatataagagggaaaacatagtgtaaattgattccaagctctggccttggttaataattgtaaagccaccaagtgcttgataagaagatataaatgctataaattttgaaaaacaataaagttcttttttttttccttttttgtttttgatttctactctatctgtcattacaaatgtggaaacatgagccacttctgtttttatatttttagtcaatgtggcctcttgtaaaatttgtcaaaatagatttttgataaagtgaaattagcaaaatagacttttttttttattattattattatttttattttaca

SEQ ID NO: 239365 - DNA, 1140 bp, Cannabis indica
aatactcatatttccttaacacaataccttttcttaattttcttttagtataaagctacacgccttggcatttacaagcataaatgattatacaactggtgttcaaattaccaccaagccaagctactcttttcaattaatatttacctacatttaatgaccttctaatgtcaatgtgtagttgatcttctcaggtattttttttttttttttctttgaggaacttatcaatttaatttgccaaattattctcataaaaccaattcctgtcaagtgcaaagaagacaaggacttcaggaacttttcccgattcgaagaaatattatgaatttatgtcacaaaagataatttgaaacaagttttcaaaaagcatcaaccgacgattttctttattattcttttatcaaaccaagtgtgttgatgacaatgatgaggggataagtgaacatgtctgcttctttgaagatatagatagtcttgaacccacagaaatgttaaagggcttctatggtactacttagcatctttgtaatgtgtaatattatttttggtgcaactcaattttaataaatatcatacaaaattactaaccaaaccaattatataatgagcctcctaacaatactttatcaataaaaggaaagacacatataatctcctgatatattgtttcattactagtcctagtacctacttctaccgactatagtactactgctatatctacccttcataatataaggtgggaacaaaaataaaaaagaattttctgaaaacatacctttaccctttctaaaagaatgaattagaaacttacaaaacttgctctattttttaggacctaaaagttaagtgatcggaatttcttatttgtgttcgtcattagaactttattttgatgtaattctgtttattttggccagtactttctttaaaaaaagaatgaattagaaaataatttacatagtattggttttagataaaatcatatgagcaagccaacaggaatgcaaattaactactcatttaagctaaacattaaaaaataatatattatggggatgaaataaatgagtcaatgacatcaggtgaaaatatttttgttactagttttggaaaatttcccaaaaccctccccaa

SEQ ID NO: 239366 - DNA, 2059 bp, Cannabis indica
aacgagtgaaataaaaaatgaaacaaaaaaaagcttaagtgcccataaatggtataaaggttgagctcacagaatcagatacacagcagtcccaaactcttgcactgtgaccaaagagggagatgccaacagattctgatggtttatcttctatttcccaaatacgagcgctgcaagcataaacaattaaaaagaggatttccaattgaaaaaataccagttataattaagaagctatgaatacttcgcataattttaaacaaccaattcacctacgatcatcagaaacagagaccagcttcgctccatcagaggaccatgtcaaacggaagattgaaccttcatggccaactagtttacatatatgaacagcttcataattataaaagtgagagctgggcatgccatcatctcgaggaaccattttccaaacgattatctgttcagcatccattttttttttcaaaaattgcaggggaattagaacataagagcaatatccctttacaaatttaatcaaaaaaagcatagggagtataggccaaaggggatgagcatacgctgacttctttaatttactgtaaacattaattaccaagattaaaactaagagtattgggtctccaccatatccgctcacatatgtttgtggcattgagctcaacaagcatgtaagcgtacataacaagtcaaaagctacaagaaacatagaggagtgctacaatgaaaaacaatgcactcagaagagtgggaaaacttaaaaatctaagagcaagtattatattggaggagctttcagagtaagaatagattaagcacctcattataaatagtaccagaggcaatacggagagcttcaagactgtcagtgtcaccccataagcgcattgaatataaaaggcttctatctacgatccaataaataatgtggaaaaaaaaaaggaaattcaatgcatatattagtaactttaagtactcgaacataatttgattagagaaaggaactactctaatgtgatggctgcaaaaagacattacatgatttactaaccgggggattgaacatgaagaaccacgctagagtttgacatgtcccataaaagaacagagttatcactgcatcctactacgagatgggaattggcttcctgttcctgagatgaactccaatgaccctgctttagatggatcaaaggaaagggaaataaattttcaatgtcaattggagaatgtgcaaaagaaaaatcgatgaacttgttttgaccttcaaaaagcaaacatccaaaacccaactaccaaacttgggcaaggattggagtagcgtcaagtccaggcctagctgggcaaggcctaagctatatagcttgactctcttttcaccaaagatggcaattttagaggaatgaatgttgctagaagaaattccgtgaacgcgaatgccatggaatacgtcgaaagagtttaccatctttcccagttccaaatcatagacgagaagttgggaaccagagcctgttagattaaagaagaagagaaatgaaagaaagatggagattgaattgagaggtaatcagtgtaagtaagaaataaagaataatatgaaattgaaagcgtaccagcaaggaggtaaggaagagaagaaagacgatgcgggaagtggagaagagaaagtgctgaaatttcaccaatgtattggctactttggagacagcatgaatcgctctgctctagctctaccgccatgattgtcttcttttcgttacagttaacaaactctaaaacccttcaaacagtggtaaaagaaaacagcactgactgactgttgtgcatttctctgtgtgtgtgagagtgagactgggacaaggactattggtcgtactcctcgtgtatgtatgtagttttagttaaaactattgtcgtttatagagtttatttgtagtggtaagtataaatataataattgcacaaaaaagagaaaaaaacgattgcggtgagcgtggatcgaacacgcgaccttcagatcttcagtctgacgctctcccaactgagctatccccgc

SEQ ID NO: 239367 - DNA, 1977 bp, Cannabis indica
ttttgggattggggaaactcattttgtggtctgtttggaccactagtgtcggcaagggtctaaactttgtctgtgcatgctcgccgttgagaaagaaatgaagagcgagagatagggcgagggggttttctgggcctgaggacggtgatgcatggtcctctcggggcatgggtgattggagcacgacgatcctgtcgtgccagtggccactacacaatcgcagaaggaagacagagagggtgtcgagtgaggaagaaagagaaagggaattagggtttccaattaggtttttatcattttcaatttatactctttaaattaaatttatttttatttttaattattattttagttttttttaaaaaaatatacattttttttatttactaattttttaatttctaaatttatttagtacggtaaaggtatggtgtaagtagttttgaggtctggtttgggattgtactttagttattgtttgctagtgcgttggttggttagtacgtaaaatttctttgttttttttttttttttgttttttttttttttttttttatgctaaaggcaactcttttattttactccacttcttggcccgctattatgttaatgcatgtattatgtggattttttattttttatttttgaaaaaaaggatatattatatggatattatttagctattttatatattaaaaatattgtatgttagtagttgaaaacatatgttaaataatgagataagaaagtgtaatatagaatttagctattttatattttaaaaattttgtatgtaaatagttgaaaacatatgttaagtaacgagataagaaagtgtaatatagaattttcttagccttacattggcgtctaaaaatatttctttattttttctatcttagagcaaattttcttttaaaatactccgtagtttggattgcccatattggtaatgttggaaaactttataacattttataaaggcactccattcatcaccaattattttcaatatgcaacttcatactttttacaatacactcaccctattctaaatatatttgtgtttcgggttatttgacaatgtacgtttataattgttagctgcattagtactggtagtggttactggtctaaagggttctgaagtgttaaggaagaagtctcttttaagcccattattttggcttatagagaaagtgagtcatttgtaactattgaaaacttacaaatgcaaatatatatattttgaaaaaaggagtgaaataatcttcatggccataaagcaatatacaagttacatacacttgagcgaccatatggttagcgatcacaaatttacaatgcgttatcattattagtttagcacatttctctacatggtggtaaaatattgataaactcttgagtccaaggaagattgtcaataactcaattgtagtcatgagaaatggtacatacattctggactttcttttacactcttctatttgaatttgctatgtggatttcaattattacttttaacattatatgttaagacattcaaattgagtaacttttaacgttatatgttaaaacattcaaatggagtgttgttattagcactcagcgtacttaatagtaaccgtaattttgttctatatggattagaaatttaggtggcgtttggttggaggtaatgaaaatttaaaatggatataagaataagtaatgaaaacagtttattttggcttttaagtaatgaaaacatcagaataggaatagaaatggatataagaataagaatagaatggaaaaaaatttaaaatgcataaaaaaaattgataaaaaattattaaattttttttatcatccattggaatggtctttccttccatttcaaaatggaatagtcattccaccaaaatggtggaaaggtcattccattagaatggcattctattactttaatatacaaacaaacaaaaaatgaaa

SEQ ID NO: 239368 - DNA, 2095 bp, Cannabis indica
tattttataaataaaattaaaaaaatcgtaaaaatacttaaaattctgtaaaatcgtatttttgttatttttgtgcatttgtgaaattaacccataaatatgttcatatattttgtaaagcgaacttcaattatagcccaactaaattttgggctcattatttttatcattgctgtctgcaactacatattttaaggtctttttctttctgtctttgaaatatatgaatctgaattccatcatatattaatgatacatacttcaaaatgtcaataaatatataattattgaatttcgagtcatgagttctgaaccatttatgaaaagctcgtgagatatataatatatgtatttttagaagcaacataatggaattcaggttcatattcaaaagaaagaaaagataacaagttttgagaggtgaagaggtcagataagtagtgacattaaatcttttactcaaaatgttatggtttatgatgaatgtgatcacatggggagtgtagtggcacaagctactcttggtctctttatgagtctccatcataactatcgttattgacttactgaattgtctgctgggtgttcatattatatggtacaaatggcaaagtaattgagaactaataaatgtaattgaaagactatggccaccgattttcactcctaacgtcccatttaatgccataaaacttctaattaatttgatgttacatagtttatttcattaatacttctaagttagattaatgtatattctaaattagattaaaaaaaataattatagtgtttgctctagttcagttctaattatttattgaaagaatatgaatgaatgtgtgcggtactaacatcattaagtacgtacgtacgctcttgttttgaataacaagaagtatatcgttacggaaatgtagtcaaatagttaaggtcacatatatttttatctaataattacttgacgattccttatattctgaaggagttgaatattttccttatcccacacctttttgatgacatggcccacactctcactctcacttaacaagggtgtgcactatcttttttctcaactagctttagttttgtttagttattcactcctcttttaggaccactaaagttctacacaacagaaattttgactcctaaaatgaaataggttggtattgggttggggctactactctacgattctatggagaatgtacttgcagtagtgtctaagcctattatagattgtttcaagatcaaattaataaatggaagttattgccttgctatagctctttgattggcaacaaacaaattttctactttgtttcattagttgcacatggccggagtcatcaacactaataaatttcatttccctttgtttgttaaatgttaaattcattttatattgctattttctcaaatcaataatcaacatatttattttaataatgataataatttataatgtaattttataaagtaataattcaattggagtataaaaataagtattagtttactaagttagcactcctaggtatgcacttatttgttggactatttttaatactttttctactctattattcaaaatagattatatttttttttttcattttaaatgaaaattttacgttataacatatatcaatttttaatatacatacactttcaatgtataacacacattattaattagaataaaatacatttaagttttattacttctccccacatgctaagaaacactattacattctcttaataatagaggtttcaagttcaaatcccttccaatatatataaatataatgtaaatattattttggattctgtattttgcaaaagttattagttagactctttgttttgttaaatgatataatagaccatgtagtttgtaaaataatacaaataggaccatgaactgatttttttcaaaataaaatttagttttaatccaatttaaatgtgttatgacaaaactgtttacattttctgtatctattcgtattatgaattgtctttaagttgattatattaaaaaagaaagttgtcgaaaattaaacgcagagtcttatttttaccattt

SEQ ID NO: 239369 - DNA, 1026 bp, Cannabis indica
attcaatagctgtaaatttaataacaataatgttatttgagcacattaattagaatatgtgttgtacatttttctttttattattattacaacttattttctctacattagtgagctttaaagattaacgaatcctacttaaagcttctagcaattataataaaacaatttggtaattgattttttttaataattaattaggatgagaattactcagccgtaaacactttttgatataacatatatatacataaacaccgctataagtaatggatccaataaaaagcatatatacctgaccaggatcttcagggaacatgcaattcctctccccatgaacctaacacaacaaaattttgcaatcatttattaattaatgcctaataattaaccataatagttaatttttttttaatcttcttttataaaaagagagaaagagaaagagattctttgctttggctttgggaagagagagaattaaaataaataagttaattttcttacagactgttgttgtcgcatgtttccagatccactgcccaagtaaggtaagctgagagcctgaaatattaatattattgggaaagaaaaatgagaaattttcaataagttaaaaaggaatatattgtgggaatgaataagtctgagaattataactggaaactagtttattgtaagcatagttgttagtgagaaaaataaaaaaaagagaaagagaattaacaaacatcacctcaatttgactctgaaggaatctgatgtacccaatagcttctaacaagacagaggctgtgtcagtctgcaaaaagaccagaaaataaaaagtcacaaaacaccaaactcacatttatatgtctctctttaatgcctaaagggaaaacccacaaaccctctttaacattttaatttttcttttcttttattattttgaaaataaaaaataaaaataataacaaaaaagttaaatttgagatcatgattaaagaaatgttggaatggaatctatgttaatgtgaaaaaaaa

SEQ ID NO: 239370 - DNA, 1354 bp, Cannabis indica
attaataaaaataatgagatattgaaggcataaccatttgaactatataatatgtcacacttgacttcacaaactaatttttggtcacaaaactaccaaaatgtcacttctgttatattatttatccttccgttagtaaattgttattaaatgctaaggttgattgtctgtgtgtacctaagtgcatacatgttatgttttgtttgatccacctaattttaaatatttaaataaaattaaaatacttaaattttttaaaaatataattaaaaaagtaaattgtatacatgacatatttccattcatccaagttattttaattacttaaatattataaaaatgttaaaagttatataaaaagttttttattttaattttcttccttttcttcttttcttctttcttcctcttgctcgatgactgatgctttctaaaatttgaaaatggaacaaatccaccaccacttatacaaaaaccccagatttgaacataacaaaaccaccatcacagctgcaaaagtttccaaatcataaaccaactcagaatctatttgctagagttttgagatttgtagaaatctataaacatcaaccacaaaaggtcaaaatatttctcaatattgaaagattaaaattaaaaatatatataagttgaacagtaacccacaatccaagattgtctctctcaaaaaaaccctaatagctaaccctgctgccaccattatcacaaacaaccatactgacttatacgtcttctcctcctccaaaacattcataaaaccagccaccatcgtcagtctcagaaagtccccaccgtcacctcaatcgctcgttgaaactgtgtagaagtcaacccgtcgtgaccactcaaccctgtgccattgtcgcctctgtaggaacgcctaaattgtcgtaaccgaaccctgtggacaccatttttgcgtctataattgtcatcatggatatgagaaagaagaatgaaggtgatgagactagtcccttgcattgtcctccaggcgtttgtatctatgagaaaagagagagagatgtggcatgtcaaatggatagggttggttgccttggtagtggggctcgcgaatgggtgtgagggatcgacggtggtggtggaccattggtgaggctgaggggtggggcggcttgttagggtttatgcactaaaattaagtattaattagataatatatgaaataagggtacaagataaatgaatatgttaattatagaaatataattaataaatatttaaaaatttcatactcatgtagagtaggtataatattgtaagaaagtataagaacattaagatcatacaataaaataagtcgagagtgtat

SEQ ID NO: 239371 - DNA, 2643 bp, Cannabis indica
agggtaactagttactctaaaaaattttctcatattttttaaatttttttaacagaataattttagaaaaaagaaaaaaaaatcataattttgcacattgtataataactcttaaaatatgtaatttccatataagtaaagataaattttcattttataatttttatggcaaacacttacaaaatatatttttgggggatattttcataaagacctaacaataattaaaaaaaaccaaaatacagtcgtactaaattttaaaaatatatttacaatttataaattatatttataaaaaattgcaaattatttgatggtttttacattagtttttttgtgtttgtagtcttatttttttttattttcttattatttatattttttatgtttttttttttggtttataaacaattgtaaaattgtaaccataaaaatattaaaattttgccaaatttgtgtatttttttttttcatcacaagttacattattaagtccaactatgcaatagaacatgggccgaaaacccctaactgacatttgggaattataaaagcccaaccttttatagactttcaacagttgtatatattttggtgtcgtttttcatatttaagtgtcgttttgtactttaacactgtcgttttgatcgtcagcagcaatactggattggggtttgtttgtgtaacgaaaacgaactgtgttttgtgctttttcttcttcaattgcaaaatcggcgttcggagctcggaactcggcgtcaatggcgtggcggccgctgcactcgatcgtcatccagaaacttctgagcacgaacgcacagttagggaggcgtgtggtggctgaccatatgaaggtattcacttacggcaaacgaaatgacttagccgttatggactcagataaaaccctaatctgtctccgcaacgccgccgaatttatggcctccctggcacagcagaagggaaagttcatgttcgtgaacacaaatccactctttgacgagattattgagcagatgacgaagaagatcgggtgttattctccttcgatgaactctctatggcgaaccggtgggtttcttactaatagttacagtcctaagaagttcaggtctcgtaacaagaagctctgctttggtcctacacaggctccagattgcctcgtcgttttcgattctgagcgtaaatcttctgttatccttgaagctcatcgtcttcggattccaatcgtatcgctcgtcgactctgctatgccgttggattactactcgaagatcacctatcccgttccagccaatgactccattcagtttgtttatctcttctgtaatctcattactaagacctttcttcttcagaggtacgatatatatagaattgagaattctaatctgttttagttctagaaatacagcattttgattcaatttctttgacattattatggattagaagatttggcttgtatgaattggtattggtttggtactttacctgtttgatgttttgcccaactgaaaattttaacaaattttgaaactttttgtgtgtgcagtggccaggataaggatcaaaagcttataacttcttcttgagttgagacttattcttcttcgggtaacaataataatgataatgataataatcagttttgtctacatacaattttgtttggtttttctcttaaatcttttgaccaaacatgagtggtaaaagggtgtttattgtgctttcacttttctcaattcactgattgaatcctttattattgttatagttgcttaggaaataggaacaatgacaacaatgttgggtttaagtgtagtaaattttacattattttatgtttctgaatgtttagacaaagaaaatgtcttatatatttgaaacttgagctgggaaagctcttcttttctttcctttctttagttaattatccaatggaataacatgtatgccattgttcaatgttttattgctgaagaagtactgagtttctagtttttgtgatgctgttttgtaaggtttctcctgggagactcggttgctgaccttctctggtttatgttcattttactaggaaaactagatttgaagctttttccgtcttgttcagtgtaataatcattaatgttggtggtaaatattcaattataccttctttttattgataatgtagcaattagtattaattagaggtgtgattattttgaaatggaagtagaaagtaaatacttaagaaatttggaaatcctaaagtaaactatagggttaaaaaaaaactatggggtttgaaatttaactttagagaataagtaaataggactaagtttaccactagattgcagaaaatataagttttagtgaattaaattgctggaaagctaagtgggatacatggaaatagtttagaataaatggattcaactgaaaaataaaagatggttcagtttagagtgactgaacatttgtaaaatcatctttaattgttagtttttgaattctaaataagtaaaaacatgaggctttaaacaatggaaataaaaaatacgagtattaggagtttcaggtttcagtaatgagatggtagattatgaaaaatcaagttgagtattgatatgatataattaacagggccagaga

SEQ ID NO: 239372 - DNA, 768 bp, Cannabis indica
caacaacaccttacctcgtcaaatttcataaaattttgagtatcaagttccccattgacctctggtttaaatgcagcctccatctcataaagttgatcccatacgatatctttgaaccaaggatgagcctggtcaaaattaagattaattagtatatacaggaaacaatagaaaactaattgcaagttgcagttaattggaaagagcctactttaatttggtcagttcctcctgtaccaagtctatgctcaacatcacagagcaacctactgatcagatcctttgcttcaggtgacaaccttgcctcctccggaaatttcaagtgatttttccaatgcacgatctgaaatatagtagacagctaagttaaatgataacaaacaaatgacaatgttaataaatttgaattgaaaatcgttacagaaatcatgcagaattttaatctcaatagttactctgccagaagcaagggatctcaagaaaatgacaaaataattataagaataagagaagacagaaaagaagatgaaaaaaagttacgggaataataccctcatttagccatacaactcacaccttcagtaatgagtaacatgtaatgcaatgtgtcaaactaatgtcataagtaatagaatttccataagtttaggcgcacatatgatattaaattgagcttcgatgaggtgacatagtacttcaatagtttacgtatgtgacatgtcaaatagtgaggaagtaaacctttctacatgctgtaattggatcatc

SEQ ID NO: 239373 - DNA, 1728 bp, Cannabis indica
tgccttcttcagtttgacttgttggtgagtggttgtcttctttaaataatgttctgatatcttttgttaaataatctacacatagggtcactgagtgttgctagaggattttgtttcatgtcatattgtatttttaatgagctgaatcctgtggatttaagaacattgtaatgcctgattgtgttcctaatgaatggttcaaatttaccattaaaaaaaaaataaaaaaaagtaagtaattttgataaaaaaaaattaccaaaatttaacttttcagactaatttaagtgggcttattgcttctcgctggattttaactgtagaagcccacatacatttactgggccagactaattctcaatcggactttcttcccatttgaaccggcggcgacggtatagggcacgttaccgtgtggagcttctgagccagaccaaatctcctgaattctaacgcagcctgtactactacatacaccggtgagcctttctagctcatttgccttacgcattattcgcttttcttttactgggtttgattagggttttccatttcaatttgggggaaacattataaacattcaagcaactggtaattaattctctagctcagttgcttttagttaatttcttgtagtttgatttgggttcattctatttaggcaaaaatcattcccaaactggttctggtataaattttcattaaaactaaaaaaaccgtggttgagtgtttaattgaaaatcttgtgttgtgaaagttaactcttttaattttgaatcttggttgttttgttggcgctattattagatgggtacaggagacgaggttgttgaaattgatagcttggagaggggctgttatcgggtactgataaaaatggagctgaagacgatgatgtgttgtattctgcttcattcctagagatggaagataatttgttagataccaaacagctcaatgggttctatactcgttgcttttgattctggcatggggaattggcttgttcatgctgctttatttacctgttcgtaggtatatactacggaaggatatccgatcgaaaaaactctaccttactccaaactccattgtctataaagtgagtttgctaattggatatgtacactaatttctttttaccaatcttgataggattggtacaaatgtttttaagtgaatgtactgcattaaagtactttctttaaacaagaaaatgaatgcatgtttgaaagtgatcattactccgtaccttaaatagattgtagcttatattttgtacgaacttttgtcattgttgatcttgattaaatcatgctcattttgttacattttaataatgccatcttgatgcagttcaggttgctaggccagtgccattgccattttttggggcattaaagaaagagaagtatattttgttaccatcagttgctgacatagtaattgagcaaggtaaaaatgttggtgtgttttcttttactgtaaaccacatccttttatctcctcttcagtacctacacttgttatggtaatgttatcttctgctataatttcaatgagtatttgattaaagaattaaattatgatgggtacggaaaaacttgtatgttgacagtcacatttgaacacctaatttgattgcttttatcttaactggtgttgaatgaggaattcagtctaacttggttcctcataaaacacatcatataataatgtaaaatatcg

SEQ ID NO: 239374 - DNA, 4630 bp, Cannabis indica
ttgaattggtcttttctgcatggcgggactgaaattgtcaatatacatattgttattctttcttttacttatttttctccaatgttcatcatgcagatccctcgatttgcatttgaaaagtttcctggttcacagccaatactgacgacacaaatgatgttggtgaatcaatggcactaggccgaacattccaagaatccttccagaaagcagtgaggtctttggaatgtggtcactctggatggggctgtggtaagataaaggaacttgattgggacttggaccagttgaagtatagcttacgtgtccctaacccagatcgaattcatgctgtatatgctgccatgaagaagggaatgaagatagatgacattcatgaactgagttacattgacaaatggttcctcacccagcttaaggagctggtagatgtagaacagttccttttggctcgaagcttgtcagatctaacgcaagatgatttctatgaagtgaaaagaagaggtttcagtgataaacagattgcttttgccaccaagtcgactgagacagaagtacgacaaactaggctatctctaggtgttgctccagcatacaagcgtgtggatacttgtgctgctgagtttgaggctgatactccttacatgtattcttcatatgattttgagtgtgaatcatctccccaaagcaagaaggttttgattctggtggtggaccgaatcgaattggtcaggggattgaatttgactattgctgttgccacacatcctttgctcttcaggtttgtgctcttttttcgattatgtttgtttattccttatgatttttggttctatctgattttgtaaatgttttgcttgttctttcatccttttcagaaagcaggttatgagacaattatgatgaattcaaatcccgaaacagtatctacagattatgacacgagtgatcgtctgtattttgaaccactgactgttgaagatgtgctaaacattattgatttggaacgtcctgatggcatcattgtgcagtttgggggtcaaacacccctaaagctggctctaccaattcagaagtacctagatgagcataagcttaaatgtgctagtggtgatgggaatgtacgcatttggggtaccacaccggattcaatagatgcagcagaggacagagaaaggtttaatgcaattctcaatgaattaaaagttgaacagccgaaaggaggaattgccaaaagcgaagctgatgctcttgctattgcagcggagattgggtatccagttgttgtccgtccttcatatgttttgggtggtcgggctatggaaattgtctataatgacgaaaaacttgcgacctatcttgaaaatgctgtaaaggtcgaccctgaacttcccgtgcttattgacaagtatttgtcagatgccattgagattgatgttgatgcacttgctgactcttatggaaatgttgtcattggcggaataatggagcacattgagcaggctggggttcattctggtgactccgcatgctcacttccgacaaaaaccatcccatcttcttgcttggagacaatcaggacatggactatacaattggctaagagacttaatgtgtgtggcctcatgaactgtcaatatgccattacagtgtctggagatgtgttcttacttgaggcgaatcctcgtgcttctcgtacagttccttttgtgtccaaggcgattggacatccgttggctaaatatgcttcacttgttatgtctggaaagtctctttacgacttaaatttcactgaagaggtaatccctgctcacatgtcggtaaaggaagccgttcttccattcgagaagtttcaaggttgtgatgtattactagggcccgagatgcgtagcactggtgaggtgatgggtattgattacgagtttcccattgcatttgccaaggctcaaattgcagctggacagaagccaccgctatctggcacagttttcctgagcttaaatgacttgaccaaacctcatcttgaaaagattgcaaaggccttccaagggcttggatttaagattgtttcaacttcaggaacagctcatgtccttgaattatcaggcatcccagtggaacgagttctgaagttgcacgagggtcgaccacatgctggcgatatggtatccaatgggcaaatccagttaatggtgatcacaagctcaggtgatgcactagatcagatcgatggacgacagctgaggagaatggctctagcttacaaggttcccgtaataacaaccatcgctggagctttggcaactgcagaggcgatcaagagcttgaagaccaacaccattaagatgattgctcttcaggacttcttcaatgtccagtccaaaactcccaacagtagtagtaagaccttctctactgtacagacacagagtgcccagtactagtagtaacaccttcctacattggtttggttaaaaagacatttactttattttgttgtctgaatcttttcttttactgactaagtgaatggttttcatcttcattgtataatcagttaatcacttttgagttgaatctcatctattctgtattgggtctttgttcttaattcttacatttcccttaatagaaataaaaaagtatttaagtagcattatgctctaataatattgttttaggataatgtcaagtctaaccaaaagaccatctatatatatatatatataattctcctgatgacatggcatgttgaattattatgctctaataatttgttttaggtatgaagtcttgttgaattatatttagtacgaaaccatattatttttgtcattttacatgttggttagagatggcctaagatgaccactaatgaaacttctaaagcttatttagaagaaatcataccactatcagaagtaggatcactttctttttcttactcatcatcttcttcttctttggagccctctggaatttccaccttgctatttttgatttgaagcagatatgaagatcatcatgacatggattagtctttatatcgtgttttggtatacttggaagattgttagttcagactaagcaacaccaaatttattcattacatatatataatttcatttcaacaaatgatatattcagaatatattttttttttcagactagctgttggaataatatcttatagaatcagctgcttaaagagaagttgttgaatagttttatctttgtctaattgttttttagtattggtatgcaaaattggcatgtacccaatgaatatgaaatgatgatcttcaaataaggccattctttcaatataaatatattatgcatgttgaatctttcgactacctaataaagtgtacaacttccatcagtccatgttacatgttattgtagaatttcttgtacttttgctgtggttgaagtctattctttaacagaaacaatgtttcttgccaaaacaagaaccgaaatcttgttttatgaaactacattgtgctctccatttatattaaaagtaaatgctaaacatagattgatgaataaatactattttgaatcctctattttacaaaaagtattaatcatatattctatttgttaaatggataaataaaactgtgtattttcaaaatagtacaaaattgagcccagggtgttattttgtataattttgaaaaatacagtatcttgataggtaatgttttcaaaatacatagttcaaaattatatttaccctaaatatattgatagatttcatagactataaattttggatattggaaacacaatgcactagtatgaatattgtttgtttttaaaaaattgtgaaaatgttaacactttgtgccaaaaattttattaatgttgatgctcagattaacatagtagcattcattccttgtgttattctgattaaaagttttgtaatctctgttgaagctaagcaaaatctaaactacatcttctgaatctatgcaagatgctattaggtgttgaaatatgcaagcatgagaatagtattcaaaagtgtttgtttttttacaggctaaatcatcattaatgttttcttgtttggtctcaaacatcattaacatatcttgctaacatagtcaagatactaggtcttataaaatttggatgatcattttgaagatctttttttctggatagtcttcatttcacaataagtatgaccaagaattaagaaaagttaccaactttaaattaaactaaatcttccccctttttgtgcagattgtcaaaagtttatcctttaacaattgctcaaatcatgtttgtggccatgtgcttccttttgtttttgctaagttagaattctaggatgtagatcagtcaaattcgaatattcactttggtttctgaggaattatacaaaaagactatttttctttcaaaacttataaatttgattcctatgttttacattgtttcttagcattcatcacgccaacattcaatgtcttgattcttttcatgactcacaactttaccttatcttgaccaaaacagaagataattttggtcaggtaattaattttctgcttattgggaacttggtgatttactcttaccataaaattcaaatattaatgca

SEQ ID NO: 239375 - DNA, 1102 bp, Cannabis indica
tttttttttcttttttgaatagtgggagggaaatcctatggttttttgaatctgaattgtgttggcaagatttcgattaggattaaaaaaggaatttctcataaatttgggaaaaaaatttaaaatttagttttatgtgggatagaaaattaatacaagaaaatatgagatcaaaaataaacaaaatttaaaatatgggaaaccaaacaaaaactataaataaaattattaaaaaaatctaatgacaaatatggatgaaaaagtcgacagagcaaacactggcaccaaaaaagttgacagcactaaaaagtcttgaaaaaattattgtcgtcaaaaaagacatcacagttacctaaaaagtcatcagaaaaatcaatggagttgtcattgtcgtcgaaaaagttattaaaatttatattgtcaccgaagttagatgtctcatacataaactaaaataaaaccagttccacaataaaatgagtaaaaacaaataatacacaataactcagaaaccgtttataattaaaaaaaaagaagaaatcaattctaaaaatactgaaacataaaagaaaaacagaactagttccataaaaaatgagtaaaaacgaataacacataatgcttcagaaaccgattataattaaaaaaaaaaaaaattgagaatcagttccaaaattactgagacataaattaaaatagaattggttctataacaaaataagtaaacaaaaaaaatacataataacttagaaaacggttataaagagagaatcagttcaaaaaatattaaaacatatcatattaacaaaattggttttacaacaaaacaaacaacacacaataactcaaaaatcggttattattaaaaatatatatatataaacaacaccaaatcacatcacaacaatagtgtgtttcttaggagattcctttgaaataggacttttattctttaactaaataaaaaaaccatgtgagaaacaacataaataaatgcaacatgatctctttttttttttgaaggaaatgcaacatgatctcttaaaatatgttggttagaaaaaataataaaacaatataaaaaaattaagaacatgttaaa

SEQ ID NO: 239376 - DNA, 1466 bp, Cannabis indica
agcactgcaagaagcaggaggatccttctggaggtccttcaactccttgttgatcctttttgaagccatacccaaaacacacaaactttcccctttattaattcaacaactctgatcagcaccataaacataatcaaaacatgttcttgttataatacataatcttaaattaatcgtaaattccagacttaattaatagtaaaaacagagagcttgctcgtaaaacaacgatcctatcatcatcatcatcatcatcatcatcatcatcgtattcagggataatatatataaaataaaataaagaacgaatccctaaatagttatttaaataagatcatcataataaaaaaaaacaaatgaaaaaatgaattcaaatgaatgattaaaagaaagaaagagagaaacctgaattggaaatggtaggtagggttttcagtaatgaaatcaaacacagagagagagccaaagcgttcgaaggaaataaatcttactgatttgtcacaatcataactatatatatatatacacatatatatacactctctctcactcttacacgtggcagtgtaatgtatggccacctagatacaaatatgtcggtttatatttttacttcaaaatcgagacgagaggggatttcagttcctcctatctatcgactctaattctcaacaacctccttcaggttatttttcttcttctctaaccctaatctatcaattacacaattgaagtgtttgaagttgattgtgcgttggattgaggaatcattatttggggtgatttttatttatcaaagaaaacaactttagggtttgtttgattgatttgggattttgatgaatattggtaaagttttgtttttcgggtttgatttataaatttgtgaattactctgttgatgagtctgatatgatcagcttagagaagcataatgttgttttgacaattaagtgaagagacaatttgtgttcttatctttgcatccaatgacatagctatattaattatacattatttagaacattcttcatcttcaactttatcaatagaagatggtttgggtgttatcttgcattagacactaaatcataatcctcagctaatgtagtcttctcgacctttgtttaacgagtttcattggaccttttctgaagagtttagtgagcttttttctaaactcttctgagctatttgtttgggctattttgagttttattttgtaaatttgaaaagcttaaaactaaataaaaaagggtaccataagcactcatcactttcccctcatcttccactctatgcacaatactctcctcctctcaccccttctcttacttttaaacctttatgcatttaattatgattttaagacttatagctagtaatttcatgaattttatgtctttattatgaaattatgcgttgtttattatgaattttatgatatattgttgagtaaactgcta

SEQ ID NO: 239377 - DNA, 1694 bp, Cannabis indica
atttttgtaaaagttaaccaaaatttcagtatttttgtaagtttccctaaaaaattgtatggaaaacactcaatttaaccaaattttctatattaaccttctaaacatatacatattttaaaattaatatgagatgtctaatcgtgtgtcagtttctttacttctattagaagtcattacaatattttctcttttcataaataaatgctcacttctttagctagagaagaaagagtacttggaaggcatgtgtttatgaagaagtttctacaaatccacaaccccaaaaggtttgtttgttctttcataacttaccttattttatcttggtagaaccagaagttttagacagattcactcagattgagccttaaaagacttatcttatgtttttgtgttgtgcatgtgattaatgtttgtgttttgagacctattgtgttggtctttggaaagtgtcaaagcccttaaatttctattctcataacactaataataattcccaactaattaataaactttacccgtttcaaacaagaaatcaatgaatcaatggaaatgttgggaattttccaaagaatatattgtgaactttattgaaggaataaaccccttattttaaacataatgtatggcaggttaaggtaaagaagtgtttttttctttaattcaacaatcaacaatgtctaccaatttttctcctgttacacctttcgtaggatactcttacaagatgatctatttgacaataagcttgtaagctttcctttttagttattttaatttttaggcttgatgatatataattacactaacttttggcattttctttcttccatgcatgcttaatttctagaaaatttcaagtgagtctatgctgaaatatgggactagtactattgatacatcaaacccaattgtcctaaaagttcctagtggtggagcatgggaagttaaattgaccaaatttgatgatgatgatcatctatggttgggtgaaggttggccagaatttgcaaggcatcactccataaaatgtggatatacattgtattttagatatgaaggccaatctagattttatgtagtcatagttaatgaaaatggatcagaaatagattaccctgttaatgattccaaacattttgataagataaatcccgatttcgataagctactaatgcccctacctgagaaagggtgaaaaaaaaaccaagatcttcattgtgatgaaattatcttcaacagtcagtcagcaccatttccttctccaaagaaaaaaggtttggttaaattgttttgtattgtatattacatgtttatgttagtgttttattgacattgtgattttgcataaatttacagggaggtttaaggcttgtgctaaatggggtgatggattaggtgaacattttgttgttcctagcattaagactttaatgactataaaagagaaagaaaaagagaaagatttatctaggaatgaaaacttggcatcccaaaatccatttttcaagtctgtcatacaaaaaaggcatttacatattcaatatgacatggtaagttttctttgtaaattggataaaggggtcattattttgtctttatttatacagttatactaatttcttacttgttttaatgattttaggccttaccaaaaaaattttggagacagaatatgaatgaaaactctt

SEQ ID NO: 239378 - DNA, 1421 bp, Cannabis indica
gcttctttttcccacgatcctctcggtcaccattccccgattatcttttttttcaaaccccatactcctatttcgatatgacagtagcagggttgatagtcgctgtggagctcaaatgacacttcattctgattctttttaactgaatcttctcctcttttgctcaactccgatctcatccaattttagaggtagaatgatggtttcttatcttcattattatattttatgattcaatactatttaatattgttattttttctttctaattaacagaaagtttgattgaagaaaaaaaaaattgattctagaatttattattttgatattgtgtgataatgttttagttggtatatataatgtttgataaaatgtctgtgtgaagaagtgattattgattaatttatatttacagcacttcattttgattttccaatgttattgtgaaactatttctacaattatcttctcaacaagttatatatcaaactcatttacttacttagcatgagatttggtttgaaatcttttagaatctgccattttcaaagttgattatagcaccaccaatcacagtttaaattgcttgcaaagttgcaattgcaatctcagtttttgtttctgcagttgtagttgaattgttagttttaaaagaagaaatatctaattcaaatagagatttgaatttaaacactagatatttgagtgatagagattttagctgtaaatagtgagtaagaaaactttcaacaatttagaatcacttgagagagtcaagaggagattgatgagaaaaacaactataaggttgcaagtgattaaaggtgttgtttgtgaagtatggttcttctaggtgtcaatttaattatcacaattgcctaataagggcttttttttgtctcggttattagaaccatacttagatcgaggttgtttctttctgtctgttttgctgctatcgtcggaattcttgagtggtctaagagtatggctatatgttttattgattttttttaatctatagaacattttgcttatttttattgcctctgtattataaactcttgatattgagattttcatttgttaatgcaacattattgaatcatatttttaatgattgcctttgtaacgaagggcttgctttcttttgttttcactgattctaagattggtgtaatctgtgagaataatgtatgaatttggggtaaggaagcatttatattgatattgtttataatttgcgaaagtgttttttagtccctttcaatttgcgaatacaatttggttcaaaaaatttatgaatagaaatggaaatttttttttcttttcaaaatttaaatttgtttgtggggagatggaagaaatggaaattgagtaagaaaacaatgatattacgagcaaagcaattgtctgtatag

SEQ ID NO: 239379 - DNA, 2990 bp, Cannabis indica
ttatgattttttttgtttaaattgaaggactaaaactaatctaaaaacgaaaaaaaaaatataataataatagtctattcttaagctaaaaatgtactaaaaaattagattgcaaaacaaaaactagcaacaaaataatcaaaaacaaataatttgaataacacttaaaatatagataaacaaagtgtacaattttttttaatcaaccagaaagaaaaaaaaaatctaacatatatatttataattactaaatgtatagactttgatgctatgagacacttaatggcttcattgtggcagccggggaagggagtgtatatcatggaattggagactaatctaatcttttccaattttatcatgaacctgatattcaaagtgttatagatggtagtccttggacttttaataaggatccattggtctttcataagctgaagattgaggagaatccgagaatggttcatctacacaagatagacatgtgggttcaaatacatgatcttagaaccggatttatgatggagaaagttgtgcgtagtgcaggaggatatgtgggagcctatgtgaaatctgatccgaaaaacttcaatggaatttggcgtgattatttgcgggttcgagctactattgatattgagaagccattgaagcgtcgtatgaagctatgcaaagaaaatggggaatggatttgggctaatttcaaatatgaacacttgcctacattttgtttcatttgtgggatcattggtcactctgagcacttttgtcccaaacgtttcgacaaacattttgatcaactcggtaagccatatggattaggaatgaaggcacagatgagaaggaagaattatctgatcggagcacaatggttgaagacgggaaacgaagattctacgtcgacaattggaggttctgtttgccggtcagatgctgaaaatccagttgctgatgctacaaaaatcatggagattgattccatgatattaggaaataaagatgataccataccagctggagataattgctatgatagtaatgcgaaagagagaggatcagggaaggctggggggaatactgatagcaataaagtggaagatatagtcaaccttagtgagaaggatatgacaattatgctggaaaataagaagagaaggatggatatggcaactttgagtggtcacgtggctactggcaatatggaaaaccacatgattgaaaaggaaagtatgattgaaaaggaaagtattgttgggtctgagccaaaaaacatgttaaaggtgggtcttggttcccaagcccaccaagcattatgagtctattatcttgtaatttcaatgggcttgggaacccatgggcctatcaattcattaagggccttgtggtccaaaagagacccaattttgtttttctatgtgaaactttttcaaaaaaggatgttgtggagaagcttagagtatcacttgggtttgatggggcattttctgctgatgttcaaggtagaagtggaggagtggctatgttatggagacatgaggaagaagttcagttgcttggttatggttcaaactacattgatgtatcaatagatgctagggagagtgggagatggagattaaccggtttatattcggagccaaatagaacatatcgtaagaagacatgggatctcattagaggtttaaaagataagtatgatttgccttggtgcattattggcgatctcaataatgttacatcgcaaaaagataagcgtggtggtaatccatatccgaattggcttattgagggcttttgtggggtgttggatgagtgtggactccatgatctagacttgagtgggtacccatatacatgggaacgtgggcgtggtacggatgattggattgaagttcgcattgatagagctcttgttagtcaaaggtggctgagtatgttcccttcggtcaagttatacaatctggaagtctcgacctctgatcattgtcctttatacgtgatgcctgttaatttaagccatacggttgctactagcaaagtcttccgatttgagaattgctggttgaaagagcctctatgttataaggtggttgaggatacgtggaatcaatatggagggagctcgattatggagaagatcaaaggttgtgggaaggttcttattgaatggggcagagattactcggggaattttaaagaaagaatcaaggagtgcaaagctgaaattcgacactggaaaaaggggacagattcagtggccattagcaattataaagctgcccaaataaagctcaataatgtgttgctacagcgtgaaattttctggaaacaaaggagtaagcagttgtggcttagggagggtgatcaaaattctaaatttttcaatgccaaagctacttctaggaggcgtaacaatgcaatacagaagctaaaaaatgatgtgggagcttgggttggatgggaggatgagcttccaaatgttgttactgcctatttctctcagcttttgatgctaaagccgtggactatggggctgtaactgcttgtatacagccaagaataataaaagatcagaatgctcaaagggttggtgatgttacagccgaggagattaaaaaagccttgttccaaatgcatccataaaaatctcctggtccggatggaatgaccccgggattttataaaacattttggcagattgttggtgaagatattattaccatggtacgaacttttttctctactggagtttttcctagtgatttaaataagacaaacattgttttaatccctaagaaaaaactccctgaacatatgagtgatcttaggccaatttcattgtataatgtcctatataagattatctctaaagttctagccaatagattgaaagaagctttacctgaacttacataaaaaatgattaatagcctaacttacataaaaaaaaaaatgattgaacttatataaaagatactattaaatttgga

SEQ ID NO: 239380 - DNA, 3223 bp, Cannabis indica
agtttttgattcttttttttttttaaaaatcgatttcctttttgttttccttcatatacttatttataccaatttgtatttcatttaatctcacaaattctttctatctacccgatttctctcctctctattattttctctctttgttttcattcttactttcaaaaatccatggctaaaaaaaatttagggcacccaaggaagatggttgaattagaggctgctccatcaaattcctcgttagcgccagcataataacctcccaatgttgcaacttccttgatttcagttgatttatcgcctccttggtgtgaatcgaagaaagcttcagttaagaaagcttcatctttaactctttcttccagcaagagcactcaaaacccttgctcaaatatctatgaggcacacccaatttcccaagattactaggtctagtttgaagtcttcttctccctctattgagggttctctttgttgtggttctcattcaccacctattgctactcatgtggcttctacaacatcaaccctacaaggtccttcatctctaacccgtgcccagcaagcctctcttgaaaaggaagcacgaatcaaaagatgtcatgacagacctatttgtgcttctaaaaagctcaagctcaataattccttaccctcctcgagtgatgatgaagatcccatggatgtgtcttatgaggaatctgattccaaagctgagacattttcatctgaaaaagcaacttttgtagaggatgatgtggtctcttctgaaagtgagcaagtcccaactaaagttgaggaagaacttgttgatctggatcctacaacatcattaccaaaatctggagcagtaacccctcaatttgcttctgcagcaacaaaggaaaaataacctacgaagggctctttctctggtaacctctcttcctctcaatatgtcaattcaatatttttttataatgacaatcagcgtgattgaaaattctacgctacccgtaagtttgaaaataagaggaattttgatttaagtgctcatcgagtttatggcattgtgaagtgtgttcaatatagaaatttggagggcatattgactagttttgaaggttatgttgatggcatagttaaggaattttatgctaatttgactaatgaattgcttgataaaaaatctaagttctttgctagagtctatgtccatgggcattggttctcttccattgaagatgatattgccgaagtcttgaaattgcctaaaggtgtaaagagtgatgatgtgtctatggatcgtgattgcattctcactaaaatcactggtgaacaagttgaatggcttgctggtcaaagtgtccgtattacttatcttacttatggcactgcctcactaaagtggtttgctcttagcaattggttcctgaactccaacaaaacgatagtgtctcaagatttggcttttcttctttttcgaatcactataggggcaaccattaacttttcttctctcatcatggagaaaattgtttcctttcgttgaggtaaaaaacgaaaccataagctcatttttcctaacctaatctatgaggttctttcctctcaaaagaatatgatctttttgaatgagacacttgagcctccccttacttgaacaatttttcaaccctcagagtattttgatggagcctttcccaagcgccccaaggcatccgttggtgcaactccatttgttgttgatgcaggttccaattctacttctgcagatgtacaagaagtcaagcaggatgtgaccttgatgaaaaatcgcttggttgccatggagaggttcagtaagaaatgtccaaacaattgtccaccttgatcaagctttatgggcttaagttttgtgttctctttcctttactttttcttttggtgttttttgaaggacttgttttaatttctttttttgtctttgtcacttatagataaacaaaaaggaggagtaatggttttaatttcttactttgtatacttaactctggaccctttttcctaggagagttaaggtttgtgtttgagttaaactttggttaaagttagctcttgctctttattatggtttaatgttgtacttcttagggggagatttcttgctttgtatactcaactcttgacccttttttcaaggggagttgaggtttgtatttgtgttaaactttggttaaagttagctcttgctctttattatcgtttaatgttgtacttctcagggggagttgttatgtttgttttgctaacttggtattgcgagttcttgttaattaaaaatattttgattatctaaagtaccaaagagagagattgtaaagtcttttttggcaaattagttgtcaaaatattttctaattaatttgtgtttttattaagcaattaaattatttttattgtgataattttatgacctaattgctccatttcttttatggccggaaagatctattgctagctgattgtaattgtttaggaagcttttcttccaatagaaaaagttctctatatggaaaagttgtctatgtttgggaactttgacttttcttttatccttaatgatttagatttttttttgttaagattagatcaaacaaactgtatttagcaagtttgaagtctaaattcgtgttcgtggtccaatttggatagttttctttctggttgatttgttgctgcagagttcaattttgatgctacaaattaggaatttttttgagaaaatttgtacagctgggaaattatttttgtggctgtctctatggttgttatgttttataaatagaacctagagagcagccaaaggactcacctcttctagttttcatttttacatatttgcttattgtaaggggagagttctttttgtgagaaccttgttgctcagctaagttttaatgtttatgttattgttcttatactgctcttaggatcggctaagcaacttgattgaacaagagaaaggtcttcagtagaagactagttcaagccttacttcaggaggaagtaagcactcactcatcaaagacaagaggagttcattattggtggtgtttcaaaatcagattcgtgacgtgaaatacaaaagattgcagcaaagatttagagggagtttaaacttgtttaagtcaattgtatttgtaattatttgagactttactaattgattttattctctgggcgtggccccgtggactaggag

SEQ ID NO: 239381 - DNA, 2252 bp, Cannabis indica
tttctttgtatttccagttttttttaagtattttgtgttcctgaattgagtgctcgcctttctgggttgagtatttgcatatattctctattactattattattataatttattttgttgttgtacaaattccttcaagaacatttggcgccgtctgtgggaacgcaatacttttttgatttagaaggaaaattactatggctggaaatcagacgaatggagatatcaacaatggatcaatcaatgttgggacgaggaatgtcccactctcggggaaataagacacctcccgtcgacaccatcaatggcggagtggggcggacaaacataacgctgctcaatttgttcccagatactgctgctcacgttggggaaacgtccacaccaacagccacagtgggacaatttccacctatcacgcccgtcgtggtgtccgaaggcattgttcaattgactactgatctgtacacagcgatacaggaccaattgcgggccttgcaggctgaaattgatggacgaaactggactcgatgtcctccttgagtacccaccacccactcgaataatccgcaggtaactacttctagacaacgagctaaccgtactcgcagggagtgaaggacaggtcaagaagggttcgatttgaatcagccaacctcgagggatcagaccgcacggaacctcaaccgggaggtgcaactagaagaggacccagaatgacgtaatccatgaagtagaccccaaccgcggaatgaggagaatgacgctgagtctggctcttcgtcttcgcaaagtcacaccccgagtctgtacactaggtctggtttggtggaaacaccacgaggaggaagataccaggttcataggggtgaccttcgtgatcaccttaacgatgaagagccttgtgatccccagttaggagatcagggcataaataatctcaccaacccacctactgcatcagctgcaactactgggatggttatcccatcaaatatagccgttgtagcaactgcacccgcgatgactcagggaaacacctcccttccaaggggtatcgaccagggtattcttttgcaggctttaaagataatcgagcagcagagaaagcccatttacaaattgcatgggacttttccttttaccacggaagtgcgacaagctcggttgcttaagggattccggctgtctgaatcattaaaatataaaggtatcactaaccctatagattatctagagaaatttaatactattatggaagtggaccaggtaccctagcttgcggaatgtcgcattcttgcggctacactggaggataatgctcacgattggttcaactaattgcctgaagcatctatatcgatgtgggaaaccattgtcgaccttttcctcacacagttccaagcaacgatgacatataggccaccctatactactctggctaacattaagcaagacgttggtgagtcactacaagattattttaaacgttttaatgctgaagtaactaaagtagagaaggcccccgagtcttcgttagtttgtatgctgataacaggtgtcttgccaagaaccgatttctggaaggagttgcaggctcaaaggcatgaattgttagtcgagttcttcgctatggttgagccgcataaaaggattgaaaattctctagccaagctagagaaaggaaaggataaatgcgagtcacccataccgcgatcaagatcccgcagttccagagggaaaaattccaaagggagaagccctagaagacgcagtccccaaagacagcggagtccaaagttggccaaatcccctccaaagaaagagtcgtctcctaagagaaaaggaggcccacattttttgaactatacagaattagcagtcccgcgggaccacatatacgcgattgaggagaagaatggagtcttcaaaaagcctcccccaatcagaggaaatcgcgacaagagagaaccaaagaaattctgtaagtatcataaggatattggccatacgagtctggaatgttggtttttgcaggatgagatcgaggaactaatcagacgagggaaatttgggaagtacaagaaagatgaggaaggtcatccctgagcggatgataaggaagaaagtaataacgcgagcggttcgagaactcctcgcaacatcttaacaattattggagggcctcacatcacattcatgaaaagtgacgccagatgggttcaccacccacatgccgatgcactggtcat

SEQ ID NO: 239382 - DNA, 2084 bp, Cannabis indica
ggatgtgtaactcaataaagagagaatttaactaagtaagttctgtcatagtttgagcaaggctttgaagctcaactttagtatggcttctggacactgtatgttgtttttcgcattaggaagcaacaaagttagagccaaaaaaatatagcaaaaccataagtagaactttcatcaaggtccgttgcccaatcagcataacaaaatatagggagctcatagttggatctagtttgtggaggtgaatgccatagtccatggtgccatacctgatagaattctcttgacaacttaccaatgagattgtaaggggtttcccgtaaattgactgactttattgacactaaatgatatcttaggtctagtggctccaatatatggacctatattgttaagggttgtcaacatgggaactttcataggctgaaagttaagaacacaacatagagtgtcaacaacgtgctgattccaaacatttatcatttgtgattgatatcatagcctatgaaagtacaaggtgaggatctaaattgtagcttgtgatcgttatatacggtcttatattggaaaagtaagtacagccaaagattttaaggtttgtatataattaggttgtaagtgaaacaggacctcaataggtgatttgtcctttgaataagcatattgcaaaacaactggaagggttttttaagagatgccctggaagccaattagctgaagttgatgtggcaattctctcacattgaatccaaacgtatcaggattgtcctttatatgttaggctatgagagtgcacatactaccaaaaagtaggggtgttcacagattgatttggtccggatttttatagtttttgaaccaaaccagtataatagttttttgattattaaaattaaaccagaccaataaatttctcaaaccaaataaaaccaaaccattaagaacggtttggtttggttcgaaaccacggtttaagtggaatttattcatattttttaattgtactatttttactaagtttttaaatttatttttcaaaatatatatttaacatgataattaagtaatagatctataacaaataaataatgacataaaaacattctcaaaagtcaaacataacatagaaatccaaaattcatgcaataaaacacttgacacataaaaaagttcaaaattttacatatagtcatatataaaagatatataaaataattatttattataaacggttcggtccggtttaaccgttaattatttattatgaaccgcaaccgaaccattatgccgtaaacggtccggattgaccaaaccaccaaaaacggttttcccggttacggtttacagtagttcagattgtagtggtccggatttaaactgcggtttttcggtttatatgaacaaccctaccaaaaagaacatcttttttgtcttatgaccactattctaatattacagtaaggtggcgcacgaacgacacctattgacctcaagtggtcccctactgtacggagcataacagccccacagactagacttcagttcgtgggctcaaagttagtgcattctatgtatttatcctattagtgcacaaagtttacatgcaaaccctagtgggtcacgagtttatctcgtacccggatcttagcctataaataatgcattataccctcatgcaaatggttgaaaatttatatagtgtaaatactatagcaaaaaattatggttctgaagcttgtcaagaacattattaatgtaatacttcaaagctattcagcccaataattagggttcaataacactcgaaccacgtaattaaaaatttcaatctccattttcctctatttaatttgttttcatagttctaattttatatatactattgagtttcaaaaaatctcagtaagcagtccaaatatttcaatattcaaatttagatataatatcttattatttagatatccaaattcaagtgttagaatcttaaaacaaattatacaccgtaagtatttacgtcccaaccatttattcttaaatcagttttcgaaaaatacagtaacatactcaatataaaatattctaat

SEQ ID NO: 239383 - DNA, 1860 bp, Cannabis indica
acaagttaagcaaaaggtggagcttaagaacatataaaaatatagaacaagaaaggtctatttcagtttacagtatcctcaattggcaccgaagtatcgacacggtgctgataatacagatcaatgtagttaacaccaaggcgctgaagacttgcttcacagcattttctcacatattccggggtcccttttacaccaaactgaaatccctctgccttcatgataccaaattttgtagccaattgaactttttcccgaggaagctgttttagtgcctggagatacaagaagggttaatataaagttagactattcactaaatatttcatttcaaatgaaatggcaaacatggttggcaccaatatctgctcattcaaagcagaatttatagttgcaaaaaaaagtgaaatttatatataatttaaatctcaagcataatcctaaagctcgctggtgttttagaccgaagctcatttgggttattgaactttactactatattaagattcatggagtaagtcgtgatcttataaatgtaataatattttcgtttccatatggaatgctctcataatggcaaacatgtctcaaactgtactttcaaaggtgggcaccaatatcctctgttgtgttaatttttcaagtgctagttatgtatagcataaaatgaaaatagaaatggcaccttcccaaccatgaattcattatcatgactttgaccataactatctgaagtatcgaagaatgtgatgcccatgttaaatgtgcttaataacagaacaaccatcttcatgagagagaggagcgttgtatactccagataatccaccacatccaaaacccagtctagatacctgaaagccccaaaataaagaaccaattaaagatcaattttttttctttcttcccaggccacttcctaaatccactagactaaacagtgtgttgaggataatgattgacaactgagattagaacagacactgatttgtttttagaatataaacagatgctgataattggtgattattgagtaaaagtaataatacccagctaaactttattagataaataaaaatggtgaaggataaaaaagcaagtattacctctaatccatggctacccagtttgacttttgggatatggatttggggcatctcctccatgttttcgatcaaacaagaatgctctttctttgcagagaagggcttattcaacatatacagacacctcttctcaccaacttcattaataatattatattggcatcattgattcctaaaattaaatataattttgtgtttcgtttggataaacaaaacagttttatttatccattaaatactgagtaacagcaactcagacatgactgatttttttgatcaaattaatacatgtatacactgcacaggagcatgctactttttcaaaaaatatcatattttacaattaaaaaaaataataagaaaaacacttcacttcttttttttttaaaatgaaacctcattcaaggttaattaaatgactctctaattaagttaaaagtttttaatcattttcattaaatggcattttaaattatatatagatcatttttttacattattttcttttccttaattatagcgacatcaaattaaaatttgtacttttaattttgagctattataaacacatgttttcgggtaatatatgttagtattaatttactctattatatctgctattcaaattaaatttattttatgttatattgtttaaaaattatttcccaatttaataatttttatatgaattttgtttattatttttatttcacctttgctgaaataatttacttattttcattatatacactaa

SEQ ID NO: 239384 - DNA, 1698 bp, Cannabis indica
tctgcaaatggtaatgctattcattggaaaaactggaagtttctctgcaaatctaaagttcatggtggaatgggttttcgtaattttgttcacttcaatcaagccctcctagctaaacaagcttggagaattcttgaagacccgtcttcactacttgctagagtattgaagagtagatattttgctactggtgtttttcttgaagcaactgctggtgctcaaccttctctcacttggaaatcgattgtatggggtaaagaattactccttaaaggcttacgatggagaataggttcgggtgctgatgtgtactgtgtttctcagccttggatcccaggtccttcaaatttcaaacctctgctgtttttaagttctgatcgtgatgttaaagttgctgattttattactcactcaagacaatgggatgttccaaagctccaacagttcttcactccacctgatgttgatcgaattctatctattccactaagtttatttccatgtgaagatgttctcttatggcactactcttctgctgggttctacacagttaaaagtggctataaacttgcctctgatgtccctgactcccaaccaaacagttcgcacactactgaaacatggtggcagtatttttggggtcttaaactgccttcaaaaattcgaatcttcgcttggcgtgcctaccatgaagctttacctactgctgctattttgcaatatcgccacatttcatcatctcctcaatgtcccctatgtcaggtgcacttagagaccataaatcatgcttttttctggtgtaatcgagccaagcaagtctggaaaaactgggatgaatcaattaactggtcattgtcaatgacttgctccttctcagactttttggtatatgtttcttctcagttgcaagcagagaaagttgagctttttctcactactttatggtgtatatggacggctaggaatgcagaaactcactcgaaatctcccaaatctgctttacaaatttttcaatttgctggtagttatctagccgagttcaggaaagctcaagctaagactaatgcagcaggcaccagcttacaagtctctcctgcaacttctttgaattctgctgcagagtctagttcacagttgtctcacttggttgctgcaacagcttctgcgcaccagcctttcacttatgatccaactggtgtgatgcctccaactaagccgaaatggctggcacctccttcgggcagactcaaaatgaatactgatgccgctgttaatgtagcaaccggagtatttggtctggcagctattcttcgtaattcaacgggtgatatccttgctgcaatggtcaaaccgatgaaaggttgtgtaaaggcagaggagatggaggctttagcaatagcatggggtctcaaattactgctgcatcttaggctaaatgttgattttatagagtcagattcattgatggttgttaatggtttaaaatctcattttaaaggtctctctgcttttcatgttattcttaatgacattacatttctgttgtccaatttcccacgagcacagatctctcatgtttatagatctgctaataacgaagcccatttgttggctaagtttgctcttacggtggattcagattgtacttggttagaggaagttccgccacctctaatgactgttatgtaatttgttttt

SEQ ID NO: 239385 - DNA, 2016 bp, Cannabis indica
taacctaagtaagttttttaacttttttactttttttttttaaaacgggtttttttttttttaaaaccgggttcctttcgttaagtaagttagttagttaacgaaacaaaactaaactactaccactttatacttttcaacatatttttttttctttagtaaactaatatctttaatgtagattttttaggtgacatctaacagggaaaagaattacaaagatatttaaaattaaatataacggcaactctattttgaacttaatttagagatttggcatacaagttataacgatttttataataaaaaattatatcatgaaaatatattttttattaatatgaaaattttcatatattttgatactacatccattctttttatttatatttatatattttcaaatttagcttttgaatatagttcttttctatgtaatagtcacaattttttgttgcggattaaaatatatcaaaacggcgagctaatgtagcggttggtcgaaaaaaataaaaatataagagtaagaatgagaatgagaattggaataggaataaaataaaatttaaaatgtataaaaaaattaatttttttttcaaaaaattaatttttttttcaaatcttgcattagaatggtctttctttatatttcaaaatagtggaaaagtcattccactggaatgatattccaatagtttaaaatgcaatcaaacaaaaatgagataaaaattattttctttccattctattaccaccaaccaaaagtcacctaatttttattaaaatatggaagaaaattttacataacattactttttaatttttatcttatagcgtagtttctacaatagttaatttttgttttggacacagaaaagtttacgcaggttatgtgtttgcacctttgttctctaaccccttcttctgattatagtattattatgcaccatttttcttgaaaaaataggtgaaataccttctttggtctccacgtgaccgcccaaagagagattacgtacgaagggcttttacttgctttatactccaacataggcctatggagtatggatttggattgtacgaccatgacaacttggatctttgcaagttctcattccaactgactactaggactaattaatagtctaaactctaaaccatctaaaatcttgttttatatccctttcatttactttttcaaaaaaaaatttaaaggctatacatcgtgaaaaatgatggagcccaagcccaaataaggatgagcttaagctgtagcagtgaagattttgggattaatgggcctgtgggcctagcattgagcccgtagccaaaaaaattaagattttacataaatacttattttttggtaatttttacacttttactgttcttcttcttcttaatttttttttacatttttacaaaagtattttttttaaaaatattgatttaaagttttaaaatctcaaattacaaaaaatactgtgttccagtaaaaaaaataacaaaactgcaagacatcaactcaattgcaatatgcaaaaagttatttgttatagcttcatacttcttctcaacatctttcttttcttggagggggaggagggagggttagtgatagctaaaataacaactagtattttagaagtaaaatgaaagattacattaatagtatgttacattttaaaatggggtaatatttattaaaagtgatatttacaaaaatttacaaaaatttcagaaaataaataaaagttttgatatatataacatataaagttaatataaagttaatgttactaaatatgctattttataactaaactaagtatatgagcatttaatcttttcaaaaaaaaaacgtatatgagcatttaataaaaaatgccataaacatattaaaatagataatatttagttcgaaataggatcacgctctccagcgacacaagactttttttacttctttccttgcgattcaaattgcttaatttctcatgcaatcaaaatctaact

SEQ ID NO: 239386 - DNA, 1179 bp, Cannabis indica
ttgagatgcttccaattaatcaacggagaacaacatatgttcttcaacttttccgaaaagatgagagccttcatacaaacatatcaactaattaatatacagtatgtagaaaataataatattaacttgaaataaggcggaagaaacaaataaaataggcttacaacgttccaagagcaattcaaattcgaaagaaatttcatcatattagtaaaacttgtgtcactgtcaatactacgatgctcgattacactaaatgttccattcaacaaattggatgactctagcgataagctaaaatggatttcaccatcataacaaaaagatgtaaattctggagctgattcaattgtaatgatcttttcatcgccgtggtactgcctaacattgagacttttcaagtgttgattcgaaattttaagatgctttgaactaataaattaatcaaattctattgagtccgagtctgaatctaagtctgatccatagtaataatttatcgaaaactgaatcctatcataactgaggaaactcaaagtcagatgcttaagaagaggaaaattagagataagaacttgtattgatgactcctcatcttcaaaacaatcagataatgagagagttctaactggctcaaacaatattggacaaggaaaaaaaagtgccaatgaatggtgatgtgctatatttaaataatgtctgagtaagtaagttaagtgccaatattgcagctagttagttcacatgtcatattcttattggctcgctctataaacgaagcagtcacctcacttgtgttatgcattatgctatcctttgatatgtgatcattccatatctgatttcttcaggctttgacaaaagcttgggagaaaggttgttcattttttgtgaggacaaccattgtagttgaaagctcactataagggtatgagcaaatagttatagtgttttagcttggtatttgctccatcctaataaaaaggatgtggtaaacatttacacatattggtcaaataagatagcatggcaatggcattactattaattattcatatgctataactaagaagattaaaattattaatttttggtgaagatgaggttttatcagttggcatcattctttttacttaagtttttgcttcttttatttcgttcatgcattgtttaaggaag

SEQ ID NO: 239387 - DNA, 1502 bp, Cannabis indica
cttcaagaaagaagatatcaggttggttccgatttggatacaattgccagatttagaactgaagtattggggagaaaaatctctgtttaaaattgttgggcagttggggaagcttcttcaagttgatgaaatgactaaggcgaggaataaactcaattatccgagggtgctagttgaagtcgatattcagcaagattttccagcaagaataccttttgaagatgagtatggttatgatgtttatgcctcaattacctatgaatggaaacctattctttgtcaatactgcaaaggattaggacatgctacggtggattgtaagaaaaagacagtgaaagaacaaaaatgggtgattaaaggatctaaagggaatcaagattcggctgttacagagagattagaagagaattctgaggtgaatagagaagcagattttaaggaaggagaggcgtcagtacaaccggttgttgggggaaatgagggttttaaggaagttatgaaagggagtaaagttagaggaaaagaggtcttggctgaaactcacattgcaaactcttacaatgctctggaaggactttcggagcatggaattgatgtggtaattggagcagttacagtcactagtggcaagcctaaatcatccatagttgacaaggaaaaggagggggggggggggagcacctcctcttggagatggataaaatagtatgttggaacgtccgaggaatcaatgacccaagtaagcaaaatcttgttaagaacatgttacatgtccataaagctgggcttgttggcctcctcgagacgagaacaaaggcctcaaagcttggggccttatatcttaatgttttccaagggtggtgtttcacatcgaatatagcgtggcacgaaggagggcggattatagtagcatggaacccgtgtagtttttcggtgaacattctcaaatgtaccagccagcttatccatttgcaagttgctactttagatggtaagtttgactttctagttacatttgtttatggttttaatgatgttgaagggagaaaggtgttgtgggcagatctaaagcaattgagtaatcgagaaccttggatggttttgggtgattttaatgatattttgtccaaagaagaaagagttgggaaaagagtaaagtacagctcagccactgattttatcgactgtgtagagcaatgtcagctagaagatattaaatttagaggcagttttttcacatggaacaacaaaagacaagaaaatgaaagaatttactcaaagattgatagagttctagccaatccacaatggttacataacttccctactgctgaagctatttttgcaatggaggagttatttgatcataccccagctatagtaactttgtctcatggaattctaaatgggaagaagccttttaagtattttaaaatgtggacctcccatccaagatacaaagagattgtaggtgatgtatggaagcagaaggtggtaggctc

SEQ ID NO: 239388 - DNA, 1213 bp, Cannabis indica
tgcttcaatgatatgccaaaaaattatgtaaaatttggtacatagcaaattttgtgttaaatttgacacaacatttgtaatgatgtaaaatttatatcacaataaatgtactattttttttacttacatttatgtaatttgtattattttattagtataattaactatagtattaaattgtaaagaatttatattatttttttattatcttatatattaaaatgataataaaattattagttttatttttttgtaataaaaatattaattagatattcaattttggcaattgtacgcaatggagtagaattttaaattttgatgtaaatctacaacaaaattactttttgtgccaaatatagcacaatctcctattggaaaatggtcttatattgggttaaactagtttaaatttaacacgtcaattagcttaatttatattaaatatattaattatttttgttgactcaattaaaaatttaattttttaataaataaaaaattaattgatatgtgaaaacttaaattaaattaactgagataccacttttaatggagatcttgattccaagcttattaatacatacaggtagaaaaaaggaaaatcctagctatctatatatctttcaccattaattatagtaatcaaaactgaaatattgagtcaaagctagctaatacactaattatgatgcctttattggaaagaagccagagtgaatataaacctacaagcactaatattaatttagaacctttattggtgtatatgctcttggtccatatttcacaatcataaaaagttcatatatgattaaacgattttgcgtcactaattataactaaccttttatatttgtatgttaatagttcaaattattatatgaccaattatatattatattaaatgattgatgagatatattatatagactaaatatgacgtaattataatacatcatcaatcaattgaaacacatattaattgattaaaatataactaagtgaccagtataatatatgctgttcacgttgtggaaagaataacaaataataaaacaattgcattaaagctcaatgggaacttcattaaaaattcttataaagtcagtgcccacaaaatcattataaaaattattcaaatcatacaattccatcaaaaactaatcgattaatatgtttgacataaactacaaaaaaaaaataaataaat

SEQ ID NO: 239389 - DNA, 2223 bp, Cannabis indica
tatttaattttttttaacactaatttttttttagtgggggctatagcccccacactttctttactgcgtccgtccctgactctactatagatttgaatttgtattcttgattgcatagaacgctccatataccaaatatagatacgctgtaaattattcattgttacaatttaaaaaatcaatgatcctctataaacgatttacattgagtagggataaatttactattttacccttcaatatattccatccttaaaacacttagctacttgtaaataatatttcagtaaactaatataattactaaaataagcgctctatcatttatctcgttaagccaagctctgaggaaactatcatttcacttttaatagttgtagaagttataaatatcatatctatgattaatgctcccactcaattgcactactgaattctccaagatgtaagtatgggctaatcttatgggtaagctagtaacaaacaagtcaaagaactcgtatattacaattaagctagaacttaaccatctcaggattgagatcaattgacataagatcaactaagtgacattgacttagaaaagatataacagtaagtttatgatatcttttctactgtcaatatcaatcgaatctgatataaagttgatacatccgatactagtttacttccttgttaacgccctggttgggtcgtcgggctgctggtggtggtggtttgggctatgattttctaaataagagtgagaaggggagggagattgagtggagaggcagagagatctgacaaagaaggagatcgagtggagagggtcgaagagggtgaaggagagtgagaatgggtctcaagctgttggtggcggtggtttggtgcgtagctggcctactacttggtggtcaaagagatgaaggggagatatagtggttgtgctagggttcaaaacttaatgaagatgaaatgataatttcatttgtcaaaagggggtttagaaaaaattaaatattttgcttcggtggataacacttgctaatattttagcatcggtttctaactgaagcaaaaataattagcatcctttttcaaccgacgcaaaatgtaaagacatctttttaaattttcaattttttttcttagttttccttttagtgtcggagagttaaccaacactaattgagcttttttagcttcagttaccctttgaagcataaaatcattggctatttatcgcgtagtcaattatattagtgtgacgtattgactgacgcaaattgacaattttgtagtagtgggagttaaaatactttctttagagttaaccattaaaaaaatactccagcatcttacaaaaataagttgcttgcatcatagtaagtaaattaccagatataccacaagtcataggttcagatgatcttaaacctatgatactaggatcggaaagtttgcttaagtctattgaatagacctattatcaaaatttcccttcttatccttgtaatagaaaacttctgattgctccatgtgaatggttttaaccacagttctcttggctttgattcttagttccttattagaagtatccattgtttgtttaaactagcaatagatttttatcacaggtgtcttccaagtcataacaaggtgggttccttaaaaatctctcactatgatgaggtaccgtgactttctgtttaggaatattagtagtatttacttcattggttgtgtcaatacaagggagacattaggaccatcttgtatagaataagatgatagaacactttgggattgaatcaaatagtatctcctctactttgctattttgttttcagatttagtcatcttcttaaaaaagtactattttttgaaacaaatattttttatcttaatgaccataggatggtccacccctaatcactttataataactaccaaatatgcaaaccttggctagcagttctggctttcttaagttcacgattaggacatccctgaatctagtaatggtgtacattaagtttacgactattccatcattttgaggttttcttgggatcagacatagatgggacgacatagaatatcgtttgctatctctaaggcatttccctatcaaattaattgataaaaatggtcttattaaatattcaaattaaaaattaattattttaagaaatagttaatttaattctaaaaaaagaatttttacatgttggtaac

SEQ ID NO: 239390 - DNA, 3944 bp, Cannabis indica
tacattgaaacagagttttatttagggcataaaacccaacatgctctactatgcaggaaagggtaaggcattagctgatcagccatgagtttcaggagctgggcgaagaatgtacatgttcgagccatatcagaccaagcgggttaagggtctactagtgttgaacttttgaaattctattttaccgcttaggtcggctagaaagaaaagacttgtaataaagtttgtaaatatttttgggatcccaactgtttaaaagtttaaatttattacaagttttattttgattctgtttaatataaaagtttaaattctgcactattttgattagtaatcctgattaggggattagggtttcataagcattttggggagcgtgcctaattatttagggcgttacatagagggtacagtaggtaaagtaaagtttgcagtaggaaaaggacttggtgaggggttttgtacctgtgtggcagaggtgtgaacaattgcaggaaaaatttgttcattgaagacaacatttttggctatgaacagtcttccttcaggactttcacataagtaacctttgtgtgaggaagagtatccaatgaaaaggcattgttttgtcttgaattccattttgtgttgattgtatggcctaagatgaggatagcaggcacaaccaaatggcttgagaatagtgtagtcgggtatttggccaagtaacacttctgtgggagacaaatgatgtaaaactggtgttggtagtctgttaataagaaacactgcagtgtgaaacgcatgccaccaataagaaattcaagaccagattgagccagaagagtaagtcccatctcagttatatgtttgtgttttcgttcggccctcccattttgttcactggttttgggacaagggtgttgaaaatgtatgccctgatcactgagaaatctagaaaagggtctatattctcctccccaactagcttgcactttcttgattggtaggttgaattgtttttccaccatagttttgaactttaggaacatgtcaagtgcttgagatttttgagtgagatggtagatccatgtgtatctgctataatcatcaatgaaatgaatatagtaaagatatccatctttggatttgatgtaagagggtccccataagtcggtatggacaagctcaaggggctgtgtggcttttttatctgtgctaggaaagggttgtttgtggcttttaccaagttgacacgcatgacaaaactcaagttgatgaatggtaccattgtggggaacttgttgtagtattttggctaggacaatagtagaaggatgtcccaatttggtgtgccatacattaacatgattcttggtattagtttgcagaacagtggggttagagacatttagaggaacaattttgtctttattgatatcagtagtattacatgaattgtcatttattacattgggtaatgaaacatgactactacaactcatagcagtaggtttataaccccgaggcacatactgctgcaaacttgccaccttcgattgttgagagcattgttctaacacatataagccatctttaagtgtccccttgagcagcaccttccctgtttgcttgtccttgacaaagcaacatgatttgtgaaattcaagaaacacacaattatcattagttagttgagatacactaaccaagttttttgttattgcagggacatgaaggacagaattaagtttgagactagtagagctataagcaggtaaagaagctaggccaatattagaaattagtaacttcttaccgtctccaacagcgagaccttcagatcctggatatgtcattgcagattcaagattgtcaagaccatttgtcacatggtttgtggcacccgtatccacgaatcatcctgaatcatgaccaaagtcaggaataaaggatgtggcaaacgcttgagggtcatagtcgaactcatgttcagtgatgtaggcacgcggggtgttgttggtggatgatgaagaggggccattggtgcctggtttaggtgtaacccaggtcttgtcgaatctgtagtgacaaactggagcggtgtgtccatatcgaaggcatagttggcacaagggcctgttttggtgatgctgagtacgaaagtttggtctaccaccattcttgttcatctgagggggtcgataaggagtattgcgtgaaccagtgaacgcaacattggcttgaagcttcatcgataagtcggtaacagaattgtgatgctcaagacgactttcatgggaaagcaacaaggcttggacctctttgaacttgagaacatcacttcttgcagtgattccggagactacaggatcatattctggtccaagtccgtttagtaattgcaagatgaggtcttgatcaagaatcggagaacctgctatagcaagcgagtcggctgtggcctgagttttgtcaacatattcagagatggattgaccgcctttgcgaatggtggaaaactgattcttgagttgaagcagacgtgctttagattggcttgagaatttttgttcgagcgcacgccagaccgcatgagatgatgagaagctggcaacagacgcaagaacaccatctgtcatcgacgatcgcatccatgacagcagcagctggtctttgcgtttccattggtggaattcggggtttggttctccagtaacaagactttgcagtggaggaatgcctgaaagtaagatctcatctaactcatggccgattacagtaggaattacatgtgattttcaagacaaaaaattagttcgatcaagcttgactgttaaaacagaggttaaggagtgataaaacggattctagttggattgcatctgggttgttgtcgcagtggaaggagttctggcaataggagcaggatcagaggaggtggactccattgacgacgctagtctagagctctgataccatgtagaacctcagaatatgaagttcacgaaaaatagagtaaacgaaaaacaaaggagaaatacagagaagatgaaagaaagtaaaaccagaacttgaaatcattattgaatagacaagtgtattgatatacatctttggcatacacaacagaattagttacaagatatttgtgtcagacggaagttgaaaaaacagttacaaaactaactgaaaataccaacttaagcagagtctattcaactatattaacattccatatccaacaatagctatataattacatatttataggcttttattagttctatttttagcatctttattgtgacaaaaatatttgataaattattatttaatttcggttgtggtaattaaattggtttccttattttgtatttaacttttatattaatcaatttatttttggaaggaaagttgtctagcttttctatttatggaaaataaagtaaaaaagataagtttgattactcaatttttttctatctatccaactgtaatattctgattttgtgttagttttctattttgtttgattagatttcttgaggagaaaaccgaagctaaactttctttttctataaaaaaaaaatttgcacttactgctacgattctataggtatagaaatagaaattcctgggctgattgaagatctattttaggaaattgcctagtgggttgtggtcttgttcagaccgtgtatgagctatcaatactgtgtatattgattataattacaccttataacaactaggtcttgtacccattttgcatctttgattttcactcatatctttagaaaagagagtctttgttttgtagagaagagcttgtcgactcttactctgtttatttgtatcttattgttaggctatttttagcctacattttgggtcactttttatagttgttttccttctttgttattctttttggaatagaattacgcttgttttctttgatt

SEQ ID NO: 239391 - DNA, 1585 bp, Cannabis indica
ggagtatctattgttgtgattcaattcaattcaactctctcttttttctctttgattgtctagtattgtccagttaagagaatagagttttaaacaaatgcatgaaagccatttggcaaagccagaaagtatatcactcagtagtagatttgatttgattatatatgtatgcaactaagcttttggattttagtgctcttttgcatcatcacctccttagtaaccttttcccaaaaagccatagaaaagtaacatttttcccacaaaaaaaaaaaaaaaaaaattaatatgaaaaatgttattggtgcacaattacaccttttattgttattgagtattgtatttgtatattttaatttaataattatttgtaagatgtcttatttggttagtgttggggtatcaattcaaattctttattagaagaatagataagaattatcttgaatataagtgtttcatctattttatttgtatgagacattttgggaagatgcctaaaataatactataagggcttagatccaaaatgaagaatatcataatagtatagagttaaggtgaggtggtagccaaacaaggtggaaaaacaggatccaacaagcggtattaaagtcaaaggtttaggagcactggaatagtagattgaatttgcgatatatgtaggagaagccctcaatgtgatgacctcgtgattgaaggtctataagttatcttgtaacgaaagtctacttgatattaaagtggtcaggcgacgtgtcctgttggagattaagacaatacaagatggagatctgtgtttggtggtttgtgtcaaaagtcattctgacaatgttgaaggtcaggcggcgagttttgttggtgatagcgacaacacaaggtagtttcgttggaggggaggccacaatgtgatccttggttcaagggaaagattgttggggtgtcaacccaagtccctcattagaattagaagaataagcaagagttgccttgagtataagtattccacctattttattagtatgcaacattttgggaaggtgcccaaactttgaggacttaagcccaaagcagataatatcacactaatgtgggagttaaaagtgaggtgataacccaacaaggtggaagaatgtagtccaacagttaaacacactaatacctaataataatactcaatgttaagtaccagtaatatttgataaaaacaccataagatattatactattattaatataattaagtattttctatgtaggttgagtaccgctaataactaataaaaatattttaaataatgttatattgaaacatatttgcatgcaattatggtagctaatcaataaatttgtaacaaaattattctataatttcccattaaacttgttattgagtggatatattgggatcttattgtttgaaattatcaatctttaaaataattaattatttaaaaatactttatataagttgaacaataaaacataatgcccaactcaaatttaaaattgtgaaaaataaactatggtgtagattatcttgtaaaaatattgttttagtgaaaatgtataatattaagtataa

SEQ ID NO: 239392 - DNA, 1685 bp, Cannabis indica
gataaactctatgcatgtaaggcaattagatttctctccttaacttgttgttggggtatggaagagtcatcatcatttgaatatctcatttctagccttctctccttgagaatttggctttttacaacgggcctaagcctatgaaagttaaacaagttgaaatctcgaatcagcagctgaaacaactctatgtagataacccttttgatgatgaaatgagtgttgtaattaagtcaactccaaacttaaccaaatttgcttatgttggtgggatcaaatttagtgtgtcaatagagtcttccaatttgttgtctggagtatttgtgattaagaaacaacataactatgacaccaattggtttatcaatttgatgaagtttcttatgagtctcaagtgttcttggaaatgcatagacattcatgttgaatcagaggaggatcttatctttccagcgatgttcaagaggttatttcgttctcctttggtcaattgtaaacttgttcgattttttactgaatgtaaacctgagagggaatcagacttgaaagatgctctacaatggatttctcctacattctctgtaatgaaaagccatgtttcgaaatcgctttttaaatttttctagactgaaatttcaatatagtcagcagcctcattaggaaaggtgatgaaaaatcggtttgtcaaatgatggatatttcttaactgtatggtaaataagattctgaagtgattttctgttatttctttatttcattctatttttcttctgaccccaatttgaagttattcgactcttttttgttgataatgatagtattagtgattgaagaggggcatcctataaagaaactttgcttaatatcaatggcttttaatcatatggtatattattaaaatttatgatgaattttgctgaagtaataagacagaaaacactttgtaggatttgcataaaaattggctaaatcagccaaaaacaaacaaaaaggtcaaactacgaagacaataatatcaaaacaaacaaattctaacagtgaagagaaagatagataacagattttgatgatggtttcatgatgctttattgtgtatcttacaagttcatttaggaaaggtgatgaagaattggtttgagtttggtctgtgaaatgttctatgcttcttagctgtataaaataatcaactactaacatgaaaaactagagaaaaatcacaaacactattagcaagcttgccaattacttgagctgacttaacacatttgcttaagtattataaaatacatttgataacactttttcagggttatcataaatattatttcttgtagtgaaaatagctcatccagagtttgtctgcgcttgaaaactcctttgctcttatttgtgtaaagaccttaaaaaatttataatggaagacacagtttgctgaaccaaagcttctgaattgtagcatataatatttttgatattaaacaaataaaactgtaaacagggcaaatatgtaagagagtatttgagaatgatgttacaccaccttaatgtattaacttataaatagtcctaatgagattgtaattactttataggtagtttaagactaaagagtttgcttgccaacttggtgttgcaataattataaacgttacgcaagtatacgcaatcaagtagtaaatctcaca

SEQ ID NO: 239393 - DNA, 2910 bp, Cannabis indica
agactgatattgttctaatccctggacatgatgaaattaggcaaactcttttctccatgggaagttccaaagccctaggacctgacgggatgtctgttgtgttctttaagcattattggagttctgtgggcactgatttttgcgaggcagttgtgaattttttcgaagcttgtcttcccatagatggatcaatgaaattaatgctgttctgattcttaaggttcccaaccccaaaaaagtgtctaaattcaaacaaatatccctttacaacgtaacctacaaggttatttctaagatcatcgtgaataggatccgccgggtcctcccaagacttatatgtcccacttaggcagcttttgtcccagggcagagtatccaggataataatgttttagtttaagagatcattcattcttttaagctcaaaaaaggaagacaaggctactttgctatagaagttgatctggttaaagcttatgataatcttagctggaaggttattaatcatgtgcttcgtagctttaaggctccggacaagttctgtggttgggtccggcagtgcatttctacgacttcgttcaacatttgccttaatggaggcatggttagtagattcactctggaatgtggcataaggcagggaaatcccttgtccacctatctatttatctgggcagctaacatcctcttttgtattttgaaaacgcttcacattctggcatcattagagaaataaaactgagtagaaatggtccacagctctcacatctcttctttgctgatgatcttattcttgtgggtagggccacgattgaggaagctaagggtgtttggcaatgtctggaaaagttctgtgattggtctaggcaacgagttaataaactttaaacctctatcttcttcagcaataataatagcgatgggatgaaacgaggaattaagcaggcgcttgggcttaatatggtagtgaataatattaattatcttgggcttcctttgtttcgtaatcgcaacaaggatgctgatttcaacttcattttggataacctcgtctgaaaactccagggtggaagttgaaatcattgtcaaaggttggtcgtgctactttgattaaatcagttgggctttctttacccgtctatgtgatgaaaaccataaaactgaccaggaaactagcgtctaaagtggacgggatggtaagagatttttggtgggcctgtgagccaggtaacaggggcatatatttaaagtcttgtgattatttgtgccttcccaagtctccgggtgggcttggcttccagaagactgtggaaatgaatcaggccttacttaccaaatggggctgggctctccttattgaagagcaatctttgtgctgccaggtgttgagggttaaatatcttagaggtagaccttttttgaagtgttcggccatgaattttgactcttagttctggaagaatgttgtgaagactaaggaagttcttttgaaaggggcttgtaaacttattgtggaagggaatgacactaatattcgggaggatccgtgggttgttcatagccaggagttctaccctcaccctgtagttgctaggccggagggttggaaaaagttgtggacttgcttttagataatggaaactgggatgtgcccaaactccattacctctttggctaggaaacaaccaacaatattactaaaggaggtagaccttctggctagggtagagacaagtggattcgggccaaagaatcagacagtaaattctccactaaatgtgcctatcttgtccaggcctcgaatcgtgctcctccttgcaatgttgctcctgctctttggaataaactttggaattctaaaattttggagcgtcacaaagtcttgtggtggagtatcctctccaatgccttacctatccagtccattatggttgggagattacaagttgaagatgtttcctgtcccttatctggggcgatggaggaaacaatgaagcaccttttcctatattgtaactttgcttatcacatgtggaggtcttctccctggggtgtgatgccagttctaaactccggggctcgtatgtgggattggattaaattcttatggagtatggaatctagaggcgtggttgtcaaaaagttgttcctgtatgcttcgattgtgatcgacacaatttggaaaacccgcaacgataaggttcataataattctatctgtaacattaatcattgcattgactatatttccatgtgttatgcagattatgatgcttggcttttttttcagagccggcgacggttgcgtctcctgtctggtctccccccaaagattggattaaaattaattgtgatgttagggttggttgtgatataatgtgcatgttggctcttgctagagaccacagggagtcgatttcttgggtagctactagcatgcttaacttctctgacccagagaagccacgacttgtttgctagctatggaatcaacggtagtttagataaataattttgtgttgatcgagagtgattttgagaagattatcaacgtgttgaagggaacatgctctatttggggtattgataactatatacttcaatgtaaataactctctaatttgttattagctgtaatttttcttttatttcaaaattttgtaattttgcaacttataatgtggctaaataggcattcaccaataatgtaactggtatggtaaattttttttctatattaaaaaatattttatgtaatgatgaagaagtttaatttttgttgtttaatataattactctggattatatgtataaaaaaaaccttataagagtataagggtaatatttttgagttttttatattcctttatttattttatatatggagtgagtaacttacctttttttttt

SEQ ID NO: 239394 - DNA, 1216 bp, Cannabis indica
ttcacagcccctctcaggtacatactgaaccttctaattttcccacagctcagttttctaccagtaatagtcctgcagaatctaattctatgctttcttgtgcttcaccaaatgctacacctgagcctcatgctcctgccccagcagaaatgaatcaggctcctgatgcaactacttctgcaccagcagcaactaatcaggcaccagatactgtaaatgagactaatgctcttgcaccagcaactattactcatacaccatccattaacactgctccagtagcttctgatgcttctgcaccagttgatatcagtaacaacatcgtgcctgctgtgactcactcagttttacatcccaccagtaatgtttctgctggttctgatgcatctctcccactaagaactcattcaatgactaccaggtctcaaagagggatatataaacctaaggcttaccttgctactcgacacaaattgcctgagtcccttgttccaactgaaccgaaaagtcttaaagcagcacttaatcatcctggctggtttaattcgatgaacacagaattcaaagctcttatttctcaaggaacttggactcttgttccttatgaacatcgagttaaacttaatgcaaatggtacccttgacaggttgaaatctaggctggttgccaaatggtatcttcaaaaacctggtattgattttgaagacacttttagtccggtggtgaagcctgtcacagtgagacttgttcttactcttgccatctcatcacagtgggaaattcgacaacttgatgttgccaatgctttcttaaatggcacccttcaagagacggtttatatgagtcaaccacaaggttttgaagactccaaatatccaactcatgtttgtaagttgcataaggctctatatggcttaaagcaagcccctagagcatggaatgacaagctgaaatcaactttacttggctggggatttactgcatctaaagctgacacatctctctttgtgtatggcacgggtttcaatcttgtgattcttcttgtttatgtggacgatattctggttacgggccctaataaaactctaattcagaagcttatcttggatctcaacactcaattttctctcaaagacttgggtcaagtccattactttctgggtgttgaaatgcatcgaagctctgaaggtctctatctgtcccaaacaaaatatat

SEQ ID NO: 239395 - DNA, 1119 bp, Cannabis indica
atacttttatagaatatattttttttattttctagaatatttctataacaacaaaatttgaaatccaaatgataactcaacaattaaaataatcacaaattcatatgtaaacagagcttttcaatcacaaaaactcaatcaggtttatatattatagatttatgatttgtacatcaatataaattattgatgactaagcttaaaataaatataacatagatgtggaatgaaataaaagtatcccaattatatatctaattagatttaaattactaggttataatggaccatgccttggcaccatctttaactcgaaggtgccaaaaatcatatacatttattattcatgccaccagcgaagtgcttaatatttgcctctatatattatataaatattaatctacagtacatatatatatatatgatgcaagtaccacttaatttagaaagaaaaaagaaatacattataataatcatcttttacgacttcaaatcttttgattcaaatatattctatatgagtttcaagttacagtaaagaaaaatatgaaaaataaagctacaacataattttcaaaatatttaaataagtaatctatatataactataacatatacaaatatattcacacaaaagaaaaaaaaaacaaacaattatagtctataactaataatggtttaatttataagttattgacttttttctaaaaaattaaaaataataccttcttgatttaaaggttgagagtggaagtggagatgctgtagacagagatggagaagacgatggtgtaggtgtagccattattgataaccaaaaaataattaagaatgtaaagaagagaatggagtaaacaagtttaactgaaaaagttttaagtgaagaagagaatggagaaacgctaagtgaagaagagaatggagaaaactaaagagaaaattttttaaaaaaatttaactaaagaaaacgtatatataatatgatattttgagttttttaaaaaaaaagaaaaccgaagttcaaatttaaatatttagaaaataatactatcaatcatcaatcaattttaatcattattcaaaaaaaatcaatcaattttaatattttattctattttt

SEQ ID NO: 239396 - DNA, 2107 bp, Cannabis indica
taagatgtaagtattgggcctattcaattggtcagctttaacaaaaaattctaagaacataaataacacagttgagatcaaacctaaccatatcaagattaagatctactcacctaatattaactaagtgatattgacttagatagatataacaataagtttatgatatcttatccaatgtcaatatcatccagttcgatgtatactccatacatccaatcctagcatactttgccaatgccatggaaaggacataacatccaaggtgtaagtaacctttatcgctgattatcttgtcaatataaatctagtgtataaagtgttatcccatttttcgttttatgacctagcagtgcatactggtgacacgtgtcagttattctataaacactacaacaaattttatatttaccagcaaatccaataccggtgagcccgcccctaataatgggattagtactggtggatgttggggcccgccgatattattgtgtattaaataagtgttaatgcagatttttgttaaccagatatgagcctaacagtgacaaaacaagcatagaaaaactaaaaacagtaaagaaaaaagtatgaacacaaaggagtttttgcgtggttttgtagttaaaaattctgcatattccacaagttaatcttattcgatttctgatatttctcagggcctattctcttatgaattttcgtccctttttcagtctatcttgcctttatttatagtcacatagtaggcagttaattacagagttgactgatatctttacaacgattatcccctgaaattatggggtctagtttcatatcacataaattaaatgcggttatgatttgaatatcacacagctgtgattagtctgcttttactgggtcaaaataaacgtgtattaaatatgttgcaaactttatcgttttgggatgtctcgctgggaatagagtagcggtaaccttgatagtgagctggatcttttccaatttctttccaaggttgaaaatgtaaatctcatcacttttactctggaaacagaagaccctatctgacaatctcagtttttggtgacgaggtgatctttaactgtgaatatcatttgaatgtcagcctttatctggaagaactggctcatcggaagtgtgaatctcattgaaaggtgaagatatcatgagcatgtcttcctatggcgaggtggacgcctcgctataactttctttggttcatccgtctattatacttagtttgtataatgtactttatacgctaagtgtcttcacagttattatatctcatccacataacgagattagtgcctcgtccacctgaagttacatgatttcttgtcgatgcacaaggcaatagtttgtatatctttatctcgcataagactatccagtcagtaaatatactctgtcaattatgcttttaacgagttattccacctcaaatgtaattataattacgtgccttggttcattttcttgttagcttgacacgtgtattcctctgatgtgttagcaaaatcctgggtatgacaattgccccttaaaaagttcttgttgaaaaaaagtgttttttaatgattacaaagagtatatttgtaggcgtgcgtgttctctctggttttcttccatggcgaagaaacgtcgagtgatccgaaagccagctattcgtgctacgagtgtggaatcaggggcaaagagtgatgaggattttcgacctgagaaggaatgcgtggtatctgagatagagcaggtgccagaggagaatgaggaaggaatttcagtgggtttggagaaagacgaggctgctgtcgaaggagatacagtggttcgagatgagctttcctgggcagcaatggtggaaaacgatcatcaagctcaatcgcagagtaaatggcgagattttaccactgggaaaccattggatctggatgttaggttgaaatttgaggagccggtggtcaaggatggggtcaagattgctcggattgatgttgaagaagtgaaattccaggcggctaattggagctcagctgttatttgtatggttttgggggcaaaccctccatttgcaatttttgaagggttcatccgaagg

SEQ ID NO: 239397 - DNA, 2012 bp, Cannabis indica
attctgacgacttttctgacgctagcacacattgttaataatgttaaatataatgcctaagaaaataatagtataaagagtgatttgatttgatttgtaatagagtttaagagtctggtacacggtatatgaagttcaaagggtatatgaattttaattaaagtttattaatgcaatgaaatgtttcttacttcaaaagaaaaaaaaaaacaatattacaagctaaaatttatgttagctcccaaaagtgatatatatttcagactagttattacatgtatacgttagcatattaacgtgtgttgattaataatatgttcatttataaataattattattctcaagggaaataatcattgttaaactggtaaattcagtagtagtgtcaacactacttagatcactaataactgtcaaaaaaacattatatttgctgtcaaaatagtatgcaaaatacgcaaaaaaagttaaaacgaaagcataattaaacaccaaaaaggctactacaaataattaaatgaaatgaaaatgagaggactcggtggaagaaggtgtgagaaagaaggaaaataataatagaaaatgccaaaaaggggtgatactaaggagatgtaacaataattttctcgtttcgtgtgtggggccctttaccggaacctcactttggtctaacacgtcatcacaaaacgacaaaagaaatatcatcatcatcaatcaccgtggacgacagacaaaggaaacgttattatactatgatgacacgtttgattagttaatttggaagcgtaattttagatatatgatacgaaaacgacatattcttgttcttcttcttctaatctctccacccatttgtttacaccttaataaatgtcaactattattaatctcattttcaaccgttcgatcgtcatgatcaggtggggttctacgataaggcatgtgaagaagagttacaccatttattatcttctcaacgagctcatgagcttcttgcagggtttgtgagtttgcaaaatgacagctgacactaacacatacagccaacattatatatatagagagagatctagagagagagagagagaggtaataagcttaagaaagataaagtttatattattttttattaaatttttcttcactaccgaagaagagtccatcacgttaatcacgcaacttcatgttcttattataaggtgtagcttgagccacccgtttatctttttctctctctaatgagtagctaggatcgtgtttacttaatactatttaattttttgttgtaatattgataatataatatttatatatatatatatatatatatataataaaagaataaaaagtagaaaaagtaacattaagaaacgtataataattttctgatgagaaataaaaacaagtgagtaaatgattggctgtcaagcttttggagggggggtttcgtatatatatatatatatatatgactttatcgaatagggtgagtgtgcctgagtctgatcagtacgaattaaaaagcaccaatatgtaaacaaagaaagaagaaaatcggggcccttagcatgagtgagagctaggacgttattgaactggcatgatcaagattatgtttatgcatatatatatatatatgtatatactaaatgtgtaaaatggtttatcaaaatttacatgtttgacttgttgatttaaatcactcatcattagatgttatagtattaagttaatatataattagattattaataacttaacgaatgtgtacacacatatataaatataaattaattcagagaaaggcttgtcatgtgtcatgtatatatgccaattttttacagttaggcttttactttttgtggtgatgaaaaggtaaaaagagagtattgcatgcagtgatcatagctcgaggtaagagcaatattatagtgggaaaatgctgtagatatcacagacatatgcatctatatatagagtcagacaatacagagatgctgtaaattttacg

SEQ ID NO: 239398 - DNA, 913 bp, Cannabis indica
ttttctttgagaaaaaaatgaaggcaattaagagcagatttgagttgatacttagtgaaatgagaagcttggaaatggctatgtcgaaaaagaagagatactctccccgcttttgcaagctaattgtggatgaactgaagcgttttcaggatgaagcttcccatattaagaattggtttggtgagatagctgagaaggttaggctaatcgaacaacttcagccagccttcatgcaacaaaataaccacttttgattttagaaactaacaacttttgttgtttctcacaaaaacacaacttcttttttgttgtctttgagggaaaaagaaataaagcttcaactttcttaaattttgtgttgtaataccttggcatggtatgatggtgttttgaaatgcctatatgctttaacattgttgatctttttgttactaaaagttttgaaatactgtagaattatataatctatacgtgttgaattttaaatcttgattatataagctatattaattatattaatgtttttcctaaaaaaaataagaatatttggggtaaaaaaatgtctaaacattcctccaaacaaataaaatgtctaaactttttatctaataggggtcgtttagtatgttgtataagggtcttattgtattaaataataaataatactatatttggataaagtaatgtattgtattaattattacgactaaattttttacaatgtatgttgtattatttaatacataacaaatagtgtatgttagcttgtattataatatttacaaaggattcgggatcaccaatttcaaacccggactcgggacacagacccgggacccggacccgagacctagacctggacccaaatttgggatccggacccggacttggacctggacctaagacccgaact

SEQ ID NO: 239399 - DNA, 2960 bp, Cannabis indica
atacaatacggtgtaatacgacgtaccaaacgaacccatataatgttgatagcagtgtggaaagattcaaagcaaggctagtttgcaaagtgttacaactaacaacgagggattgattatactaacacctttgctcatgtcagtaaactcgttactgttaaactagttcttgctcttgctacaatcaaaggtttgcatctacaccaattagatatcaacaatgctttcttgcatggtgatctccaagaagatgtttatatgtctctacttctagggcatagacataaggcggagttaccaccaaaccctttttgcaagctaagaaagtcactttatggcttgaaacaagcctcaagatagtggtttgtaaagttttcaagcgctttatttgctgaaggattctcccactctgcaacggaccattctctattcataaaacacttcaatggaggagtcatcttttttttcttcttccaatcaacataaatgggagactacaacagaccattctctattcataaaacactttaatggaggattcatctttctactggtatatgtagatgatgttattttagctagcaacaatgtttaagcacttgaagcgctaaaacttagacttaatgctcatttcaaattgaaaaatttaggacaactgaaatacttcttaggattggaagttactagattaaataagggatgtttcccaaagaccatatgccctgcaactattagaagatctcggttgccttggatgcaaggcaatgagtacaccaatggaagccaatcttagacttggacaagatgaaaaagaaaaattggaagattcaaccctataaagaagcatattgggaaaactacagtacttaataatcacaagaccaaacatttcatacttagttaacaaactgagtcaattcctatccattacaagagttagttgcttgaatgcagcacatagggtagtagaatatgtgaaacaatctcctagccaaagaactttctttcctgctgcatctgaagttaaagtacaaccctacactaattctgattgggctgcctgtctagatacaagaaggtccacaataggattttgcatatttattggagattcaatgatctcatggaaaaataagaaacaacatattgtttctaggtctttagcagaaactgaatatcgagcaattgccaatacaacttgtgaagttgtttggcttttatctatcctaaaggaggtgaaaattgagcataaagggcctacattgcttcattgtgacaataaatcaactcaacatgtagttgcaaattcaatttcctatgagagaaccaaacacatcgaaatagattgtcacttaataagggagaatgtgcaagaagggattataaagacaattcacgttgtgaagaaaatgaattattctcaggtgtatttctatcattaggctaggtgcatttcagtcttttctctgcactcaattttagagggcagctcatcattgagcaatgattgttgtacaatttctgttaggattctgtgtactatagatttgtatatttttgtatacgtgtaaaggcctagaatattcctgtatcaagaatttccatctatgaattgaaatgacctatctcagctacaattgagctgagcaaaacattcccctgcatattctctgcattttttaacttggtatcagagcgttttcagacggttcatcttcttcgatcatggccggagttgaaggtgactctgttgtctcaggtagaaatgggagacaatactctacatcgaatatccctgcttcaatcaacccagctcagactccaaatgttgttgtgcctcatttcggaagcaccttgaatcagccatttacgctgaagctcgacataaacaacttcacgctgtggagaaccatggttgttgcgattgtgcgtggccacagactagatggttatcttaaaggtactcttcctagacctcaagaatacaattctgttactactaacgtcgatggtagtgaaagtgttacagatgaaatcaacccagcttttgagcaatggatcgttaacgatcaattgcttctcggatggccctatggctctatgacaaaggggattgcttcggaagtcatgggctgtgattcttcatcttctctttggtctgctcttgaagccctctacggttcacactcaaaagccataatggatgagtatagaaccaagattcagacagctaggaagcgttctctcaccatggctgattaccttcgacaaaaacgatagtgggctgacactcttgctcttgcaagagatccttacctagaaaagttgttggtttcaaatgcattgtctggtttagatctggactatcttccaatcgttttgctcattgaagcaagaccttcaacatcatggcaagagttgcaagatatgcttctcagtttcgacagcaagatggagaggcttacggctttttcaaccacaaacaaacttggaaataactcaggaaatccaagtaatccatctgcaaaattttgccaacagaaacaacagcaacaacaacaacagtaatcacaacaacagtaacggcagagggtccaactacaatagaggaaattaccctggaaatcgaggtggctcaggaggtagatctagaggaagaggaggaaggaactctggtcccaagcccacttgccaagtgtgtggcaaatatggacattcaacagcctattactacaatagatatgatgaaacctttatgggagcctcacctggtaacaacagcaacaacaacaaaggttcagcagacctcaagcctttgtagcttcaccagataccttggatcatgaagcatgatacgctgatagtggagcaacaagtcatttcacagctgatccgaataaaatacagcaaaaagatgaatataatggtaaggaaacactcatggttggtgatggaaatca

SEQ ID NO: 239400 - DNA, 2652 bp, Cannabis indica
tttttttttttttaaagaatttaggatattattaattataaatatgtcccaacgtgttccaaaaatcacaatcatagaatccttaaaataagtttgtcctcaaatttttgccatcaaattcagacccaaaacacatgtactccaaaatattcttgaagtaaataatgtaaaaattaaggataatcttattaaaaccagccaagatgaaacctccagtcgttatatattttaacgtaacattttatattttgctaagcaaacataacataacttaattattcttaccataggttgtgttgtgtggtgtaatggtagggatctgcttttactgttattcttctttgcttgtgtcaagggttcaaaatctaccacaatgtctcgtgaagggattaataaagaattgactctctaaatgctaggtattataggtggtatcatttgtgtgatgaaaacttttaagacgattaccgattactcaattaatagagactgagttataatgttcctataactcaaacatgatctttagattgttaaaataatcgcatgagtagagaagtgatgtacaacacattcccttattttttatcaaaagaaaaaataaaaataaacaaaacttaattattcttaaattcaaacttcgctgtgaaaaaaaaaaactaaagtgtttgttagttgagaatcacttgcattcacgtgcaattagcctttcttaaactcactcccaacagcttcttctcttgtgaactctttggttaaaacttacggttccaatccaaacctgaaagtaacccatttaccaacaactcttatgatctgttattattattattctttttgtttcttttccggtcactcaaattatcgaattcccaaaagctccttccccattccccttgcaaaaaaccagtccaaccccaaagctcactttcgtaattttccacaatgaatacaccccagtccgaaccagaccgtccggttccgacctcaacttcctcgccacggcgccttcttctgagctcgacccccatctctggctcccagcggaagatcgcaatcgcagtcgatttaagcgacgagagcgcctacgccgttcgatgggccgtccagaactacctccggcccggagacacggtgatcctcctccacgttcgtcccacgagcgtcctctacggtgctgattggggctccattgaacttaatccgaacagcaacaaccaaaacgaagtcgtttcgtcttcgtcttcctcaaccacaacggaagagtctcagaggaagctcgaggacgattttgacattttcactaccacgaaagcccaggacttggcccagccattggtggaaggagaaattccctttaaaatccacattgtgaaggaccacgacttgaaagagcggctctgcttggaggtcgagaggctagggctcagcgccgtaatcatggggagccgagggttcggcgcctctaagcgcacagccaaaggaaggctcggtagcgttagcgattactgcgttcaccattgcatttgtcctgttgtggtggtacggtacccggacgacaaggatgggtctgatgacagcgttggcaacgtttttgtgggcagtgggcctgtggcgaaggcggcggtacagcaggttgagctgcatccggtgccggaggaggaagatcaagagtaccatgacgctcctgctgatccttaaaggttagatcattagtattacaccattaaaacaccatactctgttttggattaattgaaacaaaatggaagtttatgagattagtgttctggagtgtggattcaacggactaccaatctcgaaaccattcaaaggatttaaatttgaacctgaaaactgaaatgcaacttggattaatatttgaactcaattgaagctcaatgttgatatctgggcaccaatgaagatcacctaatttagtttctgataagtgataaatagggcatttcataattatggttccgtaatctcttgttatgaatgatgctttagcataaaaacaagagaaaaagagtgaagcttgatgtccatacttgattgatggcaatcttagtacagaagttatgaataatttttttttctaaacatatttaacttttaatgtcttcagcgctgcagatgcttaaccattgattctctacgaattcatgattccttcttcctaatttcaggtaaaattatttttatgtgatccagggtatgtttgataaatttagtttctttactgttcattcgcttgctacaaatctcaggtcttggcctgtaggattcaagtctttcgttggttattatattggaagtaaaatcactggacgaactttagtccaaacaaaagaaactatatgacttttttattttatttttactgcagaagctgaccgaggcagcctggaaaatttctcttcgttacatttatttatgccttgtaaaaatgaatgaaggtggtaccatttagcttgtacgtcatttccactcgaatatcatatgaaatgattgcttgtgtataataattattccagacgtttgtggttcaaaccttcataagcaacagtaaaataaacatttgcttgtctatttgttcagaccagttcagtttttcttcttctttaattattttttctttttcttttt

SEQ ID NO: 239401 - DNA, 1347 bp, Cannabis indica
aaaaaaaaaaaatgccatattttgcctaaatttctaactccatcaataagccctattaatctcatgcaccattctatccctaaaaacccagatggcatgcaaacattcagagaactaaaattacagaagaaataaggaagaaaaactaaccttctgtgtaaaaatcctttctcttgaattcaaaaaacactctaaaaaaattcctcaaccttcgagaaattgtctcgagaaaatggggaatcaaagcttcaaagaatttctaaagtttgaaattctcagaaagtgagagtgagagagtgaaattggaaaatgagaggaaaataaaatgagaatcgatttgtatttgaagaggttaaatattaatactccttatttattaggatgcagacatgtggaaagggaatgcctaaggtctcgcaatccaactgtctctaaataacgtgcctacacataccccgaagggtcttgatgaggtgcatcttggaaaaataaaaataataattacaaccgtctttttgaagccctcgacaagacaatcaaccgtcaccatctcgtgacaataactcgcctgccttttcctaatagttttcctaatgacacaactgtcaattgtgaaaccacgagtatgtgttatagtgtgaattttttgcctagaaactcgagagcagtctcttataaaattgacacgtagatccaatccccgaggaatgaatgaactcttaattaatgactctcaaagagttaacctcgcttgatctgaacttgcgagatgatgtgaccttgatagggtctagtcgcatactatgtcttgcgtagtgtaagataagtaagactgagaggacttacacaagttgcacatatattaaaatatacgcgatgactaagtaaccttctcctgcgactaagtgaagatcgcttctttacatagcaattggtctgaatgacgaaacgtgttcgacgactcgataaggaatcgcgtgtcccatgttgtcaacacacgagactaccaatatgattcgaagtgaacgcagacattccagtgataggcctattagccatttagtgaatatagaacgcacctaaagcctgcgagtttgtgcgagaatatgaacaggcaactcgtactcgataggttgctgatgtaatattttaacttcagttatgaataaagagaatcatttcatttgcttaagtaattacaaagccttactctttaaaattacttaaggggaatttgtgtatgattaaccggaattcatctggaaatacatgttataatgcaaatccataactttaatttttttaaagttttgattcaaacctttctgacgagaaaaggatcgaaac

SEQ ID NO: 239402 - DNA, 3313 bp, Cannabis indica
tgcacagtatgtttaaaaatcatgtaatacgcctatgttagttagggtgttacacttgctgtttctctttatttccatttctttttggaaacgtctcttttgttgaaatagtgcttttagggcaaaggacgattcttgtttccttggcatttttctttttctccactgtcattgcctttgggatttttgcacccgatgcttgttaaggaaattcttttggggtttccttatttgacaaggatccggagggggcctctttccaacggttaggggacccccattccctttttaaacattagggttttgtttggggcctaactgctggatttcttctttctacagcaaaatgtctacccctgtctccaggactaaacctctaagaagggggcgaacaccctagctactttggaggaggtcatgaagggacttgttgcccaagagaactataattctcgtgccaatggttgggaagcagatgagctccgttctagtctggtttgtgctcatcagctcgagaagattgtgacgctggcagacatcaagccgtcttcgtccagggttgtgcaccacttgcctcgggacaaagaaacgcccacgcacaactatggggggttcgaagcttgagcgaaacccacctcatgtccggggccatgctccgtcttcatgattacttcattaattttattgtttttgttggccttgcgccttatcaactcatcctacaagcttaccgcctgctctcaggcttatttattttctatgttgccagaggctgggctgcacctagcccggccaaaattttttatttttatgaacttatttctgtccccaagaagggggacaagtttaaggacagattttcaccctccgggcccatcctgtgaatgagggtccagtcccttataaccaccaaaagaatgtcaaagagtaccgccatcattttttcttttattcatgcttccaggccatggaccgcccggagctcctcacggagtgggttaggattccacctctcctctgcacggctccgacccggctgtttctccaacacgccaagaccttctccacttacaacaagaacgatctcaacgttggggacttggtcacgacggagaactgacggcaggctaaactgatctccaggagccagtcggtggacgagttcaacctctcgaaggttctctgccctaacattcgcaccccggtcgcagagaaggtgctccaggcggagattatagccttggcagaggatcggtatcagaagtacctctttaggagggaacaggagcttgcctacatcaaagcccaagccgccgccgagaggacccttcacctggaggcgagcacagatcgggtaccctccaagcctaaatccttggtcttgttcccaacactggggctcccgacagcagcacatccgggtcggtaagtctcctttacgggtctatcatgttccttctgtccaagagtattcctggtataggcttgtagaattcgacgaacgcctttttaagtttaggatgccccccactcggtggggggatcatgccaaggctttttatttttcccactaaggtcatttcttaggctggtcccggataggtctcggacctcctgcacccatccctttggatcactcagcgtacttgtcttctagctggtttctcccctcggatagctttcttggggatgatgaagctagcattgtagttcaagactttgcaagggctgagttagagagtcagggtaagactagcattatttttttgctgttaggcgcatgccttcttgtagttattctaacattttgtttatttctttttgcagaagcaaaaccaatggaagaccttctagcgactcttgccaagacctacagcccagactattctcttcctccggctcctacccaaatgatgaccccggggaggtcgtcttccagtgcccccttaggcacaatcgtcttaatcgacgagaaaggggaagaggaggaggaggaggagggcgagattgtggcttcccttgatcacaagcgtaagggtaaaatggttgagactgagtcttccaagaggccaaagaggaaggacaccccgaccgttagctcagactctgggattcctcccgaggcagaggagtacaccatgcctcttggcattactcttactccggtccccgcagatgaggagaggcagcaactccaaatcgccaaatataactatgccatggacgagtatagccgaggaaatgttgaggtggaagccctgaagaaggttttgcgggaagcccaaaaaaattctctacgcgaggaggccttaaaaaacgcttgggatctgaacatggatcccctgacagattggttcaactgcttcgtcagttcggctttcgcttcctttgcttccgagctaactagccaatttgtctcccatctgacccaactcccggccaaaagatatgcaacctgtgcctccacgaactctatttgccaggtttaggatatcagtgcttccctggctgtggtaagattttgtgattcattcctctctctttgcttgtattttgtcttaagtcatttgacctgattcttgttttcttttttagattaacgcatgagaccgaccgcctctcaaagactctgatagaccaagggtacgtcatgtccgaatttgagggcatggacgaggccatgaagagtctgcgagacttgtcggctgagaggaaagcatttcgggaggaggcccagcacagggaaactcaggcggaggcgaggcactacgaggagctaaaggtttaggacgaggctgtggccaaggtcaagtgcgagttgcgggaagccaaggaagctatggacgagctgactgccaagctgaaatccatggaggagctgcaccaagcggacttgcagtcgacgaccaacctgactgtggaggtcaaggagctgagggactttaaagatcaagccttgaagaaggctaaaagatatgagctcctagcccctgtcgtctgcaagcattgcaccaagcgcttcaacgatggcattttcatggcttggcagacaaatgcccagaacatcaagctcgatttttatcacaagcccgaggaagtcttgctcgcttctgtgagaagaaaaagagacttgatgccttgctcaaggagcgtagggggcctcgtcttccacctcgtatttactaagccaaccaatttatcactatcactatcttatattttttttctttatttacagtctttttcccttttttcagacaattttaattattatctttaaggggagacaattttaaggcccgtccccaggccc

SEQ ID NO: 239403 - DNA, 2396 bp, Cannabis indica
gagattatattgaaatagagtttgatttagggcataaagcccaacagacagtagaaggaaaattgtatagaaggggctattcaatacctctcctacggtgtgttcttcccgcagaagcaaacgagatcatcaaagaaatccacgagggcttttgtggtgatcatgtaggttggaaaagtctatcaaaaaagattattcaacaaggatattactggccaactataaacaaggacacccacgaatttgtcaagaagtgtgataaatgtcagagattctcgcatatacctcacgtaccaccaagagaactgagaatgatgacctcaccttacccatttacaataagggggattgattgattggggaacttcccacagagcgagggggagaaaagtacacatggtggctgtcgacttccttacaaaatggacggaggctgaacctttggtatccataacctgcaaaaaagttctggactttgtagtcaaaatcatagtttgtaggtttggaatacccattaagatagtatcagataacaggacttagtttgatggtgaattattcactgagttctgcgagaggaacaagactatcaaaacttctcgtcagtattcaggccttaggcgaacgaacaagtagaagttgttaataagaccttgaaggatagtatcaaaaagaaattagacgctgccaaaggtagatgggtcgatgaacaacctcaagtactttaggctcataggacaactgagaagacaacaacaggacatactccattctcgctagcatttggctcggaggcaatgctgccggtagaagtaaatattacaacttatataagagagttttataatcaagaagaaaaccaagaactattaaaattgtccttggatttacttgataaaaaatttattgagtcacaaattactaacgatgcataccaacaccgagtgacaagatatttcaataagaaagtaaagaagaggctcttcaacattcgtgacttggtgctaaggcaagtatttgcaaatacaagagatgcatttgcaagagtatttaacccaaattggaagggtccgtatgtgatcaaagcgatagtaagaactgggtttacaaattagctcgggtgaatggctcgctgataaagaactattggaatgtggaacatttgcgaccctgctacaagtaaagtgatgatgtaactcatatttcagatgtaatattttgatcttcaattattaataaagttgaatcatttttcaagtaatagaaagtgtcatcctttaaaattacttgaggggtatatgtgtatgattaacaggaatctatctagaaatacatgatgtattacaaacccattactttagagtttttttaaactttaaagtttttgattgaagaaccttttttcacgagaaaggaaaattaaaagttgtaaatgagatataactcataagctacatgcgaagctgaatactaacggctcgtattttgtgggaaagtattaaacgagacaccaagatgccatgaaaaaaactacttaaacctaatatatgaatagaaccctaaactgctcaaataagcaatcaaaaatatacaaagtgatgaatcattaagagtatattcaagtttgcttaaaacagattataacagtttaggcaaagtagaattaataactgctcgcaaatcaaaagcatagcagataataactgctagcgcacatagtagattactaactacttaaataatatcaaaggaaattatgagcaatggaaaggcttaaagtattttaaatctgatcaaaatataattgtttaagttgtgaatgaaaacacaaacacatatattaagttcaaaaatacgaagcattcgattaaagataaaataaaagcaaagttggccatccaaccttgcaaatttgtctttctaaaagtgccacaaggggaaaaccattgtctcggccttaaggccatttgcctagataaataaaataataaaaaccaagcctacatggtaggagacttggattgttcttcttcttcttcttagccttatcccagtaagtaagaacttcccccttggactttcccaggaaactcgtatacatccttagatttgccattaaggcttggtagatggaacgtagtcccacaacattgcattgctcaatggttttagcttctttaccattgagcattactttggtttgcattaagttcccctactagagtttcttggcatcatcagccttatattttgtcctctttcttagcaacttcaagcttggccttgtgggtccgtcttcacctcctcggcttcgtattaggcaagtgtctctgcttggcatcattcacttctagtcacagcctcgcgctgcctaactcaagtctgaatctcgctct

SEQ ID NO: 239404 - DNA, 1573 bp, Cannabis indica
actttgtcatgcattccctcaatccctgtaaagttggaactccttagtcgttgcaaggcatcctcccatatgaacaagctgtccatattgcatttcaaagcatgtgccactgtagcaatggcaatcggtaggcctccacattcatcaacgattttgagtgccagatcattgtaataagcattattttcaactttagtgtctccaatgattttcataaacaagttgatggcttcactcgactttaaagctccaatgaagaacacatcactctcagccatacccatggagttacgtaaaacatgcagatatctagaggttactagaatcttgcacccgtcatggattccaatttcttctagattgagttccttccaaatatcatcgaggattaacaaaatcttgctttcatctctttccaatcgcattcgaagcagctctgctctcctgacaatgctttcattttggctgaaaattgtcatttccagcatttcagcaatatgttgctgaatctcttttacgtttggtgcttgagaaatagtggtgataaccactttactgaacaactcctcttccttagctactttggcaatttcttcggcaagcatagtcttgccaattccacccattccatgcaacccaatcctcttcctattaccatctctaacagctgccattatgccctccagaatgaccctccttgaattaaaactttcgtacccttttgttgctgttgttgctgctagtgttgttgttgctgctgctgttgtcgctgttgttgcagatgttgttgttgctgctagtgttgctgctaatgttgttgttgttgctgttgctgttgttgtagacagagtgtgtaggtgagggggatatgcaatggtatcgaatttgcattcctctttgagatcgtgtacttggatcgacatcttccttgctttcctgcttaaacggtgtcgcatcatcaaatgaggaggggatccacaagagcacacgacctttgcgtggtctggatggttgagaaatgtgttagcctctcgagagatttgaccaaaggtggtcagccatgtggtaacatcagcttcgattacttgacagttattttgggcatcctgaagacggcgttgcaatctgttttgggcatcattcaaatgttggagttgagtattgaggttctctacatttcttgcgtagtaaaacagataacccaactgccgacccagtggtgccaccgtatactcagatattttggccccaattgatacaacaatttccatggtaagtagccgcaattgccttctttcttaatttctttctgttattactcaactaattcaacataacaacaacacacgacaactaattattataattattattgaaataatataatataatatgatattaataagaaaatgattataaaaacatggcaaaagacacttaccttattaatgaaagagaaacaagtttatatctattcctttttgtatgtttaagttagctttaataaaatatattattaattaacagaaatatctttattattttatgatattattatatatatttaaagata

SEQ ID NO: 239405 - DNA, 1007 bp, Cannabis indica
ggtagtttcgaaattctgtctttctcttcaccaatcattaatgttgtctttgctcttttttcagccataattgacctgtaacagtaacaaaaagaaaattgtcagttcacctcatttgaagagaaaataaatggattctagaaaataattttctaacctttaagaaaaagagagaaaaataaggcaaagatgtgcaaatttcttgggaaatttatcaagtgatgaatcttatttatacaaaatttgatttcattacaggaaacaaaatcaaatatttattatgaaaaattatttctttattggtgtttttttttttcgaaaaggaagaaatctaaattcatttatgaagatacgggggttagcaaaaacattaataaccaaaacagtgaatgaggactaatgagaggattaggaatataaatgggtttagattgaaaatttcaatgaggaagaacaaccacttcttgtcatccgtacgtgtcatgcaaaaatataaaatatttatgggtgcttctacaatgcattaatatattattgtatcctctacttaaaaaaaatttaatttttttttttatatttatgtatgttaaaattatttaaaatatactacaaaattttaataaatttataatattatacaatataaaaagcagtatttgcatagtctatttcacacgcgtataaaataaaatagttacggatgcaatacattttttgaaccctgttttcagcgtgataaattttttcggatttctcaaaattttaaataaatatagacaattgctattgggcaccagtggtgcctagcactttctagatgtgtcgtcttacaattggttagcgatactccataaaaattattatattaaactatctgggacccgatacttaattgcaccaatagcgatattgacacgtaggagggtgctaggcaccagtggtaccctttagcaattctcataaatatagcgtacatgaccatgagaaaaaaaatttgactaaaaatt

SEQ ID NO: 239406 - DNA, 2297 bp, Cannabis indica
agtgttggtcatgataatggcttctattgctttagtaaatgggccaactctgaaataaacggggtagaaggcacagtttctaatgtgggggattagaaatcaaaatggttctacgcatttaagatgccaggagtcaagattgacttcaatcgccatcctcgtatgtcgcgtatttttacacttagtatttattttgatcaccttatagacactaagcttattttccttattcgtagatagaccagctcaatctgtactagaccaaaaccgtttagaaattgccaaagtcctaagcggcctccctgtggaagatcgcgactgacgcttgttgtgtactactacaaaattgcgagagcacaagctaatcctagaggacgctaaactttagcgagaaccaatgttcaaagagccttctgagaagtagaatgaaagaattgataagagtctatccaagtaaactttgagggaactcttgtcgaggaccttttatctcgatcagctgatctcatctcccagatcttaatcttttgaagaaatagaactcagctcttcaagagagccttaaaaagccaaagttggacgtggctaccaaagacaaggaagtcaaagatctcggcaaggccaaacgtcaggcggaagagcaagttaagactctgagtgagagagtcaataagctggaggaggacaatactggtcttacccgtaatcttgaatatgagaaagagaatgcgaagaaggcttacaaccaggctgtctctgactacatttacactacactgaccaagctgccagactttgactttgcgatcattggactagaggcggttgagatgaccaatgctttctgtaccatgtcacctaccgagactcaagggttaggtggaaatctttttcccgatgatgctgaagatgcgactgttgctaaagtcgtagatggtacaagcaaggtcgcagatgatcccaatgcccctaccgtctaattttaccaaagttttattttttaagcagtatataggtactcgcgttttgtacttgacaatattttaagacaacaattttgtttatgaacactgtatcccttcaaggatacacattttatttggtaaggccaagtacttttatcgttaaatttgatgtgcgtcttttgcccatgcgattattttttacagcttggtgtgatgaaaattttctaagtataaacatgagagaatatagattcaaaaaaatttaaaaattgagaattcattagataatcgatagtacaatatacggttataccccttatacttaggatatttatgaaataaattaactgagtcgttgaggtcagacaattggtaagtggcgttactaattttttcagcgatgaggtaaggaccttcccaattgtcgttgaatacgccatgcgcagagttacgtgtattgggcatgagtctttgctataccggatctcccactcgcagattcctttctttaacttttgagttgtgcgctgttgataggccatgtttttaatttgggcttgatcgcgtttttcttatagaaaatcaagttggatcaactaattttttgtatcaatctcgacgttgaaaacatctcttcgtaacgatccagctctgacttcgacgtgtaccatggcttcacatccataagatagtgagaagggggtttcactagttgttgagcgaggagttgtgttgtatgaccaagaacttgcggaagcttttctggtcacacgccttttttctcttcgagcttagcttttatggtatgcttgatgattttgttgattgcttctgcctgtccattaccctggggatatgcaaccgctgagaaagctttttgaatccccagatcatcgaaaagtttttgcatttccttataatcgaattgctttccattatcagagattaatttgtaaggaatgtcaaacctacaaataatagctcgatagagaagctgcataacttcgcagctgttattgtcgttagagcttcaacttcagcccacttggtaaagtagtctactgcgactactacatactttagtgctccttttccttttggtaactcgctaattataatctatcccccataccgcaaatggccaagggctggtgataggatttaactggctcggtggtctgttaacatagtttgcaatccgttggcatctgcctgcaaaactggtcgcatctgcctgcaaggttagcaaaactggtcgcatctgcctgtaaggttagccagtaataaccttgttgtatgatcttcaagcccagggaattaccaccggtgtgg

SEQ ID NO: 239407 - DNA, 1971 bp, Cannabis indica
ccccctcaaacgaaaaggggtggtaaccattttgagtttggatttaaggtagataaacctatctttagacaaaggcttggtgagtaagtccgcgacttgatctatgcttggtacaaaacgaacagagaggtgcttgtccagaatttgatccctgacaaaatgtaagtcaatttcaatatgcttagaacgagcatggaagaccggatttgctgcaagtgcagcagcactctggttatccacccagataacagggcattgagaacaagtaatgtgcagttcagagagcaatgaaacaatccatttaatttcagctgcagtgttggccaaagcacgaaattcactttcagtgctggaccttgcaactacttgttgctttttagcagaccagctgatcaaactatcacccaaatagaccagtatcccccagttgaacgtcgatcatcaatgcacgcccagtcagcatcagagtaactggtgacagtgagagaagttgctggtttgatcaatagtccctctgagatggttcctttcagatatcttaacaaacgtttacaagcttcccagtgagaagttgttggagctttcagaaattgacttaatttgttaatgacaaaagctacatcaggtcgtgtgagtgtaagatactgaagtgcaccaatgatacttcggtataatgttggatcatcaaataactctgcatcattaagtgataattttgaagagctgcttatgggagttgaacatattttagcaccttccatgtgaactcgtgacaaaagatcagagatgtactttgtttgggacaaatacattccttgagtatcacgatggatttcaacacctagaaagtaatgtacttctcctagatctttgagagaaaattctctgttaagatcagtgactaactgtgaaatgagagaggtgttggggcctgtcaccaatatatcatcaacatacacgaggagaatgagaagagtgttaccacggccatagacaaataatgatgtatcagattttgagcattgaaaaccccactgaactagccatgttcgtagtttgtcattccaggctcgaggggcctgtttcaggccataaagagctttatggagaagacagacatggtctggtttagtttcatcgacaaaacctggtggctgttgcataaacacagtttcagacaaggtgccattgaggaatgcattactcacatccaattgagtaactttccagtttccagtgacagcaagagtgagtacagttcgaactgtaacaggtttcacaacaggtgaaaatgtttcctcgtaatcaattccaggagcttgtagatatccttttgctacaagcctggatttaaatcgatctagagaaccatcggcattgagctttatgcgatgtacccatttgttcccaatgatgtgcatgccctgttggtaagggacaagtgtccaagtacctgccttcttcaatgcaaagaactcagtttgcatggagttgaaccacttcgtatctttaagagcagcttgcagagatctaggttcagatggtaagagggattcaggcaagggatgctttgttgctaaataagctttaggttttacaataccatttttagacctggtaaccatatgatgggaatttgtgataggtgaagagtcaacagaaagagagcctggtaaattttggacaatagttgtgtgagaagtacctgtaggttgggattgtgtgtgatttaatggtggtacttgggagtcaggtacagacaggggatgggaagtaggtggtgtgttggatggctgatttggtaaaatctcaggaggctcagacatagcagtgggaacatgaggttcaacagcaggaggagcaacaacattcgaagtagcagcaacaacactcgaagtagcaacagggatattagaacaagtaggaataacacttgaattagatgtggagaaagttgcagtgggaaaatac

SEQ ID NO: 239408 - DNA, 1838 bp, Cannabis indica
gactaaaaacacatttagtcacaacaaattataatttttgtgactaatacttttagccacagaccttttagtcaggaatatagaattaataatttataattaatcacaatttttttacttttagtcacaaattttgttggaactaaaaataaatttttttttttgtaatttattgtgcggttaagcacaattatattgcctaattaataataaccaccactctagaaaggacactcaaattaatgatcaggttttgttcctacaattttgaggtaaatagcaattacaattgttaatagtttatgatctccaaatattgataaaaataattaaataaagaaataacctcttttaaaattgcatgtctggctttggtacactttccacgtcttaatttctattttttttttttaaatgtcttaatttcaaatttcattggtaaaaaactaaagatttagcattagaagaaaattgactagaaaaaaaaaaacaacattaattagtagccctatgatcccaaattcaacgacgcaattgacatcctctattgacatcatgtacgttaattgacacgcacgaaaagactctaaacatttaatgttagtgtcctataatttccatcatttttttttaaaatattcttgacgtatagtgacgcgctaaatgtgactagataaacatgtagtcacacgtttagcgcgtcactatatcatataaccataaatttaattaaaataataataaacatatatatactacgaaaaataacttaatatatatttttaaaatgatatatatatttgaaaaagatgaaatatatatatattaaattggtatttttatattgtaaaaaaataaaaataattaatgctcattaaagagcacgtacggtgcaattttcaaagaaaaaaatatattaattttgatactcaacaactcaatagaaaaccctaaatttctctttttcctctcctctctatttttcactttagcaaaagacatccctaaattttcagagcctaacccaaccatttctcctcccttcacttcaatctcttacgtgcagttgtttagcccagcttcggtggagctctctccatcgttaaccgcgcatcatcctcctctctcaatcgccatctctctctttacgcacgagcctccgctccagatggaaattttcgttcccgaagacccagatgaagaccaacaacagtcccttcatcttctttgagatccatctgttggtttttgtgcttattcgtttcatcttttttatcacaatctatctttccttcaatgtgcaggtcgtagcagttggggttcaggcttgcatcggggttcgggttcatatgtttagctattattttaaaacaaaaaatataatatttttagagtactaaatattattttataaatgtaaaatataaataataaatatagaaaagcattaaaatgaagaagtaatataaagtttattttacatcacctactataattggatatttttttttttttgaaaagataactttgttattataaattaatgaggatagtcatttacaataacaaagtaaatcgaaagaggaaagttctccatccaagagatagtctcatccaaccctagagcatattttgctaaacaatcagcaactgcatttgcagttcgcttaacatgatcgagtaacagatatgttagggaaagaaatgtctaatattaaatcattaaaagaggaaacatccatcatatttgagtttaaggcatttaagactgttagaatttgaggataagatgaatgaggttccatcccaaaaccaattggcaatgggaggagtagccc

SEQ ID NO: 239409 - DNA, 969 bp, Cannabis indica
acctttcaatgtgaaggtgaccgtcgacgtgtccttgaagactaaccatggcatttcgacaaatatcttatgatcttcgccaaccctgaggatcttgacaccctatcgcttgaccaattttgttttgttccattttggatccaagaccacaacaccactttggccaaaaatcacctcaacttgctcagtttatggctgatgagttaggagacctcataaaagtctatcatttgtccctgatggaaagctttggtcactacctccgaattcacgtccttctggatgtcacaaaaccccttaggcgtggtatgaacattcgtttttttaagattgctaaaactaaatagattgccttcaagtacaagggattgcaaaaattttgttacttctgcagtactctcaaccacacctataataaatgtggacgatacctcaggaggtgtgataattttgttgtttcttccaaatttggctataaggaaaaccttcgtgtttcggctagaactctctttaataagaatcccttcgatatgtccaattccacacctatttaagagtacctgagtcgtggaagcaactctgaatagggcttgcagcaagcggttgatcagttcctgaacatgggctcagacttggtggttccaactcttgaccaagatcatgtaccagtttcctctgctacccctaatgctcctgctagtttgaatatggctttctcaactcatccccattcccttatcatggtcacatcagtgattacacacactgataaagggaagggtattgcccaacctgatgatgcatgtcctcccactcccactgttcccaggcttttaaccaaaggcattactattcaagaactcaccattgctgccactgccactaccactacggctggagtcaaacgacctttcactcgacaacatgctcaagttggcagctctgacagaagtatgctcaaacatgcca

SEQ ID NO: 239410 - DNA, 769 bp, Cannabis indica
cagaaaaaggttttagtgaggtcgttttcagaaataccagtaatggtagtgctgtcattgttagtggttttatcttattgagatatttgaaaaagacatgtcaattgttagtgttacgttcaatagagattgatcattgatcgatgatttataatattttttacatccttaaaaccaacacctacacactattatgtaataatcccttcgctacattttccaaaaacatcaatataacaactactttcctcatcgccgctagtacactggactctggaaaaccctacaatcttccagttatagctgtacggatatactatgaccatcaatgagttaaatttttttctcttaatatctaacacgatatatatttatttctttcgactatgagtcatttttgtttttgttagttttctaaaaaggaggtggaaaccttggttccacctagtgactttgtgcttgagcttgaacagtttcggtgctctgtttgtaaaatgtcttttaaagaaaaaaaaaagaaaaaacaattacaaacaattaaatttattataccccagcaaaaaaaatattataaggggcaatatcatgattaatagaccaataaaaattaaaaaaatttaggtcgattatttactgtaaaacaaatttaggtgtatatattgatcaagtctcttgtctattttggtctgaaaagtcaaaccttttagaaagcctttcaggcttacacttggtgctctcatgtttcgtaaataaatatttttattaatta

SEQ ID NO: 239411 - DNA, 3369 bp, Cannabis indica
aaagaacagattgtttccacaataaaagcaaatagcaatgttttagcctggagccatgttgatatgactgacattagtgcccatattattttccatgcattgaacatagatcccaatgctaaactagttcggcaaaagcaaagacctttagatttagcgagattagaaggagtaaaaatagaagtagacaagttgacaaacatcgacttcctcagggaagctctatatcccgtatggcttgccaatctggtttcggtcctaaagcctaacaggacatggaggatgtgtattgacttgacagacctaaaaaaggtctgttcaaaagattgtctttttcttctgcacattgatcagatggtcgtaactactttgaggtttcaactgttgaccttcatggacgcatactctgactataactaaataaaaatgaacatggctgatcaggtgcacaccagtttccaaactgacaaatgaatgtactgttacaaggtcatgccatttgggttgaaaaataccggagccacttaccaacgaatgatgaacaagatgttcaagaatgtcctagggaagaatatgaaggcttacgtcgacgacatgcaggtaaatttgaagacaaccgaaagccactaccaagatctagaagaggcctttgccattatccgggagtacgaaatgaggctaaacccaagaaatgcacttttggagtttcttcagggaaattcctaggtttcatagtcattctcgaaggatcgaggaaaatttgaataaaatcaaagctcttgtagacatgctttcacccaagaagcacaaaaatatctaaaagttgaccggaagaatagcagcacttagcatattcgtctccaaatccacagataagtgcataccattcttcaacgtacttcgaggaaataaaaaatttgaatggacaacagaatgtgaaacaaccttccaacaattaaaagaacatttagtgaaggctctaatactgtccaaaccagttgacggagaactattgtttctaaacctagtagtgtgatcatcccgtaagtgtcccattagtgcgagaagaaggaaagttacaacttccaatatattacgtaagcaagagactgttgggcattgagtccagatatcctatgattgggaaggtgtcaactcgaggactgattctagtcatatcaaagtcactctaagccaatacatcactgtttaccttgactgtggagataatattttctttcacgaccagaggtaggttcttccctactctgatgactctagtggggtcgtgatcactaatacatacttcctctacctcttccattggttctattttttgttccacaccaacccatagatctaactcatcttcttggaccacccttagtgctggctgggaagatggggtacatttctttcctggaccatgagaacagtcctggttgaaacgctatagcagcttcgtgcacttctttgatcacctctaattgtcctaatgcttcaagtgtcacttgggaactttaggcataggttgcaaatggatgtcaccaccccaaaatctatcagaaatggtcgtcccaaaatggcattacaagtagtagggcaatcaactattacaaatctattgtgcttgaaagatgacattgcattgcttccagaaacttccccatttattgtcatcggaagttgtatttttcctatggggatcagcgtgtctctattgaagcctttcagttgaatctggcacgacaacagattggcttccaccagaccaatgactttgaatgctcctttgaaaatgatattcacagagcttccattatctataaatatagaaactctttgtttgctatctgagcctctatcacctaagggtcattgtgaggaaaatgtacatgcctaacatcgtcttctgtaaaatttattggcaaatttatcaaccttggacgttgggcatgtgattataataggttgcaagctttatttcggtttaattcatttaagtacctttttttacacatttcgggtactttcagcaatgtgaggtccactacaaatggttgctacatgaccatctaaagttggtagagcagctccgggagggtaaaaaattttatgactgggggctacaactaatgctgctactggagcattttgtacccactgaagggcttgtgcatttggagcttggattccagttgcttgtggatgacttactctttgaggaggatttatggctccatactgtcccgaaatgaaaaattgtccatgtgcaactgcatgtccaggataaaatgactagaatccttacccaattggaaaaatatccattttgtaccaatccttaaatttcatcttttagatagtcacattcttttatggtttggccaatattgtcatgatatttgcacctcttatttggatctcttttttgccctccgcccttgtacattggaagaggcttcttgtaatgaaccatgtaacaagttgccttatatacattctctcgagtatctataagacttgtatactcaatgtatcttgactcttaggtctttcccttctttgcagaatcattctgatttggaccttttaaactctttttactctgtgactgggttatgttggactctgtaacttctgctttttggtttgtttgtccaggagcagcactgtattcggtttgtgcaactttaaacccaaaaactagcctctgcagctagctgcacagaagtacttggtttataaatcgtaagagttttaaaaatagttggtggagggtaaatagacggagtcgccatctacaaagtttgggcatttggtatatcggtggaaggtgctggaaatactacatatgattcagtataggcttcttctaaatttataaatccttgagctcttgtcaagaaataaattagagtgttttctcttttgcattgaaggtctccccacaacaaagatctagttgcaagtcttaatgttaaggccaccattttcatgtcattagtgaccttagttttagcagctacatccatcatgcattggatgtttttcttcaagctttgtcctagttctttcttgacgttggtcagggagatagctttcaggtcgaaggttgttgctacaaactgctttttaaacattgcttgcagatctctccaattgtggattgatcccggagataatctcctccaccagtcctccgtagacttatttagtgttagtgaaaagcataaacaatttactcgtcactatgcataatgcgattgtatttggataggtggtccctggggtccgtcattccttcatacagttccatctgtggcattctaaagcgttccgacagtgtgcttctatgattcttttcac

SEQ ID NO: 239412 - DNA, 1442 bp, Cannabis indica
aggacaacactcacaacatgttttgtgactgctaggtacacgcctagctcttcattgtctaagggttttgacaacacacgtggttgagtcaattgtttctttagctcttggaatgttgaagaagggtaaaattcttggtggctgatcagaaaggtgatgtgagttggtactggcgcaaacttcttaatcttaggaatgttttcaatggagagacaattttggatgatggaaaagggggaagatttcgggtcagtaagctttacaattattttcttactcctcatgctaaagttgataatcacaaaatgatttggtgtggattatccgcaccaaagcatatatttattttttggcaagcctctcataataacttattaacaatagatcacttgttggcaagaggtatcgccattaatcctactagctgtctagtttgtcgggttagtgatgactattgccataattatcttttctttaattgttatttttccaagcaactcatgcatgttatttattcttggattgttaatgaaattttgtcggcgtcttattcatattggctttttgtggttgaatgatcattgagatcacaatcttttttatagggttgatgtggctgtttgtgcggttacagtttattttatttggtggaatcgaaatacttgtatttttgagcaaaatatttttatgtttcttatgtgaacaatttgattagatttgctctaaaagtgagattattatttgttgataggaggaatctatctaagaaggaccaacaaatttttaattttatttgtaacatgtaagtctattttttgttgtattgtggatgctaatcttggtaacatttactctattttgatttgtaaaatttcttcctttaataaaaaaaatgaattttatgtatggtatatggatggttcgaggagatggctctatcaatgaattttaagtatggtaaatggatggttcgaaaaaatacctctatcattgatgcctattgtattataactttcatgttttaatataataacattttatttcgaaaaaaattattatcaaaatttagacttggaatgttagtgcaaataaaattatagtggaagagtttagccactaaaaatttaatagaaacaattgtgtgctaccagaccagaatctagtaacaactataccccataaattgtaaaaaaaataaaataaaataagatagaaaaccatatccaagtatttttccaaacacaaagtcaatattctttgtttctatatttacaaacccaacaaaagatgactattaatttaaattaacaaaactcttcacattcaaatcaatataaaattaaataaaatataaaaatgataacaattcttttacttgttcatatttcacaatcatgaaatcggcactaccgcaaaattgataggggaaatgttgaagaaga

SEQ ID NO: 239413 - DNA, 2502 bp, Cannabis indica
aatacttttgaaaaaagttataaccaccaagttttagaaaaaataggtaatttattatataataatataaacataaataactatcctttttatttataataaataattaattaaaaaatattataggtttataacaaatttttaaaaaatattattttaatatattttcaaaaaatatcactaaccacttttcaaaaaaatattatttttatatagtgtacatatatatataataaaatataatttaaaaaataaaatatcttgatatctgtttttttaaaaaatgataaatatatatactcaaaaaataataaaactacttttaagaaaaaaaaaaaagaagatatatttgaacatattaaaataaaaggataacgcacataacaaaatatctctattttttttattcttattttatttttccaatttataatcctattattaaaataaataaaacataatataatatacacatatacatacatatatatatatgatatgggtggggaatagccataatgtggcagtgagtgacggtggtggtggttggtggtgactggccggtcacggaggaggtcgccagtggaacaccgacagtgatgggtagtggacggaatcaagctccacaagagcttagtcgggtcgtgcgacccgtttggagctaggatgctccgtggaccacggtggtcctccacctccggtcacgtcatcgaccacgggccattcagggccgatcgacccctcttgctccggccacggaacatcgggtccctacggtggctttagtgcaaactcgaaccctcaaacggattggtcaccctttctcacgtgcatggctttgcatgcttagcatgcacacatgattttcacgtgttttgaccttatggcttcgagccacaacccttcagggttcgtggctcatcatttgaggtccaaaactcatcatcttgatcagaccaggatttactccttaaatccgagctcacccatcaatggaggtattgtggactttttgatgttacaattttcaaccaaaatttacaaattaaatttaaaattaaaattacagcaaaacctaaaccataaatatggtgtacaatttttctaataaaattgtaaaatttccaacccaattttaccatataattagcgattcacattcatgcataaaaattaattccatccattcacaatgtatcattatatatataaatgcataatcacccaatacagtatttaatctatattgttgacttaaaaaaatgataaatcgacagcgaggtcgtatatatctgataattgccacgtgttgcacaaacaagaatgaaagtagtaaaccgatttattatagaggttcaacccccttttgataatgggtaatgacctactatctttttagttatattaataccgaggattaatactatccagatcattatagatgggatctgctatagcacccttaggaatacaaagtatgaatcaagaatggcaaaactcaagtgttaagataatgtttgtataggcgtgtgagaggggaagtgaagaagagaaaagttgtcaaacttaggcttagagcttggaggtaggttttaggcttaaattcagcttaggtttctaggttagagttatgacctttatataggaggcctaaaccctagattacaacttgattacctagatatttgtatagtttattagttaattacaaaagaccaaaatgccattgaatctagatattattatgctattctattcggcttttagggcccaattcgtagcctaagtgtcgttgtccatgtgtagaagtgcacaggagaccctacagaacacctcgagccggctaggcccctgtggagggtagggtggctggccatggtgcagtctgaaggcttggccaactagctcttgtgagggagctagtatgtcacttgatgcccgtttgagtgtcgggtgttaacgcagatttttgttacctaattaataagcctttttcgtaatgaattaagcacataaattataagagattgaaaaagaatagtaataataatgatgattaccaactttttttacgtggttttgcagttaactctgcatagtctacgagtctatcttattcaagatatttctcgatacagaattatggttttacaattaatgatctttttctctcaaaggttttctgtctctttttctgtataatccgcccctatttataggaatataggttggtagttatttaaatttgaatttaaaatacataactattttcacaaatcgtgggctttgaccatgttccatcttaacaagtgtagagctaaaaattcgcataactgtttgttattcctatcattaagatagtggacgctgacatgggacacgagcaactcgctagaggctctctttatacatagatgaatgacttggtttattcatatgccttccagcaatgacatgagcactagtgtattgagcaaacttaagaactgctcttgaccataa

SEQ ID NO: 239414 - DNA, 730 bp, Cannabis indica
aatatatacactgattgaatatatctgattatggaaaaaaaaaaaacacaatattaatttgctaattaattctgaatatttggcaaatactttgatgaagcatttacaaatagtataatgaatattgagggtttgacaaataaatgtgtacattaaagctaaaaattgtaatatatggagtaagtattcaatgttgtgtaataaagagagattattactataatgacttttgaaattcaaaattagggaagttttagttgttggaagatggttttggtaactctcaactcaagtcctctccattaatccaatttacacccattaaagacctcttacactagtcatggggtgtagattatttgaatttcaaaatggtgatcgcaaaacactatcagtggctagcctagaggttcatttgaagacacattttctatcttacttgctacaaaattctatttgattgcaatttcccaaaattatatttccattatttcctctcttagtcattactgatgagaaaaataatttttttttacaaaattgtaagactttgttcaaattttggtaatctctttattagtttacactcaagattgttttcgtatagagagtttgtactatcatctttagttcttgcttttacttgttagaaaacaaatctaaaatacacatatagattttagactatcaatatatgcatgcattaaaatatatatatttcatatatttt

SEQ ID NO: 239415 - DNA, 4015 bp, Cannabis indica
aggtgtattttgttctatttggaaatcctttagaagatattgtagccatgtaatctcactacttgtggcagccaatgctctatactctgcttcgacagagcttttggagatggttaattgcttcttggtcagccaagagattaagcaaccaccaagaaatatgcaaaagccagtagtagatcgtctggtggttggacaggaggcccaatccaagtctgaaaaacctcagagatgtagggaagaagtggtggagtagaggatgccctgtcctagttgtcctttgagataccgaataaggtggttaatggcttgcatatgtggtgtccgagaggctgacatgaattgacttagttggtggtctggaaacgtgatatcaagtctagacaaggtgagatatagcaggctaccaatgagctggtagtctgttgaaggatttttaagaagggtgccttgttggtcatctaacttaatcttggggtctataggagttttggatggtttgctgcctgtgtaatcaatatcttctaataattgcagggtgtattttcgttgggagagaaatagtccttctttagcacgagctattttgaatcctaagaagtatttcagtttgtcgagaactttgagtttaaattgggcatgtaaggagatctggagctggtgcaacagtgtgatgttcgggccagtgatgatgatatcattgacataaacaaggagggcaatgaaattactgttggagcccttagtgaacagggtgtaatctgattgggattgagtaaaaccttcaaggatgagagcatctgtgagtttcttgtaccattgtttggaagattgcttaaggtcgtagattgatttgtggagttcgcataagagacctgcctttgcagacaaagaagaagggagtaagtccttgtggtatagtcatatatacttcctcatggagacatagtccacactttgttcccatcgaggcttctttcacagtttttggctctaaggaagaaacaaaacacaagaattgaattatattatcaaattttcttcttgttaccatgcttgtttctaaggatgattctatttaacccttgaggatggtttcctccgaattggatcagtgatcacatttgaaggacgctcaaattcttttaatgttgatgattctggaaaaacaacatttgtagctacagaatcctgtgatgtagtctcaacaatagcttatgtagctctatcaatttcatttgtcacataacaactctttaatttgttcttgttgaaaacttagagaaatcctttaggtcatcaacaacattggcagattccattacagtttgggtaatcatattatacacgcaataagccctactatcctataaaaaacaccttcatcactttttgcatcgaatgttccagtgtaatcctgatctcttaaaatataacaaacacaaccaaatacatgaaaatgacttacatttggtttcttacctttcagatttcatatagtgtcttgtgagtacctggacgtaagaacattatgttgatagtatagcaagcagtgttgattgcttcgatccaaagatgcctagtaagcttcttgctatttaacatcactctagctatttttattagagttcagttctttctttcaaccactctattttgttcaggagttttaagagtaggaaattcatgagaaataccattagatttacaaaactcatcataaacagtattttcaaattcttttccatgatcactcctaatatgaaaaatcttaccaatgttacaatctttttcaactattaattttaaacacaaagattagaaagcctcaaaagtgtcagactattctcccaaaaaatctacctatgaaaaatgagaaaatcaacacacataaaaatatacctcttacaattcaagctttaaacctcaattggacccattagatccatgtgaaaaagctcaaggactctggaagtattcacatcaggaacacttttgtgagaaatttttaattgtttaccaagctgacatggtctacattttcccatagattctttacctaatttaggtaatactcgaacaaattcttgcatttgacaatcttttaaaatttttgaaatgaatattgccaagtttttcatgccataaatcagcagtgttatcattagcagaatgacaattagtatacgtagtgagagtgtaacagttatcactaaatttgagcccttgcaagacaatttcatcaagaatataataaacataacaatggttactatcaaagttaacaatataatcctgatcataaatttggctaatactaagaagattagcctttagcccttagcccttcaactaacatatcgttcgtatgtctaggaatgctttcaaaattgagagttccccttcctatgacttttccaactagatcgttaccaaagataacttcttcacactgcattggtctaatgttgtcaagatagtctttctcacctgtcatgtgtctggaacaatcactgtcaaaatactacatgtgagaagtaatagatttaaaacaagaagaacgaaccaaacatttgtttttgacaacccatttttgtttttgagaaacttatttatttccaaaataattagaatgaaatatgttttgcattgtaacacattttggttgaatgtgaccttttattccacaaaaatggcaaataggaatgaatcgtcttctaattcctttgaaattgtctatcttactgtgctgcttcctttctgtatcaacactgtattttgatgaatcaacagaaccctgcaaagtagagatagaatgtccagaaacaaaatatttcaatctaaaaaatttggtatttgatttagattgagccttagcaaaacccaaactagcatgacttgtttaaccagaattttgaatcttttcaaaaatattggaaatggatttagcattttgacatttcttttaggattttcaagctccttagttaaagaaataatttcagaaatttttgaaattaattcaaattcacaacattaatttttctcttcaagatctctgatgttttgagacaaattcttattgactttaaccaaagaaagattttcaggatagatttccaaccacttaccgaacattaccttataagattccacgaaagagttctcatcaagttctgactcctctgaatctgatccaacttctttctcattgtcatcagtcaaggtattgttcaaacatatgatttttcctttttcctgcaaatcacttgacaaaatacttgctaatgcaaaattttcattataatcctcaatactttcaaaatcatcactccaagtaacattgagccctttttatttgtcttcaagatgttggcgcattcagattgaatatgaccatatccttcgcatatcctgcattgaatactttttttattgtttagaacaaaaggtttagagggattattacatgaattgttacctcttggagtttttgagaaattcttttatttccaataatattcatgtacttctgaatttttttttatcaacaaggtcatttcatcatcatttttagaaattttaaaggcaatatacctttgcttttctcactcaaggcgctttgcttgctctttttcttgatttattgatttaacccaaaagttcttaatgaacccatgagttcttcaatctttattttgaaaaaaaaaatattttgcctcctccactactagtaatttcgtgtcaaatctgtcaggaagcacacaaacaattttccaaaccaacacaaatccatctaatttttctccaaaagcaaaagactcattagcaatatcagataatctttcataaaattcacacaaagtttcaattttcgacactcaattcatcaaatctagtttgcaacatggtaaaatgtgatctctttatatcagcggtacctgacgcttcttttgcagattcacaagatgatatcaatttaataaagccttcaccaacaccattaaaaatagca

SEQ ID NO: 239416 - DNA, 845 bp, Cannabis indica
gcacaaaacccaacacttacatcctactaggcacttggggtgcaacctgcaggctggcaggcacttggcgtacaacctgcaggttggcaggctcttggtgtgtacccttcatccaagacaacaagctaagctacgattcgggcttcaatgaccaacgaaagtaggggagtaatatcagctattcccctattcttgggggataattactctatttaatatctattatttaagtatgtaacaaatacttgatatttcttatttttgagggatattttgttattaatctcttgtaagctctcctatataaagagcattaacctaaccctagtttctttaagtctctaagctccctaaagctctcaagatctaagtctaaaatcctagctctacctgtctctctcttctacgcgccctaaggcctctctctcacttgagatttgcctacttgattcttatattgtaatcttttgagagccacttcagaatccacaacacttgtggtctgagtggtattatctctggtattaatacaaccaaaaggggagtaggtcattacctactaactaaggggggcaaacctctataaaaaatattgtgtctcttttattttcctattcctattgtgtacacgtggtaagcatcaataataaatacgactctactctgctatcggttggccaaatctgaggttaacggtttggtgcttttattaagagtgagttgtcaatttatctgatataacaccatggttaactcaaggagaacttcgactacaacttgtctcatcagatcttcctcaagaccctatgactgttgatcctgatgttcatgttccagccacaact

SEQ ID NO: 239417 - DNA, 1423 bp, Cannabis indica
gtggctaactgctccaaagataaaggtctggtttgggtcagaaaacaaaagggtaatcataatggtgaccaggaaaagggtagaactgaagctagtgcagcaactcaggggaaaaaccagaaaattgttcgacctaataagaaagataaattagtaacagttcaggaaaatgttataggggaagcaaaggcaatagaagcaagtcaagaaatagatacaggggcaggaaatgattcagatgcaaatagtaagaatgaagcaacaactagggagggttaagattggattactccaagaaagaagagatctaagggagatttgacaaatgagaatttgattgccacaataagcaatggttatgctgtgctccaaggggctgaggttagaaaattggatactaatttctccaccttgactcatggaacaaagtaatattttgggttggaacgtttgaggcatgaataaaaatagcaaacaaaaagctattttagatttgtgtaggcagaataaaattggtttaggtgctctctttgagactaaacttagatatgatagaattgagaaaatcataaagaataatttccctaactgggaatattactctagccccactattgctagcacaatttggctattttggcagaaatgttttgttaaagttcaagtgcttagtgaaagatagccaatatgtgcagaacagagtgaatatatctggccacaacacattctattttacagttgtgtatggcttgaattctttaatggagaggaagaccctttgggataagctgctgtgtttagggcctttgaatgaactgtggcttatgataggggattttaatgctatgtttggtttcaacgacaaatgggattggtgacctgttactgataatgaaattttagatgctcaagcttggttagctcaagaccatatggatgaaatgagatattttggttctaattacacctggtccaacaaacatggagttggggacaaaattttctctaaacttgacaggattttttcgaatgaagaatggtttgatagattccctaacacggaagccttttgtaaattagatgacatctctgatcacaactattgtattattaaaaatcataaaattggtaaggttggaattaaacctttccgtttcttcaattgttggatgcaacacaaaagcttcaaagaggtggttttggaatgttggggacggagcatcagcaagaataatttgacaggtattatcagcaaacttcttaagctaaaacatgtcctaaagaagttttctagagctgaaatgggggatattattaacaactatcatacagctaaggtgtaacgccctaacaattaggcacgttacccaaggtgattaagaaaccctaatcccctaaactggattactagaaagataaacac

SEQ ID NO: 239418 - DNA, 936 bp, Cannabis indica
aacttaggttcttgatcattttttgactaaaattaaagacaaattatgttgaaacaaccttccattattgtaatagaaacattattatttaaaacttaattcaaacttaaacatacttctttttttctttcaaaagaagttataaaaggtactgaagagaaaaccttcagatcacaaaacataacatatttgtgagtcttgaaattcttacatgagatttattttattaggaaaactagaaaggtagaagagacccaacatgagttcatatgtgtgcctctctctcatacactaattaacattacttttagtcttttattgtggaagcttgttgaacttgcgatggcgatactctgcatatgttttggtagaaaacttaggcaagttgtgttcatcgatgagctccggcaaaggtccgatcatcgtttgatggggaggggcacaaaacaccgcccatgacattcgagtctctttcttgttcaccaagctcctatgaagaacactcttgtactttccattgcttagtacctttttttttcaagtttaaacaagtattataatcagatgagcacataaaaaaataaaataaaataaaataaaaatgagtctcagtttaaatttaaataaatatgattagtttttttttattttttttaaattaaaaattatcacgtcactgtttataatattttagtgtaatttatagattcacacatcgtatgttatgataataggagtttttataaaaatactggattttaggcaaaaatttacaattttattgctacacgatttttttttgaaaaatactatctttttataaaataaccataaaacaacaaaacagaacaattaaaacagtgaaacaactaaaaagtaaccgtgtaaacttaacacagtatacagtataaaatttacatagtatttttgaaaaaa

SEQ ID NO: 239419 - DNA, 1923 bp, Cannabis indica
atgagtcaaagttctgaatagttacatgatcttgacctgtcaatggaataaccgccgttttgtggctaaacttatttggacagacctatatatattcatgtgaatgaagaagattaataaaagagtcacttactatattatagtatgtgaattgagtagggtacctttttcttcttggtaggtcttaagagcttagtttgagattgagtgtgaaccttaattaatgacatgaagtcttctcaatttaaaagtaagactgtgaagagatcaaaaatgatatttttatgacttaaaacaacttggcatagtaaacttatttttaccctttgaaattaaaaaaaaaaaaaaaaagttagatgcttgcttctgaatcaagtaatgtagcagacaaactacaatggttaaactctataacaagaaatgtatagaacagaagatatatctagtttcttttcttccaaattttaaattaacatttgggcaagtcattttagagaatttaattagtcaaatatgttccatcaccaacccctgtccccagaatttttttttttctttgcacaatctttacttgcataactttaagtttttttcatggctataatatgtagacgtgtttctatcaaatctctcttagtttaaagactatgacacttgtagcataatccatatgagaacaactactactcccatttctataaggttctatctaataccatatcaaaaatcatgatctaaaaatatatatagtgacaaatttgatagaaatatcaaacaaagatatttaaaacaatatttggaattgtaatcaaatgtacaatagtgttttaagatgaaacctcatacaaaaaataaattactactaatcaccattaaatcatctcaaatgaatggccaaatttgtgatgtaatactatatcatataattttgtaaaaaaagaaaaatatatctatatatatttttaacagctacaaaatataattatacgagttaaatttagcatctattatattatcattagctaatgataaactgtagtacacacttttaattaatatttaatttattaactatcattaaatatttttttttcatatcaatttgcatcctaaaatattttgataaatataatatttatttattattgtgctaatagaaaaaggcaatcgtgatgcctagtacaatgtcctgcccagctctataagtttatatgggtccaagaatttttgttaatagggggaataaatttcttttttttttttttgcgtttttttatttttaaactttaaaaatagttttttttttcatttttcatttttacggaattctacatacaattttttttatatatataaattttaaggtataattttacaaaaatatggtttattataaaaaaatatatatattttatgggaaaatttgaaaagaaaaaaggttaaaaaatgtgaaaaaaaaaacaaaataaggcattacccttcttattagctaaggtacatggttatctttttggctacccatattgactttctcatatttttttcaaacttttattgaattttttccataaatatctttttttcaaagaagaaaactccatatttttacacatatagtaaatttttttcataaaatatattttttaaaagaagaaaactccatatttttaagattcagcttgtttttaattattagaatttgagataagatgaatgagattccatctcaaaatcaattagcaataggaggagtagcacattcctgctatatattctattatctttccacacattagcaatgtgggactctctaacatccccttcaagatggtggctattatatatgctcacaatcttagacaactcgatcataagctgctctttttttggctcactatccctgatcacaagtggctcttttgc

SEQ ID NO: 239420 - DNA, 1526 bp, Cannabis indica
tgttctatgttatatacaaatagatcttgggtttattattaatttttccaacaatattacctgtcattatttgcccttttggggtctgcaaatatatgtttaatgaatctaattagagcaatttacttatgtatgtgtaaaaatgtgagaccatctctattggacgtgtacaattattttaacactcaaaataatgagtaaatatcacattttacaattatattttaatatattaatacaaatcaataaactgaaaaattaacaaaattatttaattcatatttaactacattaataaaatagtcgaaaaataaagttaaaattttataataagataattttttttttactatatttggtgttaaatttcaacacaaattttagctagtatatatcagacttagtcgacatttttgcatatataaccttttcaagtacgattctgtcaaaagtattgtgctaaaaaaataataatacacacttttatatatagtagctataatttggatatatagatttattgttttgaaaattgttataaactaagagctttgccattattttctgcattttagtttcaaaactatgttttcaaaaataagaataacaaataattttttgcaaaattcaaaacacaagagacacactttgttaatattctttaaaaatactttttggatatttctattccataaagaaaaaaaatacttcaatactcgagaccttgtatggactcactatgatcctaaccattgactttgacctagcctcgactcgaatttggaccctgaggcgcccaaccctaacccctaactcacaccaggtactagacctagacctcgatgccaacctcggacccagaccttggcccagatccgaccctaaccttaaccctggccctagactcaaacctgacccctgaccctgcaccaaacagcctgacccggactcgaccccaactctggaccacgaccacaaacctagatctcgacttggacctagctctgaatctcgaactcaaactcgacccctaatcaccctaagcatgaccccaacctaggcaatggcttcgcacatgggctcgaaaaatagtatatgaaagacaattagtgatgagagagaaaaatgaggaaagataaaataatatgaggagatgatgtaaaacaaagtgaataaaaaatattgacaaaaatcaacattttgttgttttcaaatattttattttatttttatttatttattttttttttgtaacttattactgtcttctaaacacacaataaattaataaaacacgcttaattattttcaaaaaatagttttaaaaaaatattaatggcaaacaagcactaatttccaacaaaattattagaccatctccaatgggagatgtagaaattgtgttatatttgacacaaaaagtaattttatggttaatttatatcaaattttagctatgtgctctataatagacaatttcaaaattttgacgtaaaatttaatatcaaattaatattttattaaaa

SEQ ID NO: 239421 - DNA, 1312 bp, Cannabis indica
taatttattttattttttagtttcatacttttttatgttaataaactacatgaatttagtgttgatttttcttttttacatgtgatagaataaagtatttttaaattattttttatcaaatcaatataaatttatattccgtaaaaaaaatacaaaatagaaatttaaaaaataaaatcttttgtataatataaaatttagtgattataataaataatattataccattattatctttataaataaaatcttgaaaaaggatttggtaaactatatattcagatgtttgacatgcaaatagataaaggttgaacattagacacctgcgagtttattacaacctttaatttttctcgagtaaaagtgggaggacattattatggattttgtgattgagttacctagaatcacaggtttgtatggttcgatctaggttatattggattgtttcactaagtcagcgtacttcctaccagtgaaaacaacttatacagtagatcaatatacagggttatatgtgaaggatatagatcatcttcatgaggctctgaaatccattgtattatatagaaatcctaaattcactttcaagtttttggagagtctttaaaaaccatgggtacaaagctgaaagttcagtaaaacttttcacccttagatagatggtcatttcgagagaaaaaatcagatattggaggatacgttacgggcctatgtaatggattttgagggttcatggagtaagtatttatcgttgatagatttctcttacaaaaacacttgtcaaactacagtagggatggcttcctatgagatgttgtatgacagagagtatcattctccgattcactgggatgaaatcgggaaaagtaattatttactgttgatatatttctcttacaaaaacacttgtaaaactacaataaggatgactttctatgagatgttgtatgacagagagtgtcgttctccgattcactggacgaggctcgcaagccaactgcacctaatgcagcaccaagtgcactcttgcacataatcttttcgcaaagtactcactattggcccttcggccctactgcacacccacaacttcatgcaaaaggtccctctgacccactgcatacgtgctcttctgagcttctttcatgtggttaatgatctatcaatcacctaaaacaacgaatttgccctctggctcttgctcgtgtcggctctctaacactgtgccacaagtccatctcccaaaatcaactctgcatcctttgacgactcgctacatttttaacaacttgataacacgaagtcttac

SEQ ID NO: 239422 - DNA, 1445 bp, Cannabis indica
ctatacttaaaatactaggatgtaatagccaaacaccgcgctccaatgttgccgggcattgaaaatgcaaaatcataaaatttctatatgtgacacaaaaattcattttgaattcaaataaaacatcataaatgaataatttagaattaataaataattttcataattaaaccctaattatctgctaatttctaaatttaagctaagcggtctttacaacattccttttatcctgacacgtgtccctcattgagaaggtagtcgaattttgggtataacaacaacacagtgaaaaaacaatgcgtgcaagactcgagaagtggagaagtaaggacctcccaacaatccaaatttttaaatagaaaaaagagaggtatacctgaagatgaaaagcttgttgtggaagattaaatggaatgctgaaactatcttgtcgacaaatctatgcaaatcccataggtggtaggaataatcatagcctccccctagaacgactcaagacgacggctaccataaatggtggaacaggaaaagacttgaaggaggaagaaaaaacaaagaaaaacaataagaactaaatctaaacacacttagtgagatcttacgcaatcaatagacaggtagaggagtgaaagagcaattaatgagtgatcagaaggataaaaggacaaaatgcattaagagcaataaatgcaaagcaagagtagcagaagagttgcaagtcaaagagaagaaagaacgacaaagaaaatgaaagaaagcaagatcaaaataaaatcgaaacgacaccaaagaggcaaaaaacaggattagatccagaagaagaagaaacaggattgaactagtaactccagatgtaacccgctagagagttccagaactgccattagagcagcgtaacagaaaacagagaacaaagaaagattttattgaatagagaagtgtattacaaagtgaatgaatagcagaattacaagatactgatatatatacatgactaacaaccgaactaaggacaactaactaagctagaagataactaattagcagaaaaacagttaacggtatttactgtcaagaggcaaaaagaccaaaatatacataagtctaatattcccccctcaagatggactgtatatgtcatatacagccatcttgcgaatatgggaagagaggatggtagatggcaaaggcttggtaaatgcatcagcaagttggagagtagtgtttactggtatgagccgaattgctgaagctttgatcttttcgcgtatgaagtgacaatctaattcgttatgcttagtgcgctcgtggaaggtgggattgttagctatgtggattgcggattggttaccgcaatagagaaatgcaggagcatcttgaggaatttgtaagtctttgagtaagtattgaagccaagtgacttcactgcctgcagtggcaag

SEQ ID NO: 239423 - DNA, 1951 bp, Cannabis indica
attttattaaaaaaaaataacaactcgcccaaaattaaatattattcatttgttaataatattgctcactcatttgttaatttagtgatttctcttttgctgattagtaatattattggcaaaattagctcattcttcgatcattttctttagtggttgatttactcatgagattttaatgagactatttttgtttgggataagttgaaaaatacatttttttttatttattaatcaaaaataccttatattatattttattaaaatatacccacttttataagtgaattgtccaatatactctcactttctacttaagtctagcatataatttatattaactaatgagtgtaatgtgggcatcatctataaaagtaggtgtatcttaaaaaatatgaaagtaaaagtaaaaattaaaacaagtaaaataaagtgagtataaaatctaattttatcttttaaaaaatatatatcatttcttaaattttacccacaatctttttcttccaataatgtttttttttttttgagaaattcttccaataatgtttaaactgtttattaaaaagaaaaggtttaaatcctaaatcattaacaataaattcaaaaatatctatataaaaaagggtaaatatcattttagttcttatattttataaaagttattaattggaccatctattttattaaatgacaaaataaaccctgtattttctaaaatagtacaaataagtgtttatattttctgaatctgtttgtattaggaattgtcttcaagttagttatattaaaaaaaaagttatcaaaaattaaactcaagctcctaattttacaattttagaaaatataaggtctattttgtcatttaataaaacaaaagtccaattaataatttttacaaaacacaaaattcaaaataatatttacgctataaaaaaaataatttaatcgtacattaataattagtttgatattttttttaaacaattttcaaatatcttatttctcctatataatcgtaatttttctccaatatctttttttttttttaaattttgatagatttttcgaaaagaaaaaaaataaataaaatatccaaatgtggcttagcttatatctcacgccacataataaaatgtcttatcatttatttattattatttttttgagataaaagttgttattatcattattattttttatttgttaagtcttatttttaaaaatataattatttattagtcttattaacgaacttcaaacttttcatccaaatgattttcaaaaaataaaataaataaataaaatagtaaatttacttatatgacattttgttatttctacgtaataaaaataattatttaatatatattactttaaatcttgtcaattttcttttttcagtctcttctctcttaagtcacatatttatactttatgtaagatattaattagagttgtggaaaagccaaaagatatatctgtttatgacttttttttttgttttttttttatgtaaagattactttactcattttataaaagtaaaatgtaatagtattgaacacaacaaataactacttgagactagctcaagtgattataggagagtacgtgtgtgttagaggtcttaggttcgagtcctaacttatgtatggttgtaatataaaaacgtttaaaattaaaaaaaaaaaacaacaaataataaaaagtagttttagctcaataattattagtgatctctatatttgtctaagcattattcatggagattaaaaaatattctcatatttaagttttagctcattttttaattttataatttttatataatttaaagatcgaactattttaattcatctagtaggcagggccggcccaagcattgggcagcttgggccattgcacaaggcccccatttttctaaggcccaattttttttttttttaaa

SEQ ID NO: 239424 - DNA, 1822 bp, Cannabis indica
tagggttagtggcaagctacctaagagtaggtaagaaagcatcaactcctccacgaaggcccttagtctgaagattcaatagcctcttgttagtgagtgtggacgatggtgaaagacatcgaggaacttttttctccttagtccccatgggacgtgcctcctcatactccacctcgacatagtcttgatccaaaaccaagaccttgctaaactttgagacggtcaaataggcattgttacacccttcgaacgtgagagcttggggagcctctttctcctcctctaccactacctcttatccttcaccatccaaagaagaagctgcacggacctcgtcctagtcctcaacctctcgaacttctttgtccccgacgagcatctcaacatcctctgtagaatgttcaacctactcttcactagccattgcaaagagtcgagaaaaatgtgggtcctcaactgaggcccttttgtaactttttctagttttctccatcaccttacgcctagacggaggatctcgtttgatggtatgctttgcgatgctaactactatcaccgctagtacaaaatttatcttggagggctttgggaggccctcgagaagtgtatctggaatgtcaactcggaccttatacgtccacgaagcaggcaagtaatgcccccaggctctatttgattcccaaatgaacccaccgtacccttctccactgatttggctggggtagtggtgatgttgccccacgggcttcgaagactttaatgagtcaattgtaacttccaacttgtcaaacctcaaggtcgatgaactctcactcggagaggatgaagcaagtcgttatctatctggtgcttacctccccagaaagtgcttgggttcatctataaaacaaggaaagagaggtaagaaccagacaaagaggtatgattttttgcaagagtaaaacatgtctgatattttgaccagatggatttaaaagcaaaaaaggatgaaatttcattccaataacaaaattcccaacaccaaaggcttaatgaaagacaataaacctggaaaatacccataaattttgaacaagttttttcaagcagttttaagtagaacaatgattggaaaataatggagaattgggaatcgtaatccatacagatatatttaaactaaaaaaattacaaacactaatttccttaacctctatcgtcaaggaacaattttgcaaacctagattttcacaaaagaaattcaaaaataaagtgaatgaatttaaaagaaatgggaaagtgaacaagaattactcactgcttgaacgagaattactgactacttgcatattgttaaatgcacttggacaacttcagcaaatcaggttttcagaataaattcttcgaaggatttgagtgaaaaggaaaatttgctctggttttttgagaattaaaattgttaaaagagtgtctaggaggattgaatccctttccataaatgatttgatgggtaattcaataataaagagacagccttatcttcatactccctccatcaagtcaagttagagaaagataaagcaggaagaattaacatgtgtcacccatcctaccaacttaacgacagaataagctcacgtgcgagcaaatggttcccacacgaacttagggggcacatattatcctgaatgccacatagggtgatgtgatctctcgcatggtgacacatggagaatattcaaaagtctagataggtagttttccctcaacagcccagccaaagaactctctacttaaaattgtccaagttacatcttcaacagggatcatctgggcaaaactt

SEQ ID NO: 239425 - DNA, 1126 bp, Cannabis indica
attaaaatattatttttttggtccaaaatgtattcttagatagaagttctactgtatatatatagcttgaaataaaataatcaaagtaacttattgtactgtctcatcttcatccttttctatatgggctatggagttgtgatgcttttaaaaatctcactgttaattatttatgtatagtttttatttcaaaacacattagtctgaactctccaaatgtgatagactaggaatatttttaaataatattaaataaatatttaaaataaattagtgacatttttagtcaaatgtcattaaaatttatatatatatatataataatgatatttttaagaaaatgttactaaatgaaatggtacctattaattgtaacattttttcttaccaaatgtagtgttttaatgacattttttttaccaaatatctaagtttgattttggtgatcatcttaacatataatttcaataagttaatcgcaaatgatatttaaagaggttatgacactagaagagatttcaaagagatctatgtatttatcataatagtttgatattttctccctagctagtttggaccacatattcaactacttgacttccagctacttttacacatcaaataattgaataatacatagagacattattaataatagtcaagtatttgaggtatgccacaaatgtacacatcaaattgaataaatggagataacatcatctatacatttctgcctataaaatggagataacatatctctacgttcaaatatatcacacatatataattaactatatatggctcttatttcatcattagttgtgatgcttttcaaacttgttttgttgtttcatcctctcctactactctctaatcatcatccttttgttaattctgtgcaacctttttgccatgatcaagagaggaatgctttgatccacttcaaccaaagctttaaaatacattgccaacctagagtcgatacaatacattaccctattcttgtgtatccaaagacatcaacttggggatcaaatagtactaattgctgcacgtgggatggtgttgactgcgacgttgtgactggtcatgtcactggtcttaacctcactcgttcttgtctcta

SEQ ID NO: 239426 - DNA, 999 bp, Cannabis indica
atatatatatatatacacaatagctttaggaaggaagttgcaaggacaatgtctacatatatatatatatatatatatagtccttagatctatccatcacctaaaatactaagatgtaggctccaagaaattgttagggtaaaaatttaacatgaggaaggaggaagaaagagttctttgaccagtgcacggttgtcagtcttggaaccacccatccttgagccaatgtaatctattctaaagctcataactattagatgcacctcttaccattaaactcagcctagaaagtgacctaaaactatggctaaaaataccctaacattctttttttggacaccaatagtgtctagcatgatatacctatcaccaccatgagtgttatacggtataattaagtagcaggtttaacatattttaatttaacaactgttataaatgattcgttaaacattcacaaagtatcaccttatagttttggtgctagacaccactaaggccatctccaaccttagatactaattttggtattgcaccaataccatatagatgttaaattgaatgatgcaactacaatacttgttttgaccaaaagtcgtttattattgatcaaaaagctactcaaattcttttatttttttgagaaccctttaaccccggttcattcttaatcttttctcagctttccccaaggtcccctttttctcccctgcatctcttccatttatctctctcttatccttagttgttaaccttataagagttttgtttgacatgtgtcttttattccttatgaagtgtcattatatatctttgacaagtgtcatttatcaaatgtgagtcatacgtttgatatatgtgagtcatcccgtccaaaatattgagtgatcccccgtccaaattattgagtcatctcgtccgaaatataagagtcatcccatcggagatatacaagtcatcctatcagagatcactactacaaaatttactattcacgtc

SEQ ID NO: 239427 - DNA, 1500 bp, Cannabis indica
caataatcttgaagagagatttttgaccccaatatttgaggtcaagatcctcaagttgcacccagataggcacctgcttcacatcctcctttccaaaatttgtatttggatcccagggcttcatagtcacaggtcttttattgaaaaagatataccctccattcagcacttggtccctattctccatcgaattgaatcttataatgaagcttccataggttagcattttaaccttataaatcttgtctttccagattcggtttgcaagaccttctgaaatgtgcagcggagggtttgatcccaaaacatagcacatgatggagggtctccaatagctaatctcttcttcaatgtcttccagggtgatcttgaccttcttaggtttatcaaaatgcttaaaatactgttctaaattcctaacgactgatccagatttgagaataggaggtatcgagaccttaccctgattcaagttactgttacatttgtggttcgcttgtacaaactgcaagaaacccaatctggcatcattacctcgtttgatctcattcagagaagcaataggtgaaagcggagcttggaataaatttgggagctctggtgtacccctcttcccttcttgagatgcatcaggctcttcatcctctttggatagctcaagcggagctatgccaattatagcatccatagattttgtacgaattaaatctgatacagtgttagggccattcttcttcggttcgtgatagagatcttcaattttccttgctatttcaatctagttttggccatggcgccagcttccactgctatagagaaaaaaccaagaaaatcttaaaaaaaaaatacaaagtgttaagatacaatgcttaataaaaccttaaaagatactattaagaagaagttggacgctgctaaaggaagatgggtagatgaactaccacaagttctttggggtcacagaataatagagagaacagcgacagaacactccattctcattggcattcgactcgaaagaaatattaccagtagaagttaacattgtgaccaatagatgtgaattctataatcaagaagagaaccaagaacttttgaatttgtccttcgacttacttgaagaaagaagtaatgagtcgcaaataactaatgcagcttatcaacatcaaatcacgaggtattttttaaaaaaaaaacaagtccaaaaaaggctctttaaggttggagatttagtgttaagaggtgtattttacaaatacacgagatccggtgctggagtgtttaacccaaactagaaaggtccttatgtcatcgaagcggtcgtgggaactggggtttacaaattaccgtagcttaacagctcgctaataaagaaccactggcatagtgaacatttacgaccttataactagtaacttcaaaatgcaaatactatatttatctctgtatagtcaaatgcttattatgaagaaagttaaagtttgataaagtaatttcaaa

SEQ ID NO: 239428 - DNA, 2026 bp, Cannabis indica
aggaactaatagcggcggagaggtccgccgctattagtgttgaatgttgtagtgaagtatataattagtcaattttagttttcaatttcctaagtataggggaatgcaagtatccttattatggctaataaaaacgtaatattgattactcacatctcattatagcataattttccaaaaaaattatcattttgtagttatttacttaatgattctattattttttaaaacattgagatgttcattaatcgcattataagagatcgtgtaaataaaagtttgtaccaagctgcaattatgatcgcatgaagtgctaaataatagatgcacaaagttacatttgtaattgcatataaatcataaaccaatataaaaatactaaaaaatatccctggaggatatattatttagaaactacaaaaatataataggtatgaatcccaattgtcttaaaagttaagtacaaagtgcgagtacccttgtactgcgatcaaaaaaggaaataaacaaaagaagatatattttttctaaggagcaggggcattgagattctctataattttctcggtgacatttgctacttcagctccaagagcaacatctttaggaaaaagagtattggctaggccttagactctttattggagacatggtgtgaaaagcgatggccaactcggctgcctctggaccaaccacatcgaagtcaaaatgagacaacttggacagagtagtgtaaatgtaatcgctgatagcttgattgtaaactttcttcttttactctttctcattattcaagtcgtgagtaagattaacaatttggtcttccaattttttgattttctcatctgctttattttttgccttgccaagatccctgatttccttatccttgttggccatatcgagtttagccttcttcaaaccttcatgaagagcagaattttgtttctctaaaagctcatagtccttaagagcctgttgattcgcagcaatagcctgcgagtactatacgcaaaagaaggattcacaagctccttgttggtctttgacttgcggtttagagctcgagcactcttcaaaaaagtcatatttcctaaaaaaaatacgaagtacaagtaatcacatgaattcgtaaaaaattaccaagtacaatggggcacgttacctgcgggctatccttgtattttcctagatttttttttcaatctttactttctatttctcagaaggctcctgtatactggttctcgctggagtctggcgtcagctcaaatcagttcgtgttcttgcaattttgcaaacgtgcaaggaaataaccaatctcaatctttaattggaacactgctcaaaacctctacaatttccacgcaatcctaagctagttcagatcgagtcggtctagtacgagtgcaaataaaggtcaacattaataagagaaaaaggaaaaagagtactaagtgtgaaaataagcaacgtacgaggacgataattgaagtctattctaactctagataaagaaaataaataaaaccactttgattatcaatctttcatattggaaaccgtgtcttctactctgttgacctcagagttggcccatttaataaagtagtaaaagcctttatcatggccaatattcttgatgtcttagaaatagcaaaatcttcgatagtaggttccccttgcgtatattctatatacatcgcatagaatctgaggatgattctataactattgggggtaagttggtatggagaaatatcgtaatatcaaaattgctttgataaatgaataaaatggaactgtgacaccacatcaaatgatggggactgaaacctcagggacgctagtcaggataatcaatgggttggtgcatggtcaatgcggacattgtattgatctactcttgatggactatgcaacctatctcgccagcagaccacgagtcttattgatcaactcttgatggacccttctcttctaacagggatgttgggataaatttgttactcttctgaggttcatc

SEQ ID NO: 239429 - DNA, 2393 bp, Cannabis indica
gtaaaatattcccaacacaaagcgtcgtacacaacattggcaaacattaaacaggaagtcggtgagtctttacaggattattttaaacattttaactctgaaataaccaaggtcaagaaggcccttgagtcttcattagtttacatgttgattacaggcgttttaccaagaactgacttttggaaggaactacaagctcgacgacctgagtcattggtagaatatttacaatggcggaaccacacaaaagaattgagaattctttagttgagttagaaagagggaaggaaaagcgcgagtcccttgtgccacgatcgcgttctcgaagcccaaaaggaagaaattctagaggatgaagtcccaaaagatgcagtccctagaggcgacgaagtctaaagcttgctaaatctccctccaagaaggagacatatccaaagaggaaagggggtccgccttttgtcaactatacagagttgtctgcacctcgtgaccacatttatgcgatcaatgaacagaatgaggcgttcaaaaaacctccaccaataaggggaaatcatgacaaaagacatcccaagaagttttgtaaatatcataaggatatcggtcatacaaccctagagtgttggttccttcaagacaaaattgaagaattgatcagacgagggaaatttaataaatagaaaaagaacggagaaaatcatccccaagcgtatgataacgacaacacaaatgatgcgagtgactttcgaacccctcacaacattttgactataattggaggcctgcatgttggtggagaatccagaaaagtgcaagagcactatgcaaacgaagcaaaagaaaaacccctcaccaacatgagcaatctaagtgaacgaccggagaaattattcaagaaggagtgtgacgatatcaccttcatggaaagtgatgccagatgggtacatcatccccacgcctatgcactagtgatagtcgcaaacatcagaggggacaatgtacatcgtgatttggtggacaatggaagctccatcaatcttcttaactttcaagccttcaaacaaatggggttacatgaaaaagatttacgaccagtaacttcaagtatctatggtttcaccgaagatacaattgcattaaagggaatgatcgaattacatataactttggggactacccctgttactaccaaattaatggccgattttgcggtaatcgatcatcatactgcatataatgcaattataagtcaccccatcttgaagaaaatgaagatagtcacgtcaatttatcatctactatgaaattccctacccctgcgagtgtgggatcagtgcgaggagtccagtcaaactcaagggaatgttataataccgcattgaaactcgcagaaaagaatttgtcttgctaccttcacctcctgtctcatccaccgtcttgtggtctggtaatttgaagtcctcacccatttccttaacttccatatctgggggcaagtcgtgaatgaacaagatagccttaggctgacaccgtagacttgatgttgcacacttctaaggtcactagttccgctaatttgtgaaccatcctgtctatctcattctagacaacgagcccttacgagctctgccaacaggggcctcatcctcggacatcgaggttgggataaagctatcgctcctttttgattcatccgtgaaggctccctctctagagtcgtacctctggctatcttacaggccactcatctgaaagatagaagatctttttagtgtggtgcgagtgcaattttaacaaatcaagtgctctcacccatgttataaaattcaaggcaaaaatttatagaactggttgtgtatcactagaagtggtgggtgtttctcagtatcctaagggtcgtgttgctacatgaacattaactcacgaggaaacacccaccacttcgagaatctagtcagttccaacaatgaataaaatgcaagaaacaagaaaactaactgcatgtctcaagaaatggctgggcatgtcacagtatcccaaggggcatgcaacgattgcatgaacattatgttaatgtgacacccccaccattttgagaactcatagttttcatagtaaaaatacatataacctaaaagctaaaaaaggcctaagagttaaaactctagaaaacagggtcaaaaaggttagctaaatattcgaggtgttcttttaggaactagtgagtatttaagatgttcttcttcaaactcacaaatattcgaggagatcttcttgaaactcacgagtattcatctttcaggcacgtaattactagaaaaataccacattttgtctaactgcagaatctaggtgttacgaaaaattattaaatactacgcaagtgcacgcaa

SEQ ID NO: 239430 - DNA, 1780 bp, Cannabis indica
tattttttattagttttataaatgtaaataacaaatttttattttctttatatatatttttaaaataaacttaaatatataactttaaatctttttcaacttttaaaatacatataactctaaacctatatatattattttaactttttgaaaagtttcgattccaagtacattctttttatatctcatttacatctttttgtatattaagtgtttgttgcattggtacattatgaagattgggtataaaatctaatttatgatgatgatgttgttttgttatggcttggttgatttttattatcaaaggattaatagaaagtggagagagcatgctatgctactgttccatttattttatttatcaattgatgtccattgtctttatatagaccaatattatttttaatgttcaatgaatagtatcaaaacatcaatttttaattggtattgtctttatttttttctttatcaatttatatatataaataaatagatagattcttactctttttcttactcatgaaaatatttctccataattatttgagacatataaactttttttggatgtcgacaacttcactgtcatcaatgacttcaaattattcatgatttgctcgttagcatgaattatttgatgtagaaaaggttattttttaatgataggctcttgagattcatgaaaagttatgaaaaggttattgtaattttttctttctcattctcatgtgatactctccattcttcattatattttaatcgctctctatataattattttttgtacatttttttctcaaaaagatacacataacacccacatatcttttatttttattataggagattttaatatacaatcatgacttgccatcatatatttttattatgtatttattttaaattcttgtataaagtttggatcatgtggtcaatctattctattcgatgctttctttggtgatcccaagttccttgaagaacattacaacaccaaacatgctcttagtaattgtttttttttttttttttgtgactaataattttacttttttgttcagaaaaataataaagaactttaactttggcaagatgaatttagttttttattttttacctcaaacattaagattctttttattaattatttactattttttctttatttgttttttttgggaattagcccataacttcttttaaaaatttacgattttgggttagctccagtaatttctatgtggattagctatatgaattttgggttctctattagttgactatagtggaatccgtgtggaatttcataaaaaaaaaaaaaaaaaaaatatcaaagcaaagaaaaaaaaagaaaaaacacttttttttttgctacaaatttcatttataaacttgacagcaccaacaaagaaaaatggcttgagttttttagctagtgctataatgtacatgacatataacccctacaatttgtctatccatgctaaattcttttgttttacctttttagtcaaaatgaaagatatttatcttttgatatcatgttttatacactttattttaaaacataaatgattactacatgtaaaatatctaatgcaggcaaagaactgagggaatagtacattaaaatagacaagatgatgtgattaagacgagggaatatataagtatttttttcttgaacaatataaatatgttaagtgtaatttaaatgtattgttttaaaaattatacgagtttaacgccattttaatttactattttgaaatatttt

SEQ ID NO: 239431 - DNA, 1836 bp, Cannabis indica
acttttttttttaatgtgaaatttctcattagatcaaagctaaaatgagtttgaagaattgcataaactttgataattttgaccaccaaactctcttggcaaaattatgaccaataaaatttgttgagcgaattacaaaataaatacttagaaatattaagattattataaattaaataaatatcttacaaaattgaataatcactaaacaaaactcaagattttttttcttgttcaataacttaaaataaattttactagtctatttattgtttaaattagaaataattttaaaaaattaaatttgttaaaataatacgtaaaaagtaaaagtgtactttagttttatatacatttattcaactaaatgtaaataaataacgagttacagatatttaagtataacttacttaaataaagaaaaaagaaaagaaaaaaagtagctaattcagtagattggtcgattcaattgaattagcactaatattaacaaatgtactttgaatttaaaagtcaaatcaacaactatgaaataaacatagtttgaactatattttaaaaaatagatataaattatataatataaataataaaaacatattaaaaagctcttaattagattggtcaagttagtttggattaattaaataggttgattttattttcaacttgtttaatatatattggacaggttgtatttttttcttgtttttcggtttgtattttttattgattttttttagtttgatttggtgcgttattcaaattgggcgattacaaaaaacaatataatatatcattattttccaagatgattattaatgcaaaataagaataaattttaattaattttaatgattttaatattaaaaataaattaataaatctaatgaaatattattaagaacaaataaaatttttgctcctataacccttgtagagttttgcccttaaactataaccctcgtagaattttgtccccctgaaattttctctactacgaactatacaaatcattgcaaatacccttctttagttatattttgttcatcttttaaaacactttatttatgtgactataagttactgatataattgcaatacaataacttatttaataactttaagctacctgaaatttactttattggcgttaaatatacaaataatagctctaagaattcacatacatgctctcataattcatcattagactattgtttatgcatttatattttgtttggatttttaaattgggttagatgaatgttatgttacatcaacaaattatttaaaaaaatgagcagaatgtaactatatgagatatttgtaacgatttttataattcaagggaaaatttttattagggttatagtttggaggataagtcctatttattctattattaataagaaagtatttaaaaactaaaataataatttaaaatagagtaatttgcggtatatatatttaaatttaactcacaacagtaaataaatacctaagtttaatttttgacgataataatatctaaattatattttcgaaacttccgtaagtacttggctgttaagtgtgcagtcattatttacgtgtcatttcttattaatatatttaaattaatttttaaataaaaaataaaaatttaatgacctgaactaatcagcgactgccatattgacacttaacggcaaattactaaaataaagtttcaaaattagctatttgaggagtgctaccgtcaacctcttgttacaaactcttagtcaacctccacgtccgaaaacacatgtcaaaatattttttttatttttttttcacgggggtgttcgttat

SEQ ID NO: 239432 - DNA, 2044 bp, Cannabis indica
gatttactttagctaaagatttagagcatttgttggaaatgaattttaaccttttagctatttttctgcgtactatagtgaaattagagttctcatctttgggatatatccaactaaaaattatctcaattaaaaggtgtaaataattttgagttgttacagactttgcatgcctctaacaattcatgcggtgtcacttgtttcggactgctcaactcataagtacaaggaaacagggctcgattttgagaattaatgccaaatattctaagttggatgaggatactggggaaagtgaatatcgggcccaaatgtttggaaaaaccagtgaagtcgatgatgagttatgaatttattttcatggcagatgcttcatggttggacgacaaggctgaattagctatggttatgatacaaaaagattttggagtttgggcgatgaatacttgtcgaagtaatgttgcttcggcactggatgctgagatccaagcaatgttcctagctttgcaatgggctaagaacgaatgatgggaccatattactattgtgtctgatgctcaaactgcaatcatggcctttgaggcaagggagtgtcccctcgcttggaattgttggcatacttcctataaggtcttagagattttagtttcctttgtttgttgtaatttctatcatatgcctagaagttctaatgttttgctgattcattggctaagagtgctagatgttttagccataacactggtgttgtttgaagggaaagaatctctcttgtgattcctgatatatttttctagttaatgtactttggcattctttaaaaaaaaatatagtagaattcaataatatttttttttctttttgataaccgaggattcaataagatttagtatgtaaatttgaattcataaactaagtaaacaactacaagagagaaaattaaagattatgttcatttcacttctttagtaactgcgattaaaaaaggacattaaaataatttttcaacgattttgataagaggtacctaacccactcttttttgtatctgcactctttttctaattttctaattggttaacatcaataatctcttaaaatatagttatatattgaaacaattaaacttttgtcctcacaaatttatttaattataattaaataatattagtaatagtctcatattattatttaactatagtttattttagtataattaaaatagtattagtaatagtttcatacaattatttaactataattgaaagattacccaagtcaatcaattagaattagaaaaatgcaaaagattgtagatggattccactctaaaaataatactaacaaataaggagaagcaacattccaaatcttattaattttttactcataaagtttattccattctatttttattttaatcattctcattcctctattcatcattactcctaactaaacaacacctaagcatttactttgacaaaattgtgcttattccttaattttaactacggtcatacatagtcatcagaaaacacatgaaatataaaaataatgaaattctaaagagtaaaaaggataggaaatgtaaatattgttaaaataacaaatggccatatactaaaactaaaatacacgaataatttttttttttagttgcaaacagagaacatgaataaattaaatgactgttaagaagttatagtgtagcaaagcccgcatttcattgttattagcatatagtaggtgtacagtataagcttaactgtgccaagagaattctctcacaataagagagaaaataaaacctgtcaagagcaatttcctcattttaatttagcaccagtatatacccaactcccaaaatcaatccaactaaggatatcatgttcttccagacacaagcagctactttggacaactatatgaagagagaagcaagatcaattcatatataagtaagctagttttttacctatatgaactactcgtagccgccgctggcatggagggtttaacactagacgaggcgtccttcact

SEQ ID NO: 239433 - DNA, 891 bp, Cannabis indica
acttcatttcatacatctcttgttgaacaaaatgttcaggcgctaatggttactggtagtttggcttgggatgtcaacttggttcgtgatttgtttaatgaacgaaatgctaatctgattcttagcatccccttatcttcaactcgtttgcatgatgtgtggtattgttgttgggaaaattcaagccatttttcagttaaatctgcctacaaatatctgcaattgagtaaggatcttggttctcaagaggataactcgacgttttggaatactctttggaaccttagtgtcccaccaaaggtaaagacatgttatagcgtgctgctacaaattgcttacctacaaagactagacttagatcaagacatgtcgttattgattctacctgtcttatgtgtaaaaaaatggatgaaacaatttttcactgcttagtggattgttcttttgcgaaggcttgttggagtcaagtcgacactgggttatgttcagcacctacaacttcctttgctaactggtttgccaacttattgcttcagctggacggggagagaaagagtatggctgctaagcatcagaataatttagtttggtcagacaaagtcccttcagtcacaagtgttccctatttggctcacgcatcacttgtggattggactcgtgctcaagatacaacccgatctcttactgcggcctatcttactgttgcagatggggcagaaaatgggaaaaaccaacaagtaacaccttgaaaatcaacgttgatgctgtcatttttctggtgttgcaacatacagctttgctggagttgttagggatgctactggtgcaatgttggagtggttcagttgttgccgagctgggattttgcaactagaaatggtggaagcttta

SEQ ID NO: 239434 - DNA, 1994 bp, Cannabis indica
ataacatgaaaactacatgttaacataaatcacttctaattctcttattgataacaaatcagattagattgtaatagattttatttcgggcataaaatcccaacactagcttccatcatcaaattattttactaaaaaatctacagccttgataattctcaaaactatttcttagagaatttctttagtgcttaaagatatggaaaataagcttttagacaaatgtgatatatcttgttcaaattatggtgatactcacttatctatactcaaggttgtgagcgagtgatcatattcttcttcatgttcttacttataatatatattacattatggacttgtttggtacaccgtattgtattgtactgtatagcattgtgttggattattttagtattatttaatacaacactatattttgtatcgacttatatttatagattgtgtgaaattatactatattaactataaactcgacctcaatcctgaccccgaccttggaccatgaccgcagattcggagctggggtcctaggtagggttcaggatcagggtttgaggccagagctggatccaggtctgggtcggggtcgagatgttaattttttggtactaaattaggtgtgcagcagaagcattttaatatgattatcttcgtaccacactctagaatcctccatatgtataaatattgaatcaggaaacaaaaagatgaacaagaatgttacctcttgatgatctatcaattatccttgcaatcttttgagaggttgtagccaaggaacggtaatgtctcataccgcaattttcttaatcaacaacaacacacaaggactagtgtgggttgataaaatacactgttatccatgttcccagatgagttcaacatgaaagttatgaagggtgccacactagattaaacgttgatatcatggaccttcccctaaacgaggttacgcaagatactgtagtacccgaaagaatgcttctctagtgaaggtcgaggtgattctggagattctcaccttatgcttccataatcgagagtaaataagagtcgcatacgtctcaggatggttgcgaatgggttggtcaaggaagaccttagccgaacctccctgaaactccttaaggtcgaattcagagttaggcctgatagttgcatgtcgtctgacatctaatcagatcttgcccctgcatgagatcgtggttgtacgcgtatgtgcctctatagtgcttattgtccaacaacttgtctaggtgattacttttaaaggaaaaacctttgaatgacacgtgtcaagacctttacatgatatcctgcattgatcaagcaccacacaatgggaaagctacctaccaaactagcggtcagatggtcttgttgtgtttttggcctttcttgtgtgttgagtaagaaaccctaagtgggtaaagggtatgcctttacccgcatgtgtgcctataaatacctccattttttagtataaaggaaggataatttttacttacaaaactctgctaaaatttccaaagagctttcttctttgagagaaataagaggaatacaaagttaccattgtaaacacttgtgatactcaaatacttgccaaaaaggctaatacaactgactcgtggactaggaattattaacgtctgaaccacgtaaaaaaatccatttgtctattatttattattttgcacttccttaagctctttgtaatcagtttctaaaaagctcagtaaatattttggtgctttcattgagagacaaggaaaaattattagttgttgccttacttcggctacggtgaatactcaaaagaacaccagcaagaaaactcccttgggcctatataatcaataggggtgtgtagaaagtcatccaatctaatcccaaccgaccgatccaatcccgaccgatcccatagaatcggatatccaatcataattggatcggatcggatgcaaatttaaaaaatctaattggatcgg

SEQ ID NO: 239435 - DNA, 978 bp, Cannabis indica
tgtacacatttttaagaataaaaaattttatggccaaatattctaattaataagtattacaaaataaaatacatacccagtacagttccatcactattattattattatttagaactagtttaatgaaaattacttacaatgtttgttcttaatatgatattgcatggcatattctctagaaattcttttgagattcattcatatagtgtcaagctatatatatagttctcaatctatatttaagatataaatgtaaagtgctcatatatgaacagtatatagccagtactatttattaaagtttgaaaactgtcatttgaatttgaatgatccaccaacccatgagtaacagtctgcaatatatatttttattgggcatttatgggtcataaagtgaagatttagctagtgaaattgtaaagaacatttggagtagtctagcaaactattacaaaaagcaactctaaaatgaagttgttgtgctacgaaatgtatgctagcttccttttgacattttattaggacaccaaaatgtccaataatttctataaaaaatattaataatttatatattattaaaattattttaaaaatataaaaacataattcaaaaaaaataactaaataataaattacaaaataaaaaatattttttccttgatcctttccttttctattcacgttgttcttttctgtaatcctaaatatagtcacagttctcttattctctcggtagtctagtagtaattaccaactccgaccaatgattgaacatcggtgagagaagtataccgaccacagaacccccacaacccattctctctccagtggccctgtccctctcccacgattaaacttcctcatcaagaagtgattgatggtctctttctcaaaaagtcatagtcgcccgccccatccctgagcctcgcctacagtcctccaccgaggtcattgatccctcaatcccattcgcaaac

SEQ ID NO: 239436 - DNA, 2078 bp, Cannabis indica
aagaataatatgtatatatagtagggttttcatttgggctttttattttagactttttttaatcagtcctttggtctcagtttataaccgagactaaagaaacttttagtgtcgaatataaaccgagacttataatttgtatatatttttttaaaataattttggtctcggttatacttttagtgtcggtctgctaactgacactaaaagtcattaaagatgtcagttataaattgagaccaaagagttgaggtgatttttagtgtcagtttttttaaaaaaacgttactctaactgacaccaaaagtatattttgtagtagtgtttacctccttaagaagcttccatatagccaaaactaaaaggactgctttcgtaaaatctttgccaatcttatctcaagtttctttataaaaatcactactaaattcatccagacttgacgctttattatttagaattgagaaaagttctttcttaatctcttatgtagtataaggggcccttagaatttgattatgctcattagtcatatttaggccttcttgtacaatcttggtaataactttattatgtctctgatcataaaaatttcacagaagattagtataaaaatgaaagaaagcttttttaagcaactctgcttcattcacccaattcccatcttcatcctttataacataaatggtattttgagttcttctctattatagactaacatgaaacaacttggagctggaatcaccttcattaatttaaccaagaattttcaactttttatcttaaaaaagttagataagctaatgatttttttatatgctcaattcttgcttcctttacaactaccattaactccacattaaaaggatctttatgcagagcaatttgaaactcttcaagctttattttaatcaatctctcttgagtgtctagattactaaaacccctcttatgatttatgctaacatagctatacaaatattagttcccaacaaaatctctttaaaagctgaaaaggaaaaagttcattataagaattataaaaacgtcataatgataagtcttgcaaaaccctaaatataacatcacagaatttgatacccaatctcatagatccatagagaattctacgaaaagccaaattaataagacatgacatattttttagtccattcccttactatcttgtagtaagcttttatgtcttgtcggtataaaacatagatagggttaacagggtcttctggatttggatcatcaaggagcgagcatatggctaacaataataccttgatagtgaaccctggggtccaatcattttgcaaaatattaacatggataatcctttttttagatatgttcggatgaaaaacctacatatacacatacaaaatcataaaaataaaagttgaaaagctaatataccaaatattacatttataagaccgatttgatcattattttttgagagatcgatgactaaaataaagagaaacttataacccaatacactataacaacaaacaaataatagtgaggagtgaaaagtgaagagagaacgactgaccttggtaatgaaagtaattttgggaggagagaaaggataattgcgagatattttgatagatagtttgaaaatcctgccctcgtatggagtatcaaaagggccaatgattaaacaaaacaagtcattcttagccacgagtttgtagttaacaagaattggagatgcattcaaatattctcctttttgttttagtttaagttctcttctcatccttgactctacattaagttcctttggtttttctgatgagggggttttttgatgaagaaaaacatattttcattttcatcttaggaaacatagttgtgataattatgaatgggaaataattagtgaagaaagaagtgatatatatataatatttgagatatattaaaccctcttaaattttgagtaaacttatttgccctatttagggggaactatacggatagtttgttaagtttataatttttttaatttttaatttttattattaaatttaaaattgaagtttactcgtgaagggtaa

SEQ ID NO: 239437 - DNA, 1914 bp, Cannabis indica
atgtgctaaatggggagaatgaggaagccattaagttgttttataatttgagaatggacagcgtcaaacccactcaagtcactatatctagctatctttctgcttcagctaatataggtgctccagacgagggcaagcaagggcattcgatagcagttgttgaagggttagtattgactgccattttgggcagctctatcataaatttttattctaaggttggactgatagaggatgctgagttggttttcagtcagatggctgagaaagacgcggtcacgtggaatttgatcatatcaggttatgtgcaagttggaaagattgacaaagctctcagtatgtgcaggcggatgagatcagagaaactgcgctttgactctgtgacgcttgcatctttaatgtctgcttctgcagatacaagtaatttgaaacttggcaaagaagggcattgttattgcattagaaataaccttgactctgatgtggttgttgcaagtagtatagtagatatgtacgccaaatgtaagaggattgattgtgcaagaggagtttttgactctgtaaccaaggcagatcttgtactctggaacacaatgctggctgcatatgcagagttgggtcaaagtggtgagaccttgaaactcttctataaaatgcagttagaaagtgtgccaccaagtgttatatcatggaactcgattattttaggatttcttaagaatggccagattgatgaggccaaagacatgtttttgcagatgcagtctcttggtattcagcctaacctggttacttggactactctcatctctggtttggctgagaatggcttcggctttgaagcgatttttgcattccagaaaatgcaagaggccggaattaggccaaattcactaaccattgtctctgtgctctcatcttgcatagatatggcactgctgcaatatgggaaggcaattcatggatatgtaacaagacatgtcctttcctgctcggttccacttgcgacttctttagtggacatgtatgctaagtgtggtaatatagataaagcaaagagactttttgatatgattgaagaaaaggcggttcccatctacaatgcaatgatctccggttatgcattacatggtcaagcagtggaagctcttgcattgtataaacgtttagaggaagaaggtaagaaaccagattccataacctttactaacgccttatatgcctgcagccattcaggcctggttaatgaaggtttggagctttttgctgatatggtatcgaaacatcatctgaagcctagtatggttcattatggctgcatggttaatttactttctaggtgtgggaatcttgatgaagcctttaggcttatcaactctatgccttttgagccagatgcacatatttttggatcattactagctgcctgtagagaacacaacaatactgatttaacaaaatatttgtctgaaaagctattagagttggagccagataattcaggaaactatgtggcactttcaaatgcatatgcagctgttggacagtgggatgaggtagaaaatgtgaggcatttgatgaaaacaaagggcctgatgaaggttcctggctgtagttggattcaaattggagaagaatctcatgtctttcttgcaggtgatcaatcacaccccaaaattgaggaaatcaatttgacattagctttattaggatcagaaattttgtgcacataattttcctacatcgattctaaactagcttctccaaagaattctagctactcaaagtggctacaaagtttatattggtggtcaactagaagagtttccttaggtcagtgtcttctgccaagtgttgctgacgacatactatctcggatttgtgtaattcgtacaaacagctcatgtaccatgt

SEQ ID NO: 239438 - DNA, 1615 bp, Cannabis indica
tttttcctgaccgagctcaaagttaatgccactcctcttgtacgtacactctcctcactttaattttattttcatatccattttccaactgttggtaatgtgaggggaatcattttagcttggaagttagggtttgagtttgaatgtattgcctactcccaaaaccatattactggtcttgtctattcggacccccgactcttggttgctgtcttgtgtgtatggccctccgtattgctatgctaagaaatctttttggactaagttcatgaagcttggggataggtttggtggtccgtggctcattctgggagatacaaattttattttgaatgaatcggaaagagttggctgtaaggatagggacctatttatcccgttcatcataaatttggtatactcaagggggctcattaacatgcctattgatggagataagcttacatgggataatcatagatctagggagaatcatgtcaagtcagctcttgataaaggtttaatcaatggagtgtggcttaacctgttcccaaagactgttctgtgttcctctcagatctgcaactctcaccataggcctctgtgtcttctttttgatggtctggaggaataattcaaatgaagctttaagtttgaagaaagttggacccgggatgataggagcaagctagtgtttgatagcgcctggaactcaatttgttattcttgggctcccgccaaagttttccagaaaattggtgcaactcgggtcgttctcttgcattggagtagaaccaagtttggtaaagttgacagcttaataaaagagctggaaagtaaattcaacctcatccagggcatgccagtgggatctagagactggggcactgagtgcaatatttgacgggctcttaatgaggcttatgttcagaaaaagagctttactagaagcaacgggccagggtttcttggctaaaggatggggatagatgttcaaaaaatttcttcctattggctgcaatcagagggagatggaatgctattgaatgtatcttaaataaagataatgtttggattaccagtctggtcttgattggcaaggaattcatggagtttttccaaggaattttttccagattggataatggtcagaagctaatttttgatgatctcattagggacagaatatctgctgctgatgagacagagattatgaaatgccctactcatgaagaaatccataggactctgtttgctatgactaaccacaaggccccgggtccgcatgggatgtccattcttttcttcaagcactactgggaaactatgggtgtagatttctgtgaagcagtctcagatttcttcaggacgggaattatgcacaaaggcgtcaacgcaactaacattggtcttattcccaagatccaaaacccaaaaagaactaatgattatagaccgatctccctatgtaatgtaatgtacaaggtcatctctaaaatcattgccaatagaattaaatcgcaactgccatcccttattttccctacccaggctgcttttgttccagaaaggaatattcaggataataatgtaatcatccaagaaatctttcactccttcaaccggaagaaaggca

SEQ ID NO: 239439 - DNA, 842 bp, Cannabis indica
aatgttacaagatattcatttataaattttgacccttttttttcatttccaaatactgtaatatatattcatctaataaaaataccatatacccaatggcattttggtaatataacacacaatcatgagcatattcacactccgcacccttataaataaatcatgtagcagaaaatgtccctcctcatgcatgatatattgtatcatatctatcagatcatcaagaaaaacacacacacatatatatatatatatataaataaagtaaaagaaatattttccaaaaataaaaaagaaagaaactaaagaaatgatgaagaagaaaagagtagaggttgttgtggggatgctagttatgttgttgttgttgctagtagtagcagcggtagctcaacgtggaggaagcgtgtgccaaggaacttgctcatctaactgccgtggattcaaaagtaagttctatctataattacatttaatttacaaattaattaatattagaaaattgcaaattattgcaataagatatcaatggtgtctaatacaatcttttttgtaattggttaataatattttctaataattattcaattaaattatacagaatctatacttaattactattctagctaatgcatacaacactaatagtacattttagtattttttttttaataaatatagcaaactttgtatatcaaatctagattagcttaaaactgaatatacataatcgttatgtttgagaaagagattaaaaaacacttgatgaagctaattaatccccttaataataaatatgcttggtagggtggaaagataataaaaggaatggagagttaaga

SEQ ID NO: 239440 - DNA, 1604 bp, Cannabis indica
gggcctggacccccaggacacccaccttttgcttgcccattttttgacagcccaccagtgacatcaacattcatatctgcctcatcctcacttaaattttctatgccatcagcattggttcttcttcttttggaatctgagacaatcaatgtacgatcgcctatgtgtccttcagtaccatttaatggtatattaccatcactgatcacacccaaattgtccaccctggcagtcatcattgcttgctaatttactccttgatttccttgatttcctctgctttccacaattcttgcattgtcaactctagcattaacggtattgatacgctgatcatgagaattaactgcattaaatgtctccatattcacaccttgatcgattgtctcatcggaaaactgagcatcaacatctgttccagtgcgcagccaccttgaaccagcttggttgtgtcttctccttggttccgctttcatccaaattccatagggtttttctaattcttccaatggtttatcaaataaacgaggacagaaactttcagaatgtcctattagaccacatatgaaacaaaaggtaggaataaattcatacttgaagttacaccatatccattccccatttgtcttcttcagcttcatcctcctctttagcggcttctcaatattaatagtgactctaacacgtaggtagtcacgccaaattcccatgaagtttttggggtctgacttgacaaaagtacctatgtaattagccacattatttacaacaacgtctgtcatgaaaccaattttgagattgtgtaattgaacccacaactctaaactagtcagggtaatacttctaggatcttcacctttctttaacctttgaaaaatcagttgatttctattaaaagtccagggactaccatcgatcactctctggatatccacttcatgataaaattgtaaaatataaagatttggctctaattccttgatgaatactcctctgcctggctgccatagagaagccagagtatgcttcatcgcatcagtatccacagatcttctcgtcagaaatttccctaccaaacaccacctatcatctataggctgcccaacatcttcaatgaaatcacacaatagttctccctcttcttcttcttccaattgcacagaatcatacttctcgtttagtgagttaacttgttgacttgtagaggacattagacaaagacaaaaactagaaatctccaaacttttcagaactttttactcatgtcaaaagacatgacttcttataaaatatagattaataagggtgtactgggtaggattatatatagcaaaatatgaattatttggtatgtattagaaaataagataatttataatttgttgatgagcaaaattataaatgtctgaaactcacattaggattcatatgtattctctcttttcccatcaaagaaaatactttagagaaataatatattgttctagagccacgtacatagaaacattgttctagtttttaagtttctgcatagtttcattgtagttgcactaatatcttactaacgctcttaaactagagatatcaatgattacaaattgata

SEQ ID NO: 239441 - DNA, 3666 bp, Cannabis indica
tgacttttccagcgacggtgactttttcggtgacggtgatttttatgcaatatttttatgtaaaactatacgtggtattaacttttatggacacttcaatatatatattttagtataaattaaagtttaacgtagtattatataaaaatataatatataatccaattcaatataatacaatacaatacaatacaatacgacttaatacggcgtttcaaatgagccctaaaatacataatatcacaataatagcgaaggataacaatttttttattttatttatgaaattaaaatatacgagacttaatattatatacactgaaaatgatatgttatttgttttggtatttgtatcttaagttgttattcctcttatcaaacaatattaaagtaaaaacttaactggaaaaaacaaaacaaaaatttcttctcagtttctttctagaagttcttagtcgctgcttgttatttttgcctaatcatggctcatcaaccatttctcggtcttacgacatggctctatagtcaggtcttgtcgattctcatactatttttaattttgttgggattgttatctttttgcctgtgttcttgttctctttctttttgtttagaggtgtgtctcagtatttaaattgctcttagttcttgattgaatctttactggcattaatcatcttatattgttattttatttcttatgttttgttttttttttaacgcggtgattcaaatcacacatgattaataaaatagcaattcacaatcggcggtgacacctcctcgaaccaagatagctcattgtctaaccgaagagcatgttttgccaaaccatgtgctgcagaattcgcatcccgagccacatgggacaaaattgttctcgagagtttagacaataaagttatgacatcctcaagtagcacacacagctcgttgaaaaagacacttcttttgtttatagttgtttttatgtttatttatattttcaatagtagtgttgctataccaccttgttattgttatggtagtaagactttattcatttatgctaaagaatcttaatcttatttcttaatgggacattgaagaatctcaattcggtcaaaatacatttgtgtgtagcatgattatatatctttgtacatgtttcaaccaactacctttaaatatttaaatatggcaaaaaaaaaaaattgcaaaaattgtcattggcataaacacatgtatgattggtacggatcaatattttgcctataaatacaggagtctggatcacatttctagtcacacaaaatcacaataaaataaaataataataataataataataattaaagaagtactttaactactctctacaatggtggtttcgggaggagaagaataccatggtaccaaggttgatcattgtttcgaagtacaagtgagggagacagaggtggtggcagcagctctaccgatgcaagaccactggcttcctttgtccaacctcgacctgatcttgccggcggtcgacgtgggagttttgttttgctacacaaacattacaagtggtagtcccacatcgacaaccaatgagtgttttggggccaaggtttgggcactgaagaaggccctcgcacaagccttggtcaccttctacgccttctctggtgagctggtcaagaacgccgaaggagagcccgagttgctctgcaacaacggcggcgtcgacttttctgtagcctccgctgacgtggagctctctgacctcgatttgtacaacccagatgactcctttgagggcaaattggttcccggcaagaagcgtggcgttctggctgtccaggtaatatatatatatataaattaatataatactcatatctaagaaattgatatgtaaaggggctgagggccggacaaaaaaaaacataaattatctttgtttactttttttctacttttattagtgttttacaaaaataactctgtacacaccatccaacttttctgtcggcccgtatgaaacatccagagaaaaactatagaaaaacaaactacccaaaatattttttttttttttttgagaatatataacctgtgtattttgaaggtagaaaaggtcgtaattctcgactagtagttaaaaaaccattttaactaagttttataaatagtatatatatatatatatatatatattatgtgtctaaattttaaataagagtaaaaattattacaggtaactgaattgaagtgtggtgggatagtggtagcatgcacatttgaccaccgcatagctgatgcatattcggctaacatgttcttcatttcatgggctcaaatggctcaatctaaacgattatctcttcgaccctctttccgccgatctctcctcaacccccgccgccaccaaattaccccccacaactactcctccattgacgacatgtacgttcctgtaacagctctccctccgccatccccatccaccgcttccgccgccgaccacctcatcagcaggatctactatgtcaaggccgagcagctggagtggctccaagcccaagctgatactggaaacctcgtcaagcgcccaacaaagctcgaatcgttcagcgcttacctttggaaaatggtcgccaaatgcgcagcctccgaccacccaggaaagatttgcaagatgggtttagtggtggacggacgccggcgtctgtatcggaagaaagccggtgccgacgagatggaatcttactttggaaacgttctttcgattccattcggagggaagatagtggaagatcttgttgaaaggccgctaagctgggttgccggagaagtgcgtgagtttcttgaaacggcagtgacggaggagcatttcttggggctaattgactgggtggaagctcaccggccggttcaggggctggcgaagatatactgccagggaagccaagatgggccggcgttcgtggtgtcatccgggcagcgttttccggtgaaggagattgatttcgggtggggtgaaccggttttcgggtcgtaccatttcccttggggtggagattcggggtacgttatgccgatgccgagcgccgccggtaacggtgattgggttgtttacatgcatttactgaagaagcaaatacaagtcattgaaaaggacgctgctcatgtttttactccattcaaatttgattacgtcattaatattaaaaataagtaattattaaacaacaaaatttaatcaattaattatgccgttttgtttttaattacctatacaaaatgatgaataggtgatgatcaatttgctatagattatcggtattcatcaattttgtagcaataatatgtatttaaatggatcattgttcacaaaagaaaaaatcattgaaatggatatatatatgtataattatatatataaatttatttatctaataaaaaaattatatttatatatctatgtgttaatcttcaattttcgcttataatctatctatatatactagagttttttttgccgtcaaatcctacttgcacttatctcaaaagagtactttaaattttggtgggaactaaaactttctaaattaatgaactgttagcaaaggtattgtctaattaatgaactgttagcaaaggtattgtctaattaactagtatcatgaactgttatta

SEQ ID NO: 239442 - DNA, 1770 bp, Cannabis indica
atttcaaatttataatatatattatcagttctgtaattcctacaatattataaaagcttatatatcatattcgttttgtaattagaatgactagtaatagtgcttttttctatgaaataatattttcacctttattttcatttaattgaacgttattaattaacttaattacatatattattcatttttttaaatacaattgtttgctagttggtgttatgttgaacattaaatccaagtatggagtacagaaaaattggcaaggagatccatgtggtccaaaaacttacatctgggacggccttaattgcagctttaatggtgaagatgatgttagaatcatatccttgtaagtttgagattcgttatataaatatatatttataaatataatatagtttatactttatgcaactaataattattattaataatcttgtatattagaaacttatcctcatgtggattgacgggagagattgcctcttatatatcagatcttactatgatacaatctctgtaagtctgtaaattattattattattattattattattattattattattattattattattaatttataaatttgcatatttgattattatgaattgatttgattataaaacaatgcatgtatttaatgtttatgtacatgatcatatttcagggatttatcaaataatagcttaagtggatcagtgcctaaattcctttctaaactgcagttcttaaaaaatactgtaagtaatgtataaatatatatatatcaatatatatatctatatatatatatatctaattatatctatatatatctaatctatgtccatacattagattctctatatttttctcgacatcatttaaacattacattttcttcatttcatgcattatatagttaaggttgttccatcgggctaagagagagataaaaaaaaaattgagtttgagttagtgagaaagggataaaagtaatgctaaatataaatatatttttgatataatgtaaaactaataaaaaaaaaaaaaattaattaaatagcaaaattaagtacatacaatttaatctttattaatttattatcgatcatttgattagaatttcattttaaaaactaatatttttaaaattaacatttaattataattactttttaaaagttctcatgaatgggtaacattcattgaaaaacaatcatatatatataatctaaagtggtgtatcaaatgaacgcttaaaaaattatataaattattattctaaggcagggtcggtcctgagggtatgcgagctaggcgtgcgcctcgaacccccgaaggctcagggcacaaaaatatattgtgaaaaaaattataaatgtacagataaaatattaaataagaacaaaatataacaaaaattatttggtggtaaagggtcctactatgactaagagattataggattaattcccaacctctacttttttattttttttaaaaaatatttaatgtatagttatgaaggattgaattttggagttctttagagtttttaaaaactttaccattacactaaattactagaactatcatttttataattgttaaactatacatatgggctccaaaatttgatttcgccttaagtcctatagatcttaggactaaccctattctaagaccacaatataaactataaatcattgttttaagaccacaatataacttactactacgatgctcttaactagtatattgaagggtaaatactattttgg

SEQ ID NO: 239443 - DNA, 1488 bp, Cannabis indica
ggtaaaatatttccaacactctcctgctctgaatattcttgaggatactgctcctgctctgaatattcttgagcatactgtttggccctagcacttcccttcaacttagcctcacacttgagttgaatgagctctttctcttggtcggcatcctcagctcggttcggcttggacttcttcttcttcttcttctccttcacgggctttagcacaaaatcctccaggtaaagcttgtagttcacaaagtttgcctcagtggtcaacaaagtgatattccgagcattctgtgacaactggagaatttttcttccttttccctgagtcccaatgtgaaaagagggcggcagtacgacagaatatgttggaaccgagtatggacggtctccatgcccgtcacaaagtagtactcgtgtacaaaatgccatattttgctgacttcagggtctacggtaacgttcaattatttattgtccaattgggagaggtagaagtaccccgacctgctctgcttgggggttgatttcagatcgaagagccaattggtgtcgtgcgggatggttcaccccatccttgggaggcataaaggatgaataggcggataagtacttgatgtcgtttggtgtgaactaagtcgagcaaagatgatagcagtccacaatccttctgaagtacggatgtaagggcagcattgaaccctgcttggtatgcgccccgaccaggcacagtatccctctcttggattagttgctcggtgatttaaagaagggaagaagcagtcgacactgcccaaatatccatccttctccaaactcctcaactaggtctgggttactatggacggaggagacacccaacgagctctaaaggcaccttgcctcctttgaggaaccgcctcggcatactccacggtgacgtaatcctcaccttcttctaggacatcaccagcctcgaacactagttcccctacctcattgtaacctccgaagcgcaatggtcgagcaactccttcatcctcggcctcagagggactatcaggacggacttcgccctgatcatctatttcttggacttcaacgtccccctcatcaccctcctccttggtagcaggtcgggcctgtttagcgctcggcattgtggcatgccaacctacgtgaggatcggtcacagaaatcttctgcatagtttgttttgtgtgggccatcatcctatctttagacggtggttagttggtatgctgcacaacagttacagtagaaatggcaattggaattccaaaggcacaagaacttggacggccaatagggatggtatcaactacgtcaggctgaacaatatatgtccagttggacgacaagtatcatctccaccccttcctgagttcccaaataaaatgcccgtaaccttcgcctgcgatctactaggaatagaagtggtgatgcacctcgggttctggggaagtgtaccctcactactcacttcccaatcctt

SEQ ID NO: 239444 - DNA, 1556 bp, Cannabis indica
tctccctctctctctctctccttccctctcctctgttctctctcctctatgatgtttgtccctctcctttttcaccatcgtcactcatttgtctctcttttagagacagtcgtgcaaccacaagccgccacgagtaccaccctaactccatccctctcctccatgagcatcacgagttcagatttgttcatcatttattttttatttctatttttttggttattgattttttaatttttgtattttgtttggtttgttctggatctgagattgtttttgtatttcatttttattttatggatgtagatttatctgattagttttgtggttgcatggaatctaataaatgcaatgtcagtagtggcattgtagtggtgtgcatgcagtggtagtggctagtggtatttgcatgatggtggttttttttttgatgagtaacaaaacttttattgaaagcaaagaaaactagtaaccctaagagggggctacatcccttaatagaccagtggcctctgccttatgcactctcgcccaacgggtaagtgcatcagccattacattgtgttcccggttcacatgacaaacaaagaccttgtcaaaagccttacacaaacacaaacaatctcgaaacagcgggtaagtatcccagccataaggaagttgagcgtttccaaaggctgtagcagcaatcaaagaatctgtctcaattttaacaactgaggcgtgactttcctttgccatccacagtgccaaggcaatcccaagaagttcaccttccaacacacccctgactttattccagcccaagtacaccagagaatttccaacatcagcatcattaatctgtattgctgcaaaaccagcaacaccatcagagatagaagcatctaccttgcagcaccacggcataatcgagtcactacaatgaggcacaacagtccccgatcaatgagtctccattcgatgctcttcaccttgctcaaaccagattgtctttgacacaaagtcccgtgaacggtggataattttcctgtaaatgacctccaaatcatctgcttgtcctttaaacacacgatcattgttccacttccaaattgaattgcatagaaccacaatcatcacctgcaggttcaggtcattcaaattacaccaccacatgccaaactctaacatattgtcccagttgcactcttgtatcctgataccaaatctgaaccataaagctcgcatgcaattacattgaaaaacaaatgggcagccgtctccacttcagaatggcagaaatcgcacaattgttgatcagcctgcaggaaaccgagattacttttggtggggagtaagtcactgaataacttccagcagaagtgcttcaatcttgggtcgatctctgtcttcaagaacttcttccatagcatatgcggctcattgaacctgtgttgctggcttaactaataagcactcttgacaaaaaatttacctgatccagcagctttccagaataaaacatctccccctcatccaaaattctaattcggagtatgtcctctgcaatgtca

SEQ ID NO: 239445 - DNA, 3488 bp, Cannabis indica
cttcggcactatcttgaccttattttgttttttaggcctttatgaagcttagcttttggcatggcaacttctgggggtcctcgagtgctctccatgagcaggggaagaccttagaggctgagctcctagcaaaaggtaaggttgtaactgacttggatgctcttgtccaacagaattgggacatgattttgggtttagagctcatgctcaatactaatcatcaagagaatacatcgctcactactgacaactctagagttcaagctgcgagttcatttacgagttcaagctgtgtaaccctatagttgatctttcttacatgggagatgcttctttctttgtgagcaaactaactcatggcaaagcactatatgagagcaggttagaagtagaccagaccactatctagccagaaacatcgtcatcggggtagttcgatgaggaaatggtcggtccacccactgagaaggtggctggccaggactttgaccaggtgtccagccagcttacaaaggctatggccagcccacacttcagtgattcagactctcaagcttctgattcagccccacttgcacctacacacatgtagcttcaatttattagtatttcaactttatgatttcattagtatagacattttatttcatgttctgtatggcatactggccttttagttttgaacactacttattttcagccttagggctttcatgttcgtactttttgcctataggccctctatttttgaatattactattatttagccctgaagctttttattatggatgtgtgaccgacctaggtatcttcttattgcctttacatgtaagtatcaagatttacttttttatgccaagctgaagtatgcatgcacttgacttagaggcaggtttagtagcttttactaagcgtaaaaatttctctgcataagttctctgtgctagttgatgcagtgtacggtgtgggtgcccccaagtgagcacgtagacttacggtctcttggtcacttataattcaccaagtttcatagaccttgcgtgagaattttcttggggtgctacctgttgtatgcatgtggaactgaaaaataataactttaagaagttaatctcgttagtaagtggtttagacacacatatttgaatataaacaatattttttattcattaattggtctttgtaactgtgcaacttacataaattgaatctacaagcctacataataaaaattcacttctagatatcaaatggatacctctgcttgacatgcaaagtagaggccatcgttgaataacgatgggacgccacgcctaaaggctgtgggtactagctctttttagtctaatgatgagttagtagaactactactattaaatagcattctgtaagttggtcactggtagtacttgcgaatgtgctctccattgtaatatcttggtaggagaacgagttccatgttctcgttgtaccttcccaacttgtagactcccttactagttatctctataacttgataggggccttcccagctgggtccgaacactcatactattggatctttggtgtttaggaatactcttaagggcaccaggtctcctatgaaaaaaattttgtccttgaattggttgttgaagtgcctagcgaccttttgttggtaggcctgcagctttaggttggcttgatctcttctttcttctatttcatcaagggatgctgccagtaagatgttgtttgtatcctagtcataggttgtcctcctgtgagacagtggcaccaattctacaagcagcatcacctcatagccatgagctagagcaaatagattttgcccagtgctcgtcttctcggtagtctgatgcgaccatatgacctctgggagcagtttaggccaattgccttttgcctcttcaaggcacttctttaaggtgtccttgagggtcttgttgacagcttttacctgcccattttcttgaggatgggacacggtaaagaagcttctgatgataccatgtttgttacgtaaactagtgaacatgtcactatcaaactgatttccattgtttgacacaatcttctgtggaagtctaaatcgacatatgattttcttgacaacaaagttaaggaattttttggaggtgattgttgtcaagggttcagcttctgcccacttgttaaagtagtttacaatgactatgatgaactacacccatccttttccctttgggagttcaccaatcaggtctatcccctacactgcgaagggccaaggagactgcatcattgtgagcttattgggtggagctttagggatttttgagaatcgctagcacttctcaccttttttgacataattcatcgaatcctcgatcattgttggccaaaagtacccatgtcagagtatcttcttggataggctttgcccccgacatgattgtggcagatgccttcatgcaggtctatcatcaaccgcacagcttcagccttggtgacaaaccttaagagcagctaggattagatacttaacaacctttcttctcatcttttttgcctcattcatgttttcaagaaaggctccaatttggaggtaaggtgcaataggtgtcatccatgttggactgtcatccaacatgtcgacttcttcagggatggtaatgcttggttccttcaggaacagtattggcaccaggtttgccttgtcactaatggtgctacttgccaaacaggcaggtgcatctactgtggcattctattctctggggatctgccttatagtatagcctttgagataacgtaaaaattcttagatcttgcttaagtaggccatcattccttcacctcgagttttgtattcacctagggcttgattcacgactagttgagagtcgatgaatatgtctaggtggtcagcccgtacttcatgcgccagcttgaggccaacgatcaaggcttcatattcagcctcgttgcttgaggctttgaagcaaaattttattactccgtgcagttgttgcccctaggtgttataagggcaattcctacaccgaacaattggtcagtgcaacttcgatcaacatgaagttttcatgttgattcttcaggtttttgctgctgctcttgctcttgcttcttctctgcctctttcttttctcctaaatcttgagagattttaagagaggtgtttgtacatttggccacgaagtctacaagggcttgaccctttatagccattcttggttgacatatgatgtcaaaatagccaagttcaacggcccacttgagtagtcaaccaaatgctttaggtttttataaaacctactacaatggttggtcggtgtccacctttattgggtgtgcttggaagtatgtcctcatctttctgtaagccaagagcaagctgtaggttagcttctccatgagtgggtaccaactttcagtgtcgatcagtctcttgctgatggagcatataaggtgttgtacaccgtct

SEQ ID NO: 239446 - DNA, 1903 bp, Cannabis indica
aaatctagatcctggtagaataaatccaacagattcctcatctcaggcgccaaccacagtacaggacgtcgatgactctactgaaccagcgaaaatcacaaaactagtggctgttcctgagggaatttcgcacatcaacgataaaaaggggctcgtcagagatggcagcgaagctccgccaagagagaattacagttttttggaattaaagaagctctctgtgccatcagatatgcctcccaattttgtcactgtcgatatttctgctggattcgatctgagtagatcacaatcgactctatttctatattcgacggcagcctgcagctcaccaacgtcagagaagagacccttggcttcatcgaacattgtggattttgtacccgtggtagtgaatggatttcgaagaacaccagcactggagaaagagatgatgatcctagctccatcggctaatactagcaccaacattgttttgttgtttgtgattcgaaccagatctggcacggatttggtcgagttcttcgtctagaatttttgaacaataatagcgactacaacagagattagtgaaaaagaaaaagtggagtttccgggagaaacaagagtgttgaagagggaaagagggtgctggttactgggggacggacggaggcgtggtcgcgctggattgctgaagaccatcggaggaaagtgaccattactcagatcttgtgttcacagtttgctgataaagtttttcatcacttaattgatggaaatgtatatatacattgatggggatatatatactagtacacatttgatggctctacaaatgaagctaaggagaatacaatgcatgtcaacgaaaatatctttcggtttcaagtgcattaaaaaaaaaaggcggtgcacagtatcgggagaagaaggtgatgctgccctaagacttttgggcttggacttgggctgagaatttagtagaaaattataaagaaatgggctgaatattaaaagaataattgggatgtaattagttttttattttttatatttgttcttatttttagttgtatttttatttttaccaccttgaggacaaggtgattttgaagggtgggaaagtgttagactatgaaaatgctataggggcttattagtaatttagaaatagtgtgaaagtctataaatatgtaattgtgtaactattgttggggatggattgagaaaatagatctttggttcaattgggatattggcactgtctcgaagagtgcactttggagatttgtccagtctcgaagaggactattatctaacaattattgtgcatgatgcactccaagaaaatgaggccctacttgtttagttggcagagagtttaagccacagcaaagaactccaagagcaagtgcaaaggcatggggaccaaactcctccaccaaaagagtcttctccccctaggagaagaagaggccgcccatcaaaagaacatgccaccatggcacaccaagggatccaattccatggtgaccctagaagtaccaatccactaaggagaggggaccaccaaattttgtcaaacattagagtacatgccagaaatgtttggaatattttacgaggatataatgaaataacatcctaaatatgaattctctaaaacaatgaaataaacacataagtgtttaagaaaaccttacactggttgtagcaagatataatgactccttccattcaagatctctagcctttgattcctttttgtagcagagcattatcaagatctgaacctggatctctttctctccttcaggtttggttaccaccttcttactcactatgatggagtacttgacttgctatgtgtgggcatgacactctttcactaagggtttgaatatggtgaagaacaataaag

SEQ ID NO: 239447 - DNA, 1638 bp, Cannabis indica
ttgaaatgtgttgaagattatagctgaagaagtcagacaattctttgcttgtgatcttaaaaaatcaaactttatatcatcagttgataatactctcatgaagcttggcaagtccttgagtcttatgtctctcatgcctggaatccagtctattggcgtgtcaagcgtgccatcttgcatgaagttttcatctgaaacaaatggattaaattataccttaaaaagtgtaacaacaaataggaaagcaaaagtgttggtataatcacatgagattttaatccaaaaatatcaataagaatatattgtcaataatgaaaaaaaaaatctctcaacgtttacatgtaatgatatgtttgagctcttcaagatctgggtggtgtttctgtttcataggattttaaactcgtgagattatcaaaaccaattaaagtctattaaaaaaagtacaaaataatcaatctatatataaatagttgataacattaaaaagtgacatatgttttatgtttcactattttgtgtctcgttcagatattttcattgtatcgtcatgatgaaaatatctaaattaataagatcacaacactaagttaatcatcagtagataatccaaaatttgtattcattagtagaaagagtaaagaaaaatgaagagacgtaaatgctgaaaaactaacaaaagagggatataattgtaagaattaatactaactacgactaaactataaaggaattattaaaagggtaattactccttgtgttctaaaataaaatcttgttatcttatgttctaaatacaaacttgttatcttatatgttttcattattatatgtgttcatgtagtagttttttattagaaaatataaatattttgtatatacactggattcaaatttgataaaactgtacgtcttcagtttatatgagttttaaattgtattacttagttacatataactgatgaaagtttaaataaattaatatacgtttagtgaactaaatatatataatataataaattattaaaaatataaaatattttgatcaaagaaattaagtgagtttcacttttatataaagtaaaaacaaaataataaggggcattgctgtagggacaagttgtagtgaatttatttgggttataataacttaattaaattattatgtatttttttaaaaaatatcaactttagtttgtgaagaatgttattaataagaaaaaaaataatattattattgtagttagatggttgattttagggtgtaaatacactactataatatgggcatttagcttcccctttttcaacccattttataaaaaaagaagctaaagggtgtaaaaatacccgcctcattcgaaattgacattggaggcgattttttggtaaaaaccgtaggtgtatatattaataaaccctatgtcgtcggttgaaaattgagaaattttaagggtttttggtaaaccctatgttgtcgattcctagcaaagaatcgacggcataggtgcacacgtgtaaacactatgccgattggctgcttggttatcattgatgaattataacaaccaccaaatattttttattccttggaatatcgggtaaacactatttaattctttagtgctaattgttcat

SEQ ID NO: 239448 - DNA, 1825 bp, Cannabis indica
agaagaaggaaaagattggaaaaggtcggaatagatattgaacatgaagtagatatggctgacaataacaataatggcaacaatggtaacaatggaggtgctatagaagaccaggctagtggctgcaataacaatgaccgtagcctgagggactatttgctaccgaattgacaggggccagatcctgtataagaccacctaccattcatgctaacaactttgagattaagtcagccatactacagatggtccaatcttcagtcgagtttggggggctaccaatagaagactcaaacatgcatattgctaacttcgaagaactctgtcagacatttaaggtgaatggagttagtgacaacgccattagactgagtctattcccattctcattaagggacggagccaagagttggttggtgtcttcgctacccaattctatccaaacttaggaggaattggccctcaaattccttttcgatttccttcctcctgtgaatattgtaagttgagagctgaaatcaacaatttcacccaacatgacaacaaatctctttctgaagcctaggagagattcaaggactaattgaggaagtgccctagccatgggattgaaaagttgttgcaagtgcacaacttttaaaatggattagttagcaacacctaaatacttattgacgccgcagctggtggaacttttatgaagaaaagtgcgaatgaggccttcgaactacttgaagagatggaaatgactaaccaacaatggttaatagaaagaggccaatctataaaggttgcgggtatgcatgaagttgatagccgaagtggaggccttgagtaagttgatgattgctcatgcaaagcaagctcaagttacttgtgagatatgtgggggacctcacacttatgatacttgtccggtggctgtgaagaattttccaatggagcaagcccaagccattggaaactatcagaacaacaataatagtttcaaccaagggggtcatcgataaaatttccaatagtagtttccaaaccagcaacaacaagggttctcccaacaaagaaatcagtctcagcagagccaacagaatcaacaacaacaaggatctagtggagggtctaattctcagatagacacgctactacaattaatggcagagattaaatcttccattaaagtcttggaaactcagatggggcagttggctactcaaaatactaacaggactcaaggtaacttgcgtaggattactgaagttaatccaaaagagaactgtaatgcaattaccttgagaagttgtaagaactatgatgggccaagccaagacaagtcagaggatgaagacaatgatcaataagaactagtaccaacacaagagaagaagactgttgacggtcttcaacaaaaagaaacttcacctcctatcagcattgatgatcatatcaaaattccctatccccaaatacttcacaagaataagctggataagcaattttcaaaattccttgaaatattcaagaaactacatatcaacattctattcgtagaggccttggaacaaatgccaacttatctaaagttgatgaaaaacgttctatctaagaaaaggaagtttgaagagtatgagatggtggtacttactgaggagtgcagcacaatcctgcaaaagaaactaccacccaagcttaaagatctgggtagtttcaaaattctatgctcaataggggtttcatagaaacaaaagctctttgtgatctgggagtgagtattaacttaatgcccatgtctgtgtttaaaagactaagattaggagaagccaagccc

SEQ ID NO: 239449 - DNA, 4096 bp, Cannabis indica
ggggattacccgacgggggaaggattcccatctggtacccattacatatatatttttgaaaaaaaataatgtctcaaagagaattacaaaaaaataatcataaaaactcagtaaaataataaacttaaaggaaatagtgtgtataataaataaaattgagtataattaaaaaaagcctaaagtatgaagttattttaattatagtagttatgattttaaaatttaaatatatacatatatcatatcgggacgggttcggagcaggtttctattcccccgcccctgcccccgccccgtttccgactcgggtatgaatatttaaacccatactcgccccgcccccaaaagtcaacccctattcccgtcccattaggggtgggtacccgcggatacccgaacccgtgaatataattgccatccctaactctaattttaaacaaaaaaaaaaacctttatgctctctctttgtatttccctctcgatatttgtatacagtaaaacctctatttaaaaatactctatttaagaataatttttaatttgttatataaaaaaaattaatcttaatttgaaccaattataaataagaataacctctaaattgtaattatttttaaatggataataaaattaaaacacacaaaaaaatccaattcaaaattgtagctaaaatttataagtaatattaatgccaattttttttgcaactaagcctaaactttgtaacattacttgatgtataacattacttcaagaatatcttgcccctatatatatttttttttatatataattctatacattttatgttttttattaatattatttcaaatttattttattacataattgtttatttgtatgttttgtggtagttttatttatgtgtcagtataacttgtttggtaccacatatggtagtttgacgtttaaagtacttttagattcatcctgaaaaataatgtgtagtaaaagtgacaccttcaattcaaaagacttcttagataaattttttattcacaacaattattatttagaatgttttttctaatactagaatttaaattcctattttcattaaatatagatgattttctactttactcacttgtttattcaaggatctaaggagttttaatgagataagtttttattacaatttatttttaaaatttactatctcttaaacacaacataaattctaaattacctattttaacatcttttaaaggaattactaattttagctatctttgatagttttgcagaagctctaacttttttggtaagactaagatgggttcaaagtatcttattctttattatctagttttcctaaaccatctctttttatattagtcgtaattttatattgcagttaattgactaaacatgtcctttggatagataatgagttttgttggatggaagatggccctcctcaatattggcgctttctttttctgatcaattaaagtgatcatgtcaatagaaaaaagaatatcttacctctggtatttaccaatccagacattcaaatgctattagaagatacacaatgcaggtcaaattatcaagcaagtaagaactctttataagttaagattgttttgaacttttacacatggttgaatggaatatggatgtcaacataattacaagagcagctaaaaaggctgaaacaaaagtaaacacataaacaactccagaatgtgccttcatcccagaaggttgtttccagacaattgtaccgtaccgtgattcggaatcattatttgctatcacgtacaaacaactctgattgagtgacgtttttccaacactgcaccggaggaacaaatcaggtttcccgaatacaactcgtgaatatccgctttcgtctaaaggctgcattgaagaaatttatcatttaaatttagagagtatagatttagacattcaattgtcctaaaagtacactataatgtactctataaaactatgtggtcctaaagttcttttagagagatggtacaacaaaactagctaacgtatgtaatcccttcaatatgcataatcatcagctcatgtctttatgatactgtaaaatttaattctgaaactattttttgtgaaattggcaaaagatacagagtaccaaatgagtaggaacaaaggacattggttttacttaccgcatatcttgcatgtaagggaatctttaacttgaaatcaattccattcttgtcacttaagatatctggattaacatccatgtgaacctccacagaagaacgattggaaaggaacgaaggtgattccaagttcgtatctccaaaaacagcaatgtcattaaaaactgcattaaacagtataacctaataaattatcaagaaaatatgatatacccgtaattatcataatcattaattaaacaagatgaaagcataattaccaccgcgctgaaggagatgttgaagctcgaatggatctgcaaaaaccccactaggcagcctctcaataaaaataattccacaactatcgaaagagatattagctatggacacagcaggtaggttgctaattctcatagatgaggagagatggcggtgggaaccttctccaatcaatttgcgctctatacttaaaagactaggtacaagatttggatcatctgattgaatgtcacacaagccaaatgggagcacttgttctataaaatctttataatgtgaatcatgaagctgttcatatctttcatggtaagatttcataatatactttgtagcacaaaaagaactactatatgagttcttggaatcaagatttgaatcacttgttcccacctgaaaattagaaaagaaaaacaagagaaaatccccatattacatgaaaaaagtcatcaatgagaaacaagaatgagaataaaaatcattgttctaaatttacgataaagtaaaaaaatataatattaaggttccatcaactagatcttacaaaattggctaatataatgaatgacaagatggttgtacagatgaggacagcggaaaaaaggtgtatagaataactgtataataacctgcgagcatttctgtatcaacaaatcaagtggtttagtttggccaaagagggtgatcattataattgaggtgaacaaattacattattttttcaaatccaatcccgactgactagtgactatttttaacaagactatttagtgcagactctagagcctacaggtagtggtaacagacagaatggcaagcttcacatcttttggctcaatcaaagaaaggctcagttgctatcaacctaaattctagatggaagtatcaaacataaattaaagcataaaaacttttaagttattataagaagatgaagaagaaataatagtcatatatgatcgagtcatttagaatacactaagacttaagagtaatatacatctgcttaatcaataacagaaagactctcctttgacaataattctacagttagcatattgtttcttcccattttcaccttccaaatcgtctatgaatgagacattcagaataatataatcatgaaaataataaaaatttaacaacataaaaatcccctgccatgttacccatttactaaacaaaatcccatctacgatatcataacccctatcatctcatatataaggacaatgaggatcaagcaaatgctttgaagttatcagatgcaaaagggtgccatgaacttctatagcacacacaaaacaacaacaaaatgaaaataaacaagcaagaaaacaatgtaaacagattttatatagaaagaaaacatttctttaagaaaaaaaatggaatcactaaccttgcttgaaaccgacgatgattctatgcagcacccaagatgagggatgattgtcacagaaattgtcattaacaagcagaagcttgatagaacatttccatgattttccatatggttggctaatgtaataaagcccagaaaaaaaaacacttattttatttagctctgctcaattttaagctcttgtcattaactagagagtgcggccatgaaccctctcctccctccgcagcaggcgtgaagtcaaggtgcacaaatctgg

SEQ ID NO: 239450 - DNA, 1520 bp, Cannabis indica
gtcaactaacttgccaaaaagggactttacagtattaataaaattttttttggaaatattttataaaactttatatgtaagattatttattttgtaaaatatattatatagtcaaatatttaaatattattaataaacttataatgtggtatatttttctgtctaatataattatcataatatttttctaatattaaaattacaaattcattatttattatttaaagtttacttggcttttaatctctatttgatttcgatcattggttatactataaaagacacatgatgctctcattgtcatctaaccctttcaacctatcttagtagatgatagacttctttcatagtgctttcacccctcttgttattcttcatcaatgttcaagcctttagtgatagagtaccatgcccacacatagcaagtcaagtaatcaatcatagtgcggaagacggtggttaaccaagccgaaagagagaaggatatccaagctccgatcttgttattactctgtgacagaaaagaacaagggttagagatctgagcggaaggattcatattattcccctgccatcaatgtcagattttctaaattttatatttgtttatttcattgttttagagatttcatatttagggtgttaatcaaacatatatgttagtaaatctagatcatggtaaaataagttccaataaaaagatcacttaaatagttccagagaagataaaaatcctaatttttgcagcttaaaatagacgagttgtttcatttctcattgaatgtcagttgtctgtttcttttaagcatgcccaggaatttcaagatttttgaggcgcgtcgcgatactaccttgtagtgtcgcggcacttgaagaaaaatttttggaagagaagaattaagggtttcaatgccttaacattggatctcactattgaggcgcgcctataaaaacttgccaataaaaccttgctgtcaaatttttaccttttagcgccatgatattaaattctcatgttgaggcactactccgtatttttaaattccttagcattaaaagatccaatggcaccgaatctgttgcatttctttcttggattaattttacgatgctcgagagacaagactttatttcattaaccttcttgcacattttttctcaagtttgctacacttttcttcaatactaaacctgcaaaatattaacaaccaaaagcgtaaaattacataaaacactactaaaactatttaaaaataaaatgtacctaaaaatagtaataataaagtcctaacaaactccccgaaacgtgacctttactcaccctcgagtaaagaactaaaaaactaaacgtgacacaacataactgaatcacgtcaatcaaacaaaatatgagtcccaatctttcaattaagccaagtaacatggtttttaagaaaattttaataataagctcgaaactagaattttaactaaatcacatccttaattcacctcatttcttcctttcggctcataaaacc

SEQ ID NO: 239451 - DNA, 2935 bp, Cannabis indica
tagtaagggccctaatttttttttttgtctatggcccatttcagctcaaggccggccttgttgaagaccggtcgtcaaacggacatcggagttgatcaaaaacgtattcaaagtttgaacctcaaaactttgactcgagatctctcgctaacggcttcaaatgaggaggcactgcttgagggttaggatcaccagcgggtggggagttcaatgctctggtgtgtgggtgaggaggtgaacggagtatggtcgtcgacggtggtggttttttaagtgtttgaagagagagaaagagaaagaggagtgagaatgagatagacagagagagatggtgtcaggtgggtaagggagaaaaagaaatttaataaataattaagaaaattgttggtcccacatccttaattattattttttttattctttttctcgattttgaccgagtcctcacattcttcctcaaagaaattttgtcctgaaattttaaagtacaacctcaagttaaaaattaaacaagtgtgaggttacttcatatacatctcagactctaacttccaagtgaccttatcttttctgtggttctaccataagaccttaactactaggatctccctgttccttaatgcttttatctcactaaaaagaatagcctcttttgcgagcgcatttaatgaaatgtgcctacaaaagttgattttttctagaaaagttaagacactttgccagtaaaaggtgataaatttattcgaccaggttcaacttatgatggcgagttacctcgtcagtaaaagtagcttttatcgacgaattatacttatttcgccggcaaatgttggtcaaccaactgccaaaaggtgagaatttttggcgatttagtttcacttttaccggcgaagtagaatgcacaagcaaaagtaaattaatattaggaagtttaaactcacttttgccagtgcgtaaatgcaccagtaaaaatgttgaaaattttggcgattcttttcccgctcagtgaaaacgtgcacgaaaaagtaggtgaaaattttggttaaaacttttgtcggcgcactatattgccgttgcgccagcaaaaggttccacaattaatgaaatgatacgtttcatttagagtttatttttaatacttttaccggtgcacgtaaatgtgccggtaaaagtttttggtcagattttatttttgtcggcgacgcatataaatgtgctaacaaaaattaatgctgaatataatcgtacccgaacccccccccccactttttctctttccctttcttcttctcttcttctatcttctttatgcaaatcaccaccccacccaccactctaaatcaccactacccaccaccattttctccaccctcactaccataatcaccaccgcctccaccaccatttcatctttttttttttgaaaaattataaaaaaaaattgagccaccacaccaccttcgacgaagaatcaccatcgcacatctggcgacctctgcccgagcctccgattttagtgtcgcatttctcactttcagtcaaggtaatctctaatatttatttaaatttttatttgtgtatataaatttgggtattattttatttattcagattcgggttaaattttgtgtatagtgatttaagtttacttttgtgtgtagttaaaatttatatgtatatttatttgtgtatatttgaatgtgtgtgtattattgatcatatatatgtggttgtatatatatatatgtatttaaaatatatatgtttatgtatgtatatatatgtgtatgtgtatatgtatgtatatgtgtacgtatatgtatatatgtgtatatatgtatggaacacttctcaatgagtattattcattgatgaaaattaaacaaatttaactataaaaatttattttttaaaaaattatttttattctatttaacacaattttaagtcatgaaacatcagctgtattttttttaaaaaaaaatgataaataattaaaaaattcaactcaacttaaaatacattatatacttttttagtaatgtaaaattttaattaagaataaccatgaatcgaagtactgtttttatagtaattattattatatatatttttgactaaaaatcaaaagctttattaattaagaatttcgttcaaaacaacagaacgtacttcagcggaacaatcctccaactaaagcacacaacatgtagagaaacaaaagtctcttgtcaagcaatgagccaacttgtttgcagatcgtttaataaaatacaactcaatatatgtggaaactaaaagtaaattacggacatcttgaacaaataaaccaaattgaaaaatcatagaaaaattactttggatagcttgtacacagaccaagctatctgtttccaaaataacgtggccccatggatgatatgcaatccaacttaaatcttctttgatgcctattatttctgcaatttcaggttgagcacggccaatcttccccttagtgaaagcttctagcatattaccatgatgatcccgagctacgcaacccacaccaaaccgatcctcctgatcaaacaaagccccatcaacattagctttgatctaatgtaacataggtgcattctaatgctcagaatgtcgcctcccttcattcaaaggagacaaagaaagaccatttctaccttgagcacacttatactgatcaaacatatttttcgctgatgcaataatatttgatacaacccaactcttttgttgccaaataaaatcatttcgtgcacgccaaatagcccaactcaccacagttcttcctccatctcactaacacgtcccctgccgaataacaacagtatccagctgctaaatgttgcagagccacccccaacatccaccgagctgcgattccaggcaggagtagcaaactcacactccaccaagg

SEQ ID NO: 239452 - DNA, 1051 bp, Cannabis indica
caaaactagattaaacccattgaacttatcaaaaaaaaagattaaacccattgacccaattagcaagacgttcctaccagagttagtaacaaaaacaatcacctatgtttttacttgttaaaaattgatttaagccttttaatcaaatattctccacacaaactagtataggaattagatactcagtctttttagcaatatacaattaaaaattcttttgcaagaatttgattgggaactcattcgctgaaatatcaagtaccacatatgcaaaagaggggagagagagagagagagagagagagagagacagagagtaagaccttttgcgcatgcgacggactcgctggccttgaactcattacgagccgatttctgtagacgaagcatgagaagatcacccttgaggtcaataatctcgtcattaatttgttcagtggttttggctctgatttctttaagttcttcatctcgcttggccatcatgactacagaagaagaagaagaagaagaagaagcctttgtagaaatgggggaaagggaaatgggttgaattctgagtgcattgaagaaggaggacttagggattggagagagaagctttggagagaatgtgagtgttgaaggtgagactatggatatggagctcaacatctttgtctgtatatcttctcagttctcaatttcagctttggaagtagataaggccgcctacccttcctcccaatatttttcatacagccactcgtgggtgtggtaccgtatttatttgaaggtcctcttgttgggtaaaaaatctgtaaaaataaattattctttaaaggtattttttattttattttttaagaaaaaaaaaggtttaatacctatctagcttagcttctacaagatttttttaacttttagaattaaaaaaaaaattaatgggtttgaataaaaactacaaagtgcctttttaatttaaaaattggttaattagtaattttttccccccaactttgacatgtactaaaccgtgctctttgaattttttcggccgttagaaattccc

SEQ ID NO: 239453 - DNA, 499 bp, Cannabis indica
tgatagggtggtttcggatggtagtaatgaggaattgtctcaacctgttctgaaataagaagttcgtaaggcaattttccaaatgcaccctgacaagagcccgggtcccgatggtatgactccggctttttaccaaagatgctggccgattataaggaaggatgttaccctcttcgtccaaagattctttaccactggagactttgaagtgggatgtgggggatgctaatgtagttttgattcccaaaaataagaatcctgtatttatgaaggacttgcgcccgattgctttatgtaatgtcctctacaaggttatcaataaagttatggaaaatcgtatgaaactgctaatggatggtatcatctctgcttcccaaagtgcgtttattcctggaagattaatctccgacaatgtcatggtctcctttgaagtgcttcactatctaaaacagaaaagagcgggcaaaccggttttctggccttaaagttagatatgagt

SEQ ID NO: 239454 - DNA, 1187 bp, Cannabis indica
aaataactcagaaattctcattcactttctctttctctcttcatcttcttcttctttcttctcatctactttatattattttatattattttataacaattctttattattacattattttattaaattataaacaaacacataaaatacaaaaaaataaaaataaaaattaagtatatatctaaaaaaaaagttgtataaatatattataaactaataaaaaaagttttggtctacactacaaaaaatagctacatttagtaacaactttttagtcacaacaaaatggaaagaaaatggaaagaaagcaagagtggattgttaagaatgctcagaaacaggacaaagcagagataaaacttgatgcagatgggtttcggccaattgtaaagggctggaaaactaaggataagggggaggaatatggtgcagcaggcaatagtaactcttttcaggtgttgcaacatctagataaaggaatggataatgaccaaatgggtgagatgaagaaacaagggcatgagattgttaacaagggagggggagttccctctcttgaagatggatgaaataatggcatggaatgtccgaggaataaacaactagcaaaaacaaatgtcagtcaagcaattgaatgagcaacaaaagatagggctggttggactcttcgagacaagagttaaggcttggaatttaggagccttatatgtgcgtatgtttgaagggtggtgctttacatcgaattgtgcttggcacaagggaggtagaataattgtgtgttggaagccgggtagttttatagtcaatatcctaaaatgtacaagccaaatgattcatctctttgtggaatccatagatagaaaagcaagattctttgtcacttttatctatggattcaattttgatgaagagagaagaattctttgctaggaccttaaggatttggctagaaaggatgcttggttggtgcttggagatttcaatgagatccttcacaaggaagagaagattggtgttcgagcaaggtacaaagaagcaagtgagtttaatgaatgtgtggaagtgtgccatttggaagatgtcaaatatacagggaactacttttgtaacgccctaatgctaaggcacactacagtgctttttcaattattgtgcaatctttactaatcaaagaaatttctcgaaaa

SEQ ID NO: 239455 - DNA, 800 bp, Cannabis indica
aaaaaaaaaaaaaaaacctctatgaatttcgtgtatcatttacagttattcataatctttattattattcaaatacttatatcatcgttttattgattctgcgtcgtttattagaaacaaggtcaacaagtaccatgactatctttgtccatgttcagattatgaaattctcaaatttttattggccccatgatttgtggtgtgattgtttgttacaattgttattgctatggttggtcatttagttatttctttttattttagattgaataataaggttgttattatccaacttttatttttgactagtagtcattgataggtaacatttatctcatgttcatttggattggatatgtaacaccttacttgactaggcacactacaataattttctaattattgtgcacgcctttcctaatcaaagggtttctcaaaaatcgtgataaagttgaaactttttgatttattttaaactttaataaatacacatgtttacataaattcaggatcccattaaaaatttacaaagtattcaaaatattcttttcgcaagtaatctcagttcagattatagatgtagcattttatatatgacaaggaccgatatgaataaagatgtctttatctaacatgttgtttattataaaaacctaattcatattataaatgatgatcaatagtagatcgactgaaattctgagtaatcatgaactcctgtttatgttattagtttctttgattcactcgttaaagttcctttgagaagatgaactataaaattgtgcacaaatttaaat

SEQ ID NO: 239456 - DNA, 3754 bp, Cannabis indica
gaacaaaacaccttatgaattattattcaaaaaatagcctgaatatcaccagcttcgttcttttgggtgcctttgttttgcttccacctcgtcaggacataggactaaattctcaccaagagctcgcacctgtgttttcatgggagatccccaagaaattaaaggctacaaactttacgatataaataacaatcagttctttgtttcatgtaatgttgtgtttcatgaaaatatattttcttttcaaaaattgaatattgatgatggtagcatagaccctttcactcaagtggttcttccccattctatgatcactaacacacctgtttgtgagtatcccatagatcaagttaccatcgcgaatccttctccccatgtacatgacacaaacgaaagagatatacatcaggagattcctacgtttgtcgaaacaacagaagcatctacaacacctcctcaaaatcctgctcaggatgcaccatgaagatcaaacagacaaactaaatcaccaaactacttaagggattttaagtgctattcactcattcaagataattcttccacacgtcattatatcaaatttattgtttcttattccaaattatttagcccctacaaggctatcattcttgcaatttcctctgtcaaggagccacgaacatacctggaagctatataaattgtagaatggctaaaggttatgcaatgagctaaaagtactcgcaggtaacaaaacttggattatagttcccctgccaacaaataaaagagctataggatgttaatgggtctacaagatcaaatttaacagtgatggcagtgtagaacagttcaaggctcgccttgttgcataagggtatatgcaacaagatgtgctatatttctttgatactttctcccctgttgccaaaatggttacacttaaattgttacttgctatttctactatcaagaattgacacactttagaacttgatgttaataatgtttttcttaatggagaccttaatgaagaggtttacatgtctctacctcaaggccttactctttcttcttctcttaatgtagaaaccaagccagtgtgcaaactacacaattctatttacgacctcaagcaatctttcaagaaatggtacagaaaactttcagatgctttaattcaagaaggattcatacaatcataggctgactacaccttgttcaccagaggaaccaaagaaactttcattgctctccttgtctacattgacgacatcatcatcatcagtcctaacatcactattctccacaaattacaaaactctctacatcacaagttcaaactcaaggctcttggaaatctaaaatatttcctctgctttgagatagctcatgccaaagatggtttattcctttctcaaagaaaatatacattacagcttcttaaagattcgggttacatgggcagtaaacccaacaaaacacctatggtatctaagctgaaacttgacaacgaacatggagaagcattggataacctttctcattattgacagcttgttggcaagctattatacctcactctgtccagacccaacattacatttgtagtgaactctctcagccaattcatgacaattccacgcactacacaccttcaagttgttcaacatttacgtcgctacctcaaagacagccctagtcaaggactcctctattctaaatcttcaacattgcacctttatgggttctctgattcagactgggcatcatgccccattacaagtcgttccacaactagcttttgtatttttctaaaagattgcctcatttcttggcgcacaaagaagcaaccacaatctctaaaagcttagaaaaagctgaatattgaggcttggctgcaacaacaagcaaaataatatgattgcaatacctacttcatgactttcaaataccacaaccacatccaaccttcatctactatgataacaactcaatcatacacattgcaaataactcaacctttcataaaaggactaaacatatagaacttggctgcccctttatctgagataaaattagcaactcttcaataaggctcatccctatatccaattcacttgaactagccgatgccttcaccaaatcgcttgcttgttttgtgtctactgtttaaaagttttcaatcttttttgtcttaaagtcaataatatatcgatattctatcaataaattgtcgacaaacataaatacaacaaatattcctaaatatcaacaacaatttaaattaattgggtgtattgtcaaaaaaatatcgacaaactgtagatacattgccaaatatatgaatttatttaaattactttattcatcaacatgatatcgaaaacgataatggtcatccctgaccttccttcgcatattatcgatattgcatcaatattttatcgacaaattgtcgataatcttcggaaaatccagattccgacagaaaacaagatttaccagatctaccatttcagaccaaaaaatactcgtttcaacaaataccacacacatataatgaaaataaactacatactattactaatgtctaacaaaatacttaaaacccaacttacccattacaatggtgaatgattcttgagtgattagggtgtggtccggttttccaccaccaagagagatcgaggagcttagagagagctgtgagagggagagctgagagttgtgtgagagagagagccctcaaagtagagagagagaaagacacgagagggaaggtggttttagttttttacattttttttttaattttaaaaaaagataaaatgggaagttcatgtgattaaagaaattatttagtaacaattagtaaggaaagtcaaatttgatatgacgtattttattatacattaatagtgaaatttcccaattgatattgggtcccaaagcccccacacacccacccaattaacccctattcctattcagctgtacaaaacatacggttgctattttattttatttttttgaaaaaaataatttcgtgtcaattcccttattaaattgccaaaacaattctaaatttgttataattttggagtttatttaaatcaagtaaattacttgtaaaccaatttatcaaaccaatttgttttttaaaaaaactgtaaactacaaaatatccgaaagtaaataatacttttttaggtactttttgataaatttgtgcgatattatagatatttaaattgtaattaattattaattaatgatctattgctatttgaatcggaattaactagtatagagaatcaatctaattaaatgtcacaatattatagtgaagcagagtcctaaccttggcccaaagactatagcttcaaaacatgacgtcgactgcggatgaaaccggggatgtgttcaggcatgaggttaattattattgatcttacttttatttttctcaattaatttttatttcatattttatggtttcatcatttaattatttttttgatttgggaccaatatatttctataagcagggaaggaatgcagcaatagtagtatgttggtttctgggattgggttctcttgtggcgtggaacagtatgctgaccattggagattactactattcattattcccggtgattaattcttaatgaacattatcaaattattttactggcattgttaaacataatagtactgtcgttgaatatattggggtggtggcgcagttggctagcgcgtaggtctcatagct

SEQ ID NO: 239457 - DNA, 1324 bp, Cannabis indica
ccgttttctgggattctgcctagagaaataattcaccatttttggaaaaatatatagttaaccgttttttctacaggaaacacaaagctactcccaagctcaattctaccccaaatcgaaccaaaacctccaaaacacttataaacatcataaataatatattccaaccagaaataatattagaatcgagtttttccattgatggactaaaatttgaactcataataaactcaaacttagctaaccaacaccaaagtccttaaatacactaactaaaccaacttcagacaactcaaaattaactttaaaaaaacaatccctaaacaccctaagctcatacaaaacacaattcataaaattacaagcttaaccaaacttttaaaatgaaatgtcaaagagaaaatagtctagggtttaccttaggggtaaaactctactagctacaatgaattcttgctgaaaaaaacttaattttggtctgaaaaggatgagaaattcgctagtttagccttgggtttctttggctgaacaagaaaaaaaggaaagagagaaagataatgtttgtatttttgattttttggataatgactaattgacaccttggaataaactctagaatttcacactaaattccaataataaattctaaggcaaataactattttttttaacttcactaagaagtaacttttaacttaggggtaaaatagttcaaaccataatcccgataaaatctcgacaatctaaatatctaactttgttgccctgttaattttaagatactaaaccgtatctaagtgactctaatgaccaaatcatcgtatttcactgtttttttttatcaagaaaaaaaacttcattaatcaactcaacaagatacaaccaaatgaacttcttcaaagagaagcaacaagagcaactaactaataataacaagtcaattgtgttgaagtaaatttttctctagtcttgtccctttcctatcttttatcaagtaaagcttatatttcacatcacttttaattttgttcactatacaattaacagaattagagaaatgggaaaataaataattatttcgattcctccaaatatgattaactgtgggagccaacacgatcactctaactctgtctacaagcctcgatctcgtactacacagccacatgttaccagacaaaaattataaaaattataaaaatcataaaaattcatatatatataacatatatatatataatacacctaaaatttaataaaatctctataattgagaaattattctcctaaggcctaaacctgataataaaccctaattttctac

SEQ ID NO: 239458 - DNA, 1072 bp, Cannabis indica
aaaacatcaagtttacttgctccgccacatccaagtatttaattgccatcagtctttgacaaagagcaagaactgcatcatgtcggagcagaaaacctgatgatcggggataaacatcacaaagataagttatagcttttatagccaatagcataatttctgggttagtctcatatttttgagagccttacaagataaggagataatggagtcagctgtcatgctagaaagtgaattctctgtacaaaatgacaacacttcacatagctttgtaaacacgactaactgcccagactcctctgtttcttcattcaaaactaataagatcctcttgaatttttcacgatcaccagaagttcttcgcctctgatagtctctaagcttagagtgtctttgctctgcatcatcagagtcacaagacccatatgttgaatccttttcgggttctccctcagaccggctagaggccgaagcagaagatgtagtatccatatcatggtcaccggttttagcactagaattagtagaattcatatgagtttgaacagatgaatttgatgaactcgatctaaactccaaagagttgcaggctcgcttatcatccgacaattcttctactgtttctgtacgcttttgcccacgttttcttattcagttctcaacctgaaacaataacatcagaccaatgaatactcactcaacgatcaataaatgaaatcaagcaaatgtataaatttacaaagatgacgataatttacgggcaataaatcatcaaaatgtcattaacctaggtatccaatcactaattaacaaataaaaaacctttcaaatgaatgaccaatttttcttgagcccaaagatcctgattcttaaatatataatgattcccacccaaatatagaaatattaattttagtaagtttgagacaattgaatggaaaacaaaacaatcaccacttaatcatcgaaaacaaaaacaaaaaatctaaaaccacaaaaaaaaatcgagctgaaacatggcattgtatatacatatacacacgggcggacccacattgtagcgagggggggc

SEQ ID NO: 239459 - DNA, 1511 bp, Cannabis indica
atgttgaaacactattgcttcagcttatcctacaacgtcgtaattaattctcgccattttcagttcttgatttttatatatttttcctttttcagatataaaaaaaccattaataaaaatgtaataaactttgaagacataacaatcacgaattagaagctttgacatgattaacctttcccttaattataaggttaaaaaacaaatctttctgtgccaattaaccatcaacatataagtcctccgttgttaccactagtttcagattagggtggacatggccggttctgacatcctcacttaggaccgggggcttgggcagaagagagtcgagagacaatactcggtctggagacatagccaactgagatgatactattggggtatttgaaattgaaatcaagtctagacatggttcctctgttgcttatacaaactacaagcccaaattaaaacagaaaatatggtctgacgataacaacagtcactaaaacctcaagctgaaggaacaacactagcatcactgatggattcacgccaagcatactgtcttgctccatctttgtcaacaatcttgatcaagaaatttggtggtgcaacaaccagcctagatcgaatctccataatgcatttatcgaccaaatcaatcgcttcttccaatgacatgccactgtgataatgtctatccatcatggaaagtgaaaagtaggatccataaccaaatgctcccttctcaaccttgtgaagtgtggcaatgtagtcgatgtaatagagtgatggccctgtctccttatcatatccagctaaaaggatgttgacagagtaaggattctgcaaaataaatatataaataattaagatacagttaaccaagaactgaagcctgcaaagattctataggaggcaagtacaagcacgaaaaatgcagctcgatatatcatgatactaattgcacacaaaactcccatcttgttattgaagctagatgttgagacatacattctgtgccattagaccacagtcaaatcaaaagatcctagaaactagatttctggattctggttcaactgttaatgaatccagaacacatcagttattgcacagaaactcaatgaatttaggatgcttgcatcgaaatttaaaagtatcacatattctactaaccagaaaaacaaaattcaaatgggagtaagacagcaaaaggaatataggagacaagaaaatatagaaactatgcagcagtgtgaagtaaagtcgttttaatttcatatgtttattcactacattccacttctttttttaattctgcattcttctaactaatagaacaaatcaatactgagaaagtcagaatcaaccaaaatgaaataagccataggcacctggtaagttcaaaaacacaggaaagcagatctcagtatcacatatagtatgttgtcactacagcaccataacttcgtaacttgttactccgatagctaagcaacgtctatttgaaactcataaggtaa

SEQ ID NO: 239460 - DNA, 4267 bp, Cannabis indica
atcataacaaacatatcctaagaaacagattcaaaaataacctcaacatgcaaaattcactattgtacttaagccaagtttaagttcttgaactcaaactttctttactcaaaaatcaaccctcaaattaacttcaaacaaacatcaataaacttaaaattgacccaaaaaacaacctctaaattaggttaagggttcggacaaactaaaaaaaagttgcaacagcagcagagaaaccttgcttcttgaacttggaatacctggatctttcaattctccttaaaatcccctacaaggaaacatagcaaatctcccagtcgagccaagttttaacctgtctatatgaatatcaatagagaaagtacattcaaataataaatgatctttagttttaactgccgaattgcagaagacacacttagtattatatattacttgaattattgaggcctctctctagtcttcaatctatcttgaatcgccaaccacaaaacaaagttgtgctttggaatgtttaacatgcaccaaacttctttactccatgaaagtgctccatgtttaaattcatcagcttataaccaactgcaattgaatattttctaagggaagattgcatgggatccattagatgccttattctttctttcgcttcaaaaattttttcccaaaaccggttgctgcataaaggagctttgtaatcccaccactcatcttgtttgatgtacacattatgtatccacttaatctataggttatcatttttattggcaatcgaccaaacatgtttaaacaatgtttccatattccaatctgaggagttcatgaaaccaaggccccttactgttttggatccacatatagcttgtcctaagcaacacttcctggactatccatattactttaccctttccacaaaaagtttctgcaaattctttcaatttctgaaatgattctcttgggtaggattaggatctgacaccaataggtgtgtataacagaattgataagtacaacacgacctgcaaaagaaaaatttcttgtgctccatgttttaactctagaaaccattttctgcaccaaaccagtacactctgatgttgatattctcttggcacatattggtatacaaaggtatctaaatgatgatgacatgacaatagattaaattttttctattgaaaccagacatattcaggacccttgttactttactttcttgcattccactgctataaacagcaattttagacacatttggttgtaagctagatgtgatggaaaatagctttaggccctacaacattaaatagatactcttgaaattgcccttccaaaataatagtacatcatcaacaaagctaagatatgagtcaatctcaaatcactacacctttcattgaaggtaaaatattttttctccccaatcttcttcatgattctacttaggtattccattctcaaacaaagagtaaaggagacatgggatcccctgcctcaatcctctcctagcttcaaagaagccatgtaaagatttattaaacattagtgaataccttggtgctgtaacacagctcatgatgagcttgatgaattttggtggaaaattataagcatgcagcagctcatctaagaaacccattctatggtgtcataagctttttgtaaatcaagcttgatcatataattaggcttcactgatttccttccatattgcctaatcaaatcctgacatatcattatgttgtgggaaatatatctacccttaatgaaacctcctagattttgagaaaagatcttagtgaggatatcttttaacctagaacatatcagttttgttacaattttatataatacattgtaacaagctatggggtgatagtcactcacagtgttagggcattttagcttagggtgagagtgagaactgtcgaattgatccccttcggtattaaaccaggctagaagaaagatataacaacttcgtagacatcaagtttaattagctcgcaattatcttgaaaaaaaaagagttgatgtagccatcaggaccaggagccttaattccaagtatactaaatacagcaagcctaacttcttccaatgtgaaattagctttcaacaactaaccatgggagttggatattccttcaggactgattgtttattttctaaccgagatcccaataggattttgtaataggacaggaaagcttcagtagcctcattaggatcatcaattcttcttccttcactattagttataaacaaaattttattttgaattcttctctgcttaatagagatatggaataactctatgtttgaattaccttctttgatccagcttatttttgctttttgctgcataaaggagcagtaggttttatgaacatcaatatactcattccttgcttctaactcttgagcaactaaggattcaaaggatctttgtgcaatctatcttggcttttatctagatttctcctatcttgtacatttgcattttgtcttagccttctcaaagaatctcaattcttacaggctaagacaaatctcaaggtttgtaaacttggccacttgtgtaatactcaaaggtttttttagccaaataatattgactcgtggactatagtttgttaatacttaaatcacgtaaaaatctcttatcttgttctttatttttgatctatttatttagcattaaaataattataatattggtttctaaaaaactcaataaatattttgatactttcatttggagttgaagaaagagttgataccaaagttatagagtccaacaatggtagtcactagaaccactatcgaaaaattaatttggccctcctaatgggacactcccatggattacgaaatgggttttaatgtatctgataaagaagatgagctacacagtccaagtactagcaataaatttcaacttttagaaaaggttagcaatcccaacatacataaatgggtaaatcattttcatgaaagcaatccctactgtaacaagttttctttttcttttcaaacaaaatatatttatatttatatataatcctttatttatgtatttttaattctaaactttcaattttatatccagttttctgatgacagcaatggtattagccaggcctctgttccgcgaaggctacagtcaggtgtgtgggaggacaaaaaagtcagtataagtttttttctttttaattttttctctgaatataacactatagcatgcaatttaaaatcgtcggctatgtttaaaattgcatgttatagtataaccaatgatatcaaaccgtaggctatagtttttactattgtcgacggttttctatcattgcctattctacccaattttatgacagttgaatacgcgatggttatagagaccaaaggcaatatattagccaactatttaaaactgtcgggaaaactaaattttttagtagtggcatatgttgtggacatcgtcccaacaattgtgagtagaattgtaaggaatgagttcgatctcaaaatctgcgattatggtgtttcttaaagccttaggggacatgcaaatgaagaagataaagttgtggggatgactagaaaattaataagggtggattccagcaatctgagcaactttcttgaaagcacaatgtgtttgctctgaacaataaacgactagctttccaatatttatcgtttctaatgattttgagaattctgttttgggtagcgacaagcatacacaagatggcctcaccagtggccccttgtagaacatgttcattatatagcaaactaattagagtatcacaaaccctaattaggtttactattggatattacacattacaaagaccatactaaataagatgtttattgggttcatttaattagattacttatttagctcaatttagaatactaactcaaataaattgtcttaatttgtaagcccacattagtagatttttaaaaataacctaacatcgagtgcttcttgatgtttttgtagtaatcagcgatgaaatcgattaccatgtatcgaaagtcctcggggtccaaagggtttgtgcttgcatgaccgaccatgtttgaaagtgaagtgagtctttccaattcaatgaatgaatataagcacgatatatattctagtttaataataatttatttgtttagttttggatctgataccttgctaaagtgaagggatgagttttgtgaggaagaattatattggataaactatgtgtaggaaataaat

SEQ ID NO: 239461 - DNA, 1060 bp, Cannabis indica
acttccttcaacttcaacatcacttacgatacgcattatttactaaataaataaaaattaaactctcctctactctctctcacaggagacctattgtttctaggactaagaaaatttcttcttattcttcttcctacaggcgcaacttcgagggttagagttgtatttgcatttggtttctatgaagggtcgatgatggtgccgttagtgttcggtggtgggttcaatgggctgtaatggtgatagtattggagttaatggtgatgttgttgtgccgttaatggttaatggttagtcttataatttttcttaaaatttatatgattactttttaattttgtaacaatatcgtaaaatttctcttaattttatatataatcatgatatacagtatacatatatataaaattaaatataatgtataaatataaaatcaaatatactgtatacatatataaaatgaaatttctttcaatctcccattaaatttattaagttttgtctataaatttattgctattaaatttaaaataataaaatgtcaaaaaaatacatgtacagatcgcaatgagaagtttacaaattatagcagattataaggctccaactatcagtgcaaatcaatcttaaatggtgagaacacacaaagaatttttttttaaactattgagaaaatggttgtcatttcgttttatttatgatatatgacttgtgtaaatgaatatgtgcttctatgaatggtgtcttttgaatggttatgttggtctgtataatttttgtaaatagattttttgtaggtgtgtatgaataaatgtctgttaaagttaacttgtttttaagtatattctgttaaatacaaatcaaactgtaaaaaggacacaacaaaataccttatatagccattttatatattaggtaagatatataacaaaagttaaaagtgtctctctttcaagtttcaataatatttttaaacggcaagtcattctctttcttattttttataaaataacattttgtttagttagtagattgagttattctattaaggctaaaggtg

SEQ ID NO: 239462 - DNA, 2693 bp, Cannabis indica
ttagctctttaaggaactaagcaggtgcaaagtttgccttgcttaccaacgcattgctggccagtcgagcgagtgcatcagccattgcatcttttttggggacttgtctttaagtacagcctttgagaaaacttaacaagtcttcaatctagctcaaataggccataatcttttttcctttaagttgcgtattcacctaagacattacctacgagtagttgagagtcgtggtgtatgtcttggtgttcagcccgcgcttcgtgtgttagcctaaggctagcaatcggagcttcacatttccccttattattagaagctttgaaattaacctttattgcctcatgtagccattgcccacaggtgccctaagggacatgcctacactgggtagttggtaattgcaccttctaggttgagtagtcttgctcttactctcgcttcttctttcactctggcttttctactgaatcatgagagatttggggagatatcctttatatttagcttgaagctagtgagatcttggtctttttatggccatgctagattgacatattaccttatattggctgagcacgatggctgaggtgcttcaggtattggtggcacctattgccatggccggttggcatgcatgctttgggaatttcggtaggagagtgaagtatgctcacttctcctccttctcccttatatttcatggcacaagggaattgtggaattttgcttttttgtcattattctggctagagccatcattattgcgcttgccaccaatattcccaattttttggagaagtggcagagattttctgcactggtcggcatgtcaaacagtacttggcgtagtatgatgccctatgtgtattcaacattgatctacctcttgttgggctttccgaaagcaaagcttcttccaacttgatgaagccatctgctcgcttaaggaactttgtcatgtttctcgttgagatccttttgatatctttctagaattcactcaacgggaagatgcctctgagtatgaatgtatatcagccttcctctatgaggcctttgacctttgtggcctcagccatgaacctttgaatgtagtcttttaaaggctcatcttatctttgctttatttcaaccaaatcctccagtcgcgaaggtatttatcttgaggtagagaatttaatataaaactctcaggagaattattcccaagaattaaatcttcttagggccaacttgaaatatcactgttgggctatttcagctagggttgctgagaagatttggcattgcacatctataggtacttgttggagatctgttcagatcttaaagtattttaggtgtgctagggtatcttctcatgcagtatttattttccataccggaatcttgaacttgggcaagggcaaggcattgatgtatgccaagaatggtgagccccttgacctatccaatttaaggtctgatggtttcgggccagctaagcccttgatcatgtattttatttgatccaactgtgctttcaaaaaaggatttgatgttgtagaggcctggttgattagcccttcttgattggtcagcgaccctaaatttgttaaagcctggctggccataccgtagaagagggtattcaaggccggctagccctaagcctgatagctggctgtggtcgaccagctctgcgtaggggaactagccctggtcgaccatcctacactaggaaactattcatggcaagccaatcctatggtaggtagggcctagcttcccattgttccttgattggctagtgtagcatgtgtgttggtagggggtatatcataccattgttggagttaggtggatctaagtatctaaagtgatatgtctcatttctggagttgtcattatcttggttgtttccacccgtttcagacctagaaagttaaagattagcctttgggtgacttgctcttgcattttctaagatggaagttcaccttgttggccggccagaggtgcaccactaaggggctggctggccaaaggttggccaagtgagggtgttgtctggccagagatccctagccgatctcccaaactggtggttttcaaagtttggttgttctcaccactagatccttgtggcaagacttttccatcattgggcaagggaaggtctaacctggttccaaaagaacctagttggatcgtttgtctgtagaccctactcaatctatcaactagtctctcttggagaggatctatgatgagatcctgacctctcccaatagttctttcattaaactggcttattaggtcacttgcttttctattataacgacctagctcttcttgatgagatcgaaaaatgtactcctagtcatccatccttctgagaaatttgtgtctctattgtgcgaatacatcacaaccaacaatgcgtggttcttcagtttggctaacttggcagatggcctctctaagtctggctaactcaagatcttctcccaattctacgtgaggctcgccaatggctagcttaccaattcatggtcccgtctccccggcataatactgaggacaagatctagttgtggtggccaggtttgtgatgcctgccgagatgggaggcttggccacattatcaagttcgtggagattctagttgtggctagaatacaaatatccggatcagcagtcatagggtcttg

SEQ ID NO: 239463 - DNA, 1870 bp, Cannabis indica
atgaagtaagattatgatcttacatagggtaattaataaggatttattgaatgattatacaaagcgtagtttattaattacgaagattatattgagatatgtgggtatcgagcatactattattgaaataaaaatattttatcgggcccgacgactgtggaatttagcaatgtggtcaaaaatgtcatgacattcttgggagaattattttaaggatattccttactaggttataatttttagaatttcgatttaacggattagtaaaattaccaaaatacccctaggttattttaaaagttttggaggggtagattagtcttttggtaattacaaattttgccttttgacttttttagggctgaccattatttaaaaaaagaaaagaaggaaaaaggaaactatataatgggataacttacaaagcaagtaataaaacaaagcttctccttctcttcttccttcgagcaagctagaaccaaccagctttggggaaattttttttcagctattcttcctcatttcaagctgaatctaaccccaagtaaacctagaattttgaggtaagtttcctccttatgttctttgtgattttctaggtttttaagctgggttttttagttctgtatgagttttcagggatgtaggtttagataagctctgagcatgatttctaagttgaattaagttcgtttatgcatgttttagttgatttcatggctgtttggattgtattgtgttagaagaagctaaaggaattgagtttctttcacttcgacatgtgattttgagttagagattgaactactgtaatttaaagcttgggatatattatatttatgatattatagtgtttggttaggtttggaggagctttgggtcgaatttgaaggagagacccaagaaattttgctctgccagaaccggtcgactggatggttgtgatgcattagaaccggtcgaccagttgcccctaggggaaattttcaggttttcttcaggttcagtttttggctcggggagcagtgtatcatctattttaggttgtttatgaaatgcttgacctattttgaagttgctgggagttaggttatacttggctttgagttagggttttatttcagaattttggattaaggtattgattgagtttcaatcttcatgacataggaccgggatcgcccagtttgttatgtggctaaatgtaagaaaagttgtaagcaccgtatgtggctaaatgtaaatggttgaatggttatggccttggttattatcaagtttgtgattagatttttgttgacacctaggttataacctaggattgggaacgattattactgttacaagtaattactcttgaaccgcggataggtttcttacttatcgtttgcttcattgggaaacgatagtgacatattcagctcgtggctaacgagtggtaaagtggtactttataaagtaccagagttgtgttgataatattgggtaaatgtgtatgcaagttaatttgagattgaattgttgaatattactggttattatgtaattcacatttcttgctgagtctttgtgtcttacgagtgcttatagtgcaggtaaagggaaggcaaaggttgagcagccatgagttgaggtcgtagctgcaatgtacatatcacccgcagtggcacggcccaatgaacaggatgctctattttgaatatattttgggaatgcaaagtttatgttgtaaaaacactattaaaccagtttgtaaatattttgaaacacaaggggatctcgtagttaatattacttatcttttatcataaagtgttgtaaattattttaccaggatcttagatctactcacaagtatgttgtttaaaca

SEQ ID NO: 239464 - DNA, 897 bp, Cannabis indica
gaaaccaccgctgtctcctttttgtaaggcaaaataggtggtagatcttgaccatataatgctttgaaggttgtggacttgagggatgtattatgtgctgtatgaaaaatcagcccaagataaaccatttaggccattgtttgctcatatgtgaaacaatgtaggtacgtgtcaagacacctattaagaaccttcaattgcccttcgatggtatggtatgtggtgcttttcttgagttgttttccttgttgcttgaataaatggctccaaaagttgctcacaaaaattcgatcgtgatcggtaatgatggacatgggaaattcatgtaagttaacaacttcgcgcataaaagtttcagctagtgtttaagcttccaaaagtgatcatggtcaatctatcaacaaccaccaaaatcgtgtccccaacgttggatttgggaaggccttctatgaatctatgattatttcgtcccaaacttgtgctggaagtgggaggggctggagtaatccggtaggttaagtattgaggagtttattttgttgccccaaaaagttcagctgcgatgtgtttataagttttgagcttgcctaaatgtcctcgccatgggacttttcttaaaatcagctaggatgtgtggaattatggtgggttttctttgggatagctacttttgtagtagaggatgtgttatggagagtgaaaacgtagtgttgttgattactgacgtgaatatcatatcatagctgagtaaggaaggcatcagcggaattaatactagggtaattttagtgggggtaatttggtcaagtaaaaaattcattacatgatagagcaatttgcggcgaaaccttcttatgttttgatttttatacacttaacccccttatttttattttt

SEQ ID NO: 239465 - DNA, 1039 bp, Cannabis indica
aaaacctacaatgttaaacctaatgagcttaattaaatgtttaatcatattttatgtttgattgatagcttaatcgtcatttttttaagtatgtatgctatgtattatatttggtgtataatatatttgtttgggataattttattttatttaaaactgactatttttttagttactagttggatgctaatttaagataaatatattgttttattattataaataaatgcttaaattatgaattcattcagcacacaatctgagtgattaagtagccccaccacattatcccttcagcttttatatttatatataatataagttggcactcttttcaaatagtgattgatacacaatttttttactgaaatcacagttattataataaagttttaatttcaaaaaaattatggaactcacattaattaattttaaaattttactaattactatactttttagttttacactttaattagacaattaattactcgtttgttacttcgtattgtagtgtattgtattgtgttgtattttattgtattagtattatttaatcaatactatgtttctattgacttgtattaatagaatgtgtaaatttataatatatttttaataaactcgaccccaacaccgactactggtcgggtccgggtcttagatctggatccaggttcgggtccggatccgggtccggttccctggttggatttcgatcccaggtctcgagtctgggtcgtaggtctgggtcttgagtcctgagtccgcgtccgtgtctaggtctaggttcgagtctgagtctgggtctgggtcccgagtcttaggttcatgttcgagtctcgggtgctggtctagatcctgggtctcgggtctaggtcctaggtctgggtctgggtccgggtcctaagtccgggtttgggtcccaagtttgggttctagtcccggtctacgtccgggtctggatctgagtccgaatcgaagtccaggtcccaggtttgggtcctgattcgaggtccgggtatgggtctaagtctgg

SEQ ID NO: 239466 - DNA, 1956 bp, Cannabis indica
atctatattaataagcaaatctgattatattgaaatgagttttatttagggtagaaaacccaacaaggaggcccgttgtgactttagagatagaaaggagacataggattcttcttggtctccctttcaggttacgagctgctgacttcttgttacacgaggataactttaagacttgcaatcttcttggtagcaagcaatacactggagactttagagtctcaaagtattcaaactggcagcaggttctagtgcctactgatgaggaagatagggattacgtggctcacacccattatttgagaaacataacccctcgggaaattgaagaagatgcctcctgaggtaataactttggtatttgtagatggtctcctaccataattagggttgagtaaactaccttagttaaatttaaggatagtcagtacaattttttcatttagaattgtgtagatcgcatagcccatagctttgatagttggtaccccaagcaccatgttcaattaagctataatagttcgtacttcgaaatttccaaacaatatggcactaacatcgatagggagagccatccagattgggatatttctccactaaatgtctttgacctttatatgattactggttctagggagttcagctgttattatagttcttcttcctcattgatgactaaggtaattttcttaagtgggagattatctctccacattttctttgtttattttgcataagtgttgacaatttgtcttttgtctcgcagatatggactttgaaaatcttctttccacctctggttccaagaaaggcaagaagcgagttgctgcttcagaaacttcttcggggatgaacccagaaccgttaaagagatcaagaaaaccataaccaacaagaaacgtgccttgactcagatggttattgagccaacaacgcctcaaataacctccccagttccagctactgcgagcaccaatgaacaagtcttataggttaagttcccgagttcataacctaagatggtgcttttggagccctcctgccccctgccaagttctgcaggcattacgggctcgcaagcttgctcgcagtttgctacttcctgttggcatcattacaaatcctttcaacaggatgaatgggacttggttaataatggtgacttcgagaatttatcttagagaagtctaaaccttattctttcggttagtctatatcttcattttgtattttaacttcgtacttttccttttagtcacccttttcctgacttatttttactgcatgcatctcttctgtctcacttggctcaccaaagaggccttcaaagaatcaagcaattagaatccgagcttcgcaaatccattgaacaacatgaagttgttacgaggcaatggaacgattctcaagtggagattactcgattaatgaagaatgaattaacactataagggaactaatattcgattcataatctcaccttggtcaaacttttttatatctgaaaatatcttccttaaatgaatttcatccaatgaactaacatccctacaaacttgacccatgtagaaatcaaaaagacaacttgttgtagtgcatttcaaaaatgaagggtagcatctatggtataatgctttctttcgcaaataatacagagatgtatcaacatgctgaaaaaggaaaaaaaaaatagtaaacaacaagatttaaatataacccatcgatttagaaagataaaacaattataaataacacttacttcatctgataaaagacctttagcatcatatatatcgaagaaccacctcttccttgtaacaagttgttgaccgagtttttcggcaaccaacttaatagtatgtatgagaaagtcgtaggaaatttaatgcatgagatttttacgtggttggggcattaatgagccttagtccacgagtcttttttatttatgagagt

SEQ ID NO: 239467 - DNA, 1264 bp, Cannabis indica
caatagaatattttgaaacttaagccaaatcattttaacatttttcactaatgattaaattctagaaaaatttacacatttatacactcatcgccaacatcttgagccctcagtttcctcatacctctagttgagtattcaatattcacacctgatgaaaattctaaatagatgttgccttagaaaagagataataaattgattagtgccacatgaggacacacccaagagggaagtgcttgattgtttgtatggctataatatgatttcaattcaatccttatccaatataaattaaattgatacatatgaacgactgtaatctaccagaaggaaataacagtttcaatcaccttgaattgtcttggttcggatactcgcctagttattccatctgccagctttcaagagatgcaatgagttcatgggaaggagcatatggctggaaaagaaaaaaaaaatcacaaattttgtcacaaaaatttcaatttctagaccttggttaactttatcaagcatgtaaatcaacttgaagttattttaaagaacattcaaagggatgaaagataagaccatgtgaccttgtctacatttcaagctataataacaacaacaacgaataaaagatttaaatctcacaattatttagttcgttaattataaattttatatgattcttccattgaaagtaaaatgcaactaattttcttattaaattagtaagtttttaaatttggatagattgttatgatgatgtgcaaagaagtggtcttgataatttattatttttacaagcaacatttctaaaatttaaagcaaacaaaaacataattttaaactgaaagcctaaaagtaccccatctttattatgaattttttggctgttggagcagagaaaatgatttcctgagcacctgacttgatgaacccctcttgaacaccattgtcaaataatgccagcaaagaattgtaatacctcgtctacatttagcaaacaaacctgcatagattgtaatgtctagttaaaagctctctttctctaagtcattagctgattgtagtatttcaatgatcaacagggaaaaggttaccaatttcttatgaatcccaagcctgacccatgttatcatctccaacagctcttctattattccatatcctcttataaggacaattatctcaaatgtgtttttaacataaataaattgctcaaagtttatacatttatcaaaggtatctttcgatgtttccaaattagtaaaaa

SEQ ID NO: 239468 - DNA, 1098 bp, Cannabis indica
gtaattttgtaattttttttgttgtttttgtgtatttgtgaaattatccctaaataaaaataatactcatgagatatcacactttgagtacacttacaataaaaaataaccaccaatattatgtcaccactcataaaaatcatattattttttacattcacacatttcactaaattttgtcctctattgcatacctaaactaaatcacttgaaagtttcacaaactacttccaacatatttagataacttatcaatttaaaattatattaataaaaaaatgtggaacacaaaatttcaaatatttccatacatatttttgtaaaactttacactttttattgttattgttttacacttatttgagtgagtaagataatttattctttatatttaatttatgattataacacaaatttcttaacggaactattttctctttcgatagacaaaaaggagaagataaaacacattactttattagaatgcaaataaaatcatataacagaaatagagtttgagcattgctattaacaccgtataaatgtgataatggttagcaattttttatattatttattaaataaaaaaatgtaaaacttaattttaaattgtatcaataaccatttgtcaactcttgtagtggctagcactttaaagttttcttaagatcattgaagcacaattattttttacaacattagttaattattaactataccttttcaaattatagttgaatgataacgaaatctatgtcattacaattagaaggatcatttcttgaaactaattacaaagagaacctaataagacaaattcacaaataaataaaagaataatacagaagaaaataaactcaaattaatctttctgattgaagttttgaatatatatatatataagtaggtataattgaagggaatctagaaattgctttctttccatcctccgtacctctctccattgtcatgttcttcctgcaaaattcataacaattaaaattacaaaacttgtacatcatttttgtgtaaacaaaatgtgaactcatatatatattatataatatatataacgtgccaagccacgtagtgttagtt

SEQ ID NO: 239469 - DNA, 1099 bp, Cannabis indica
ctcgggttccccaaaccacgagcattccaactcacgatttttatggttgctcgcgggactacagaacagtctccgctgcattgtcgtagtcaccaaccgaatccatgaaatcattggaaacaaagtggcaatcattttcttcaactgacaaggttgagttgtggtcattaggaatatttcctctgcatctcttaagagtttgcctcagtgaaaggccttcactctgccttttgaattgcacatttgggtttaaattttcctttccagtagtaacagtggctggtgcaataatagagttaaaatgattggtgccagggatagccaaagtttgattagaaagggaagtaatggctggaggtgggggagggtatgtggcataagtattggagaccaatggagaagaggaaatgggcatataaatggaggtgagatctgtgtagttggtaggagaatcgggaggaagtgaagcaacaggccctttcgatttggtatttcccacatgatgagaatgagacatagcagaagcattagtagcagaagattgaaaaataatcgatgatggctgggatatcaatgattgtgatattaaatgactaggcatagtgttatgtgaaacgttggttgaaggattttctatgtcattgatatgagaggattcaccagcaaataaccttcgaggctgtggtggaccacgcaaatgcaattgaggaattgctgaagatagacttttctttgcaagtcgagttaataatggccaaacgtcacccttggcaaaatcagttcgataccgatcgtaggaagaggtaggcaaggcagatcctttgatgaagggctggtattcaagggcaggctcttcaccattatcaagtttttcaagaaaaactgaacatttgttgtaaggatgtccaataatcccacattccatacaatattcaggcagcctctcatagcggaagtcgacccaaaacttgtccttaacatgacttaaagagatcattctccctctcttcagcgacttagagacatccatgagaacccggatacgcagaaaaggaccccagccttcgtttaaagaatcctcaaaaacatcttcatattg

SEQ ID NO: 239470 - DNA, 3886 bp, Cannabis indica
gcatacaacttgtgattcctaagtcattgtaatagcattcggagatgttgctcatgctcctcttctatttgagagtacacaaggatgtcatcgataaacactataacacaattatcgagaaaatccttgaacactctattcatgagatccataaaggtcgttggagcaattgttaatccgaatgacaacactaagaaattgtaatgaccatacctagtccgaattgcagtctttgaaataccttcctcccgaattcttaggtgatgataaccaaaatgcaagtaaatctttgggacaatcttcccctggagttgatcgaataaatcatcaatcatgggcaatggatacttattcttaattttcagcttgtttgattctcagtaatcaatgtatatttggagggatccatccttccttttcacgaataaaactagagctccccaaggcgatactctgggtcgggtaaaccctatgtccggcatcctctgaagttgtcattttagcttcttaagttctaccagagccatcatgtatggtgcattcgaaacaggtttttcccctagtgccaaatcaattacaaagtctatctcttgctgtgacagaattcccaataactcctcaagaaaaatatcaagaaattcttttacaactctgacatcctcaggcccaaatttttcaggtctgctggagtcaattacaattgctaaaaatcctacacacccactgtgtaattagtctttagcctttgaaactaaaataatcaggatttgacatccctgaacaaatccaacataaacaaatggatcttcgtcctccggctgaaaagttaccattttctacttgcagccaatacttagacaaaaaatccattccaagtataatatcaaactctgctacttccaactctactagttcaacactcaattccctattttcaaccctaaccggcatagacctaatccaccttttagagataaccaattctctgctaggcagtagggttccaaaccgtcttacaatgaaatcataaggcctacccaattgattaattattattgatgccacatataaatatatagctccaaagtcaaacaatattgtaaaataggagttgttgacaagaagttgacctgtcaccacagaaggactagtcgcaacatcagcttgagtgatagcaaacactcgagcaggtatgggttttgcctcttgcttttattcttctttctttgtatgagggaagtctttcttaaaattcccaaccatgccacactggaaacatgttttccaattgcactctccgagatggtgtttcttacaacgtgggcactcagggtaagaataaccctggcatccacctttgtctgggttccctcgaaaccttttgtcctatcccaaaccactagatgttaggaaagtctttctcttttgatcagaaatggattcaccaccatccctaccatatcaagaagtaggaagagtggtggtcccactaacacttggactctctcggggctcctaaagaaattttactgctctgttagctcgaagagccttttaaaccatctcagcataagttgttgtgtcacttgtagtaattaccagatcatgtatagtattggcattttaacccgccatatacttttctttcttactaaagtccgtgggtactatacccgaagccaacttggctagacagtcaaacttcattgtatattctgttaccgacatgccttctccctgaactagatcagtaaattctttccgctttgtaatgcggactccttcattataatacttggcataaaataattcatgaaaatcttcccagatcatggtggtgacgtctcgggtgagggacactaactcccacctcaaaaatacgtcttcctggaactggaaagtagcgcaagtcactcggtcattcctgacaactcccttaaaattcaagattctctcaatgatagtgagccactactcggccttcataacatccggacctcccaaaaaaactataagcgcctggttacaaaacatctcatacagtgatttcattcggttgctagcagtaggttggtctgttggcactactggaaccataatggctgacacttactggggtggcagtgcaggaagaccctactgcctcagccttttaatttctttgttttgttgaagaatttaggcttacatctctacaaacccttgctcccaattcaaaggagcttggggtgcattcttatgcctaccacccagaaaccttccacgacctatgccgcgtcaacagggattcaagggattttgacctccccgatcgcctctggtctcaaccatgtcaccctaactcctcatattttgttgggcgtccatttaataggacttaacctgtgaacccataagtcaagtaggtcagacagcgatcacataaactctatataccacactttatggattttaaggcaatgtatttaaataaataattataaactattatgctcccaaacatacttttccaatcacataaattactatacatgtaagggcttactgaaccgtgacttcagcttttctcttacggtgattgtacatgtctcaacgatcttaggtagataaacttggaggctctaataccaaaattataacgccctaatacttaggcgcgctacaatgatttttaattattgtgccacctttgctaatcaaacagttttccttaaaaatcgtgccaaaataaatttttgatttaaactattaaattttataaacatatatatatttacataaaccgagatcccgtgtttaaacttttacaatcataatcaaaataagttttacagacatatcgcacagtgactacaaaacacagcccaagtcgtcctgagactgaacactccaggttgtgccgtctcgacatgtacaatcatcccctgagctcagaactcactccagttcagcttttgtctttccattacctacacacggaatataatatctgtgagtcaacaaactctgtaaagcatataacatatgatattttaccgacttgtatctaggctaccaaacacctatccacaaggcttattagataagtaagaacgttctttactaaggtacgaccactgtaccacatgaactacgtaccgctattgtacgagtcttggtagggtttgcaccgtacctcgagtaccattaagtgttgtaccaccgtactcaaccatactagtattggtaatactgtattgtactcattgaaaatcatacactatatcaatacactcaatacctctaccatactaatgttggtagtatacgaatcacaagcaatatgcatatattacacatacacatattcttatataaatacgttctacgctattcttacctcgtttctgaattcaagtgtactagcttacttgaatgaaaaatcatgcgctggatggatgccttatgtcacatttacgcaaatgggtaaataacacgctaaaacccaaattgggaacctaaactcacaactacaagttttgctatcgataatgaacatgacaatattctaattatcaaggaaacaacaaactaaggctctgaaaataacacgaatcaacaaaatggattttttggggatcctgcctgtgatccggttaacaaatttacaccaaaaaaccctaaaaatcccaaaacttgcacaatgcgtacccaaacttaaccaaaccttccagatcacggatgataacatcaaagagtaaatttcaacctgttagatattaggtgtatattagctgtaagagagttagatatttagtagatatttagtagatatttagtctcctaactctgtatataaatatgtattattctatgaaatcaacacacaattcgaatcactattttc

SEQ ID NO: 239471 - DNA, 804 bp, Cannabis indica
tttttttatttttttttggcaactctattatacttacttttattgagttaattatggcataaccttcaaaaaatttattttgcttacatttttgttagcattttgttaaaatttagatctcaccatgcgacaacctctctctatcgtttcttacgctgacaaccactctctctctcttgtctcttctcacgccagcaccattctttctctctctctctctctcttctctctctctctctctctctctctatctatctatctctcgtatttttctcatgtcaaactcagatgacacctccaccctcgcgagccctatctaacacgagctgccaaggaggagattgacaaagtccaaaaacttttaatcaattatcgggcgtgattttgacactgtttcatacagggagcagtatgatggaccttggaagctctaagagaacagaacccttcaaaagtttgggcgttaagatcgtcataattcatggagtttcgagatattcgactcaaatctagtcgcttctgaacctcgtgtcgaaaaataggctccagatccatgttctccttggaatgggcttctcgatcccacatttcactgccccttttatcactgtcaaacctgggcagcaccacccatgttttccgacgatgacactagtgctgagtaagctctctttgtctcaccttcgagattttctctctttatctttaaatcttaaatttttttgttgtagatttaatttgggtttgtttgtttttgtgtaatcggaatttgaattttggcaggtgtttaggtttctttgatgt

SEQ ID NO: 239472 - DNA, 1666 bp, Cannabis indica
tccactgtgctgacgacacaataaacaagaatataaatgtgaaatgggttttgatgaatttataaatcaaataaatatttaaatgataacatgaaccaaatgacacacaaataagtgatgaaaaaaatacttatgtttctttattgatatttaaaggataaagattatattgaaatagagttttatttaggacataaaacccaacatcaagtactaataattgttggaggttcaaactaactcccaatctccaatatatcaagcctttgagccttttggtttggccattgagaagtgtccagctttgctagaagagctggtcaatattaacacgaaagaggtggagaaagaaatcgagagggatagtgccaaggaagaagtggctcgcaagtgcagggaggccagagccagatctgttgaattggaaaaaatgctcgaggacaaacacacaaatgttgagactcctagagcaagtattttggggcaaggtaaatcaccctcactcctaatctatgctcctcatgttgaggatttttctagtattaggtaggacgagtttgacttgtatttcttgcaagtcaatcctacctggtatcttgattggaaacacatgacctaggttgacgagatcgtgtggagttccaaaaaacatagtatgtggaatccttttccttgtcccattcctcttgaccctctagtgtaatgtacatgttcaggttcttacaatatgaatgttagggtttatactttgaaaagatgttatagacatttagattataaatataagtgaaacaattttatatatatatatttgaatgttgaataatttgtttataaatatcagaaaattcctattttatatatgaggctatgattttgtatagtacaaagaattaaggtcatgagctatgaataaaatagtcagcaacatattgaagtttggaatttttaatcaacggttgctagtatggttcattaatgcccattactctgtgcattcaattttgattcagatttctaatatagatggacatctcgataatggtgttgtatataattgttgacctaaaaatctagacaaagattcctaagccatacctgctcgctagattgacgagaataaaatatttgttaagtataaataacgagagacacaacaatttatagtagttcactccatgtatcgcgacagcaatggctacgtctacttcgaggtattatttctcacgagatggtattacagaaaaatagctaagtgttttagctctaatttttagagagagaaactagagagagatgctctaaccttgtgggtagttttttgaatatgaaaaatgagttagaggagctcttcttttattggtgaaggaggtccttgaaaataagaaaaaataattctaaatattaaaaaaatataaattggttaattttgactgtaaatgatgatctaatgatcaaaattaacttttgaggttgatagtcaattttttgagcttgggccgcggcgacgagacccactccaagtaagccggagcttatttttgtaactcccttggggtaaaaattgagatcgataacttcacatttgatgtaatacccgagattaagaaaaggattagcaaaatcgtaattagataattatgagttaattgaggaattatattat

SEQ ID NO: 239473 - DNA, 952 bp, Cannabis indica
tctctttctttagaaaaagaccattaagtaattaagtagtaccctattgttaacgtacatgaccagtaagtaatccaatcaatggaataaaattcataactagtactactgcatgcatggacttaaagacttaattaaaagccctttgaaaattgctccaatgtgatctttggttgagagtactaaattcacttataaacgccaacagatcaacatcttgtttcactagaagaagatactcattcagtctaaggctgcctttcttgagatttttatgctttgtatgaaattctggaagttttggtaaggcttggagtgggaagtacttctcaagagtcttccatatatctaatgatctgtgttgtttactacaataaatttaataatttttatttttatattatcaattattttagtataagtcgattccacaaggactattatcaatttattattcaaaaattagtaacaagaattaaaaaatgaaggtttaattataaagatttaacaataaactagaaagtaaataaaaatagatattacgctattaagatatagtcaatacaaaaaaattagaacttttagtgataattttttagtcacaacataaattttttgtgactaaatgtgacttttagtcacaacaaaaatttacttgtgactaaaacatagtatttagttacaagttgtcactaatttaattttaattacaacaaatattgtgactaaaaacacatttagtcacaacaaattatatggagataagttaatctaggtaacaaatcaattaagcacagggccggccctgaaacaaagtgggccataggggaaaaaatttttttggcccttatgttagaaaaaatgtagtattttttaaaattggtaaaaaaaatgtataattttaaaagaggaaaaaaaaatttgggcccctgggctgggtgggccctaggca

SEQ ID NO: 239474 - DNA, 1830 bp, Cannabis indica
acagtcttggttgaaacattgtatcagcttctagcacttttttggttgcctctggttgttccaatgcttctagtatcgcccgggaactttaagcataagtggcagatggatgtcactgctccaaaatcaaccagaaatggtcttcccagaataacgtgataagatattaggcagtcaaatattacaaaagtgctatacttgaaagagaaatgcattgcttctggagacttccctatttattgtcattggaagttgaatttttcccattgggattagcgtgcctccattaaagccttgcagttgaattggacaaggtaacaagttggttttcataagactgatggctttgaaggcatctttgaaaataatattgacagagcttccattatctacaagaattctagaaactcttttattcagaatctgagcttctatcaccaaagggtggttgtggtgaaaatgcacatgcttggcgtcatcttttgtgaaagtcattggcaaattcatcatctgaggacactgagtagataattgtactaaattgcaagttttgtcttgatccaactcattcaagtacctttttttgtggttgctacatgatcatcaagcgcaggctgggatgctctaggaggatatggatttctaggatcgggagctacaacaggccttgctgttggagcattttgtacccctaaaggacttgtgcgttgggagcttgaattctaggagtttgtggatgtccaactccctaaggagaggattaatggctccatgttgtctaggaataaaaagctccatgtgcaaccccctatccaggataaatgattggtacccaattggacagatgtctgtttcaaaccaatcctttaatttcatcccttagatagtcacactcattagtggtgtgctctatatcactgtggtattcacacctcttattcaaataatttttttttgtcttcttcccttgtacatcggtgaaggcttcttgtaatggaccatattccaagttgccttatatacattctctcgagtatccacaagtcttgtgtacttagaatatcatgactcttgggtctttcttttcttcgtagaatcattttggcttgggccttttgaactcatctttctccgtgattagcttacattggactctggagcttctgctttttggtttatttttttaggagcggcactgaatctagttcgtaccactctgaatcttaaaaaactagcctatgcagctggctgcggggatgcacttgcttcgtaaacggtaagagttgaaaggcagttgtcggagggaaaattgatggagtagtcatttgggaagcttgggttactgctatgtttgtggaaggtactgaaagtactctataagcatgagcataagcttcttctaagtttatgaatccttgagctcttgtcaagaaatcggtcaaagtatctactcttttgcattaaagatccccccatagtaaggatcctatggttaatcctaatgtcaaagccaccatcttcatatcatcagtaacctttgttttagcagcaacatccaacatacattggatgtatttctttaggctttctcctagttgttgcttgatactagttagggaattagcttccaggtcaaatgccttcactgctacaaattgcttttaagacattacttgtaggtccctccaattgtggattgatcctggagatatcctcttccaccagttttttgcagacttgctcaaagtcaataaaaaagcaagaacattttacatcatcactggccttagtgacttgcatcatgcgattgtacttggacaagtggtcctt

SEQ ID NO: 239475 - DNA, 1962 bp, Cannabis indica
tttttatatggttattattgtcattatttctttttgatgggtgctttggaaagtggaaagacatatatgctcttcaagccgcttctcgcaattcaggtgcacgtatttgcttgacacatgttatgattttaatgccaaagtggcttttcgtttcagttttcgtggctccttatcaactgcatgcaagcttctgtatataaataagtctatagtttagccattttcttctaagaatcctttcgacatttttctgagtaagcatttccttcttgttcatcccttttgcattatggcttcctcactaaaagaccaaattcctcactcgagagatccttctttttctaacattttttcaggcttacagcctctggaccatgctttcctttccatggatcctttttcaagttttcgcgactttgaacccattacgtttcccccactacacttctcggaggtctgcagctgtccatgctttgagcaggctgcattaggcttggggactcacgccagttctcgagttgaggctgcgccacctttggcaatgtgtcccttcgctatttttcctcctgtattggcacctgtcgaggcggttaaggagaagcctgaggtgtcagaggggagctcaactcaaacgacgacagcttattatcccgagtttgaggctactgctcagtctgagaattttgaagaggtccctatttttgccgatgcttcatcgtcggttttttctatatctgcttcttcctttcctcaagaattacctcgggtagtttcccagaatatatgccctccttcttcctccaaccgtcgagggtggcttgcaatgcggaggacatttcagcagagggaaagtttttctgtataggggcctatttgttttacatttatatatatttttagcaatttgtaagttcgcgtgggtcctttggtatgggtatttttgcaggccactactcccccagttttttgaaatagagtgaacactcttttcataaaacttttaatttttgtaaggaggcaatggtcctctgtttgtgtagctcaactccttttattaatgtccattttacttattttcatggctttttggcgagtactgttatttatggactcaaactttatacagatttttacttttagcatcgtgtgttttgtacgctttattttctgcttgtcgccttatgctttttgtggttcgtgtattctcatattgatttcctttcgtaaaaggtcttagttatgtatgcctttcgtgaaaggtcttaagtatcacagactttgcctttcgtaaaaggtcttaaaacaattatggttttgcttttcgtgaaaggtcttttagaacatctgctcttgccttctgtggaaggtctttgatcgtttatagttttgcctttcatgaaaggtcttagaaaaattatggttttgcctttcgtaaaaggtctttagaacttctgctcttgccttccgtggaaggtctttgaacgattatagtttttcccttagtgaaaggtcttagtgttgcctttcgtaaaaggtcataattccatttgttcgcgacttaagtttttttcattctgctttttataacccatccttctttcattatttaaaggagaaaatacggctacaactacagtgaagtttggagtttctagctcataattatcatacgttgaattttttgaggtaccttgcattctagcttcttgtcatctcagctccatccatggaagccagtttgtacgctcctttccccgtcgagcctaccacacggtacagaccttcccaattggtggatagcttccctcctcgggcctcttcggtattctggaaaaattttcttagaactagttcccccgagaggaagttcctgggtttaacgcttttattgtattgcctcgccaccgcggaacagtagttctgcatcagggataaagcgcattctcttctctcttctacatc

SEQ ID NO: 239476 - DNA, 1334 bp, Cannabis indica
ggaggggctgacttggattgaggtcggccatgatggtggcaaagccctgagaaaccggaatagtatgcccagtgacttcagacgtcactgttgttgccactataggagtggctgaaatagtagcaggggatactccttgttcaggggcagaaacagcttggtgtagagggccagtagatcccatagtatttaacaaggatgtatgagttgttgaccgaaccggaggactatccaaatccacaatttgctcattggtaggccatgccgagaaggtcaaatgagaattagccatactatgggtgcggttaacagggctattttggggtgtttgtgtcatatagcacccaaccggggtagtgcgcggttggtggagatgttggatcccgtaatcagaggtttgttcattgaaggggctttcggtaatgataaaggattgatgagcatgaggattgtaggggcagccaaggaaacgggattggtgatatggggccgtagacgggtgcaggtgctagcaatgtagaaggggttagatgttatgcgaaccttagcacctaaggtatgatcatagcgaaggaggggtggggctgatgaagaatcacacttagctaagaactcaggacagtgattcacaatatggctaaggcaaccacaaaagtgacagaaatcagggaggttttcaaacctaaactcaagccaaacaggggctgccataccttgaaagtggaagccagttccacggggaagaggttgtgtgacatcgatctcaatacgaacccgaagatatggtccccatgtttctttcagagaggttgtgtcaacctcaataaaacgtcctaaaacctccccaagtttcctagcaagggctcaagaccgcttaagaaaagggatgcccgaaacttggatccaaaaaggagtagaagtgagcatatcggcagtggtgaccgagccagcctcaaggggagacatgacaatgagtttgtaatcaaagtgccatggttagccaatgaggactcgcctacgatcaccaaagcacccaaattccacagtgaaaaagttgggttctttttccataatattgatggaaaaccgctctggccacatttctcggaggtgttttttgaaggcttcaggattgaaatgccttgttgtcaaaagtttgacagcaaggaaagcagagggttcatccctattttcatcttcaggcagttcagagggttcagaaaaaggaatgaatttttgtttcaacttcagtaaggtgtagattggcagatagggtatttgtaaggtcgtccatagtgcagagcaaaagtggtgagaaaaaagcaaaagtggga

SEQ ID NO: 239477 - DNA, 1423 bp, Cannabis indica
attcaccacataacacatcaaaatcaacattaagaactcaattttaacttaaaatgaacttagaaactgaaccacaaaccattctaaccctaacaaccatgcactaaatctcaaaattgcataatcaaaccaaaaattaaagcttgaactacacaaagactagagctttagggttaccttagacttgagctagttgaaatccagctgaaaccttgctgaatttccaaagaagtagtggttagaagctgggttgcttttggttgtgtgggagtcgagcaagagaaaaagaaaaaatagattggatttttcttgtgtttttcttaattaattgattttcttcttaattgattaaatccattaatcaatctttggatgagtaaataaagtggccagctgccacctccaaggaatgccacctaatccttttaagtaaaattcccaaaatacccttgacttgtaaattaagcaacctataggcttaggggtaaaattgtccaaaactataacctcgcctaaatccggcattctaaatatctcttatgtttatgccgctaagaaaaaggttctaaacatacccatgtgactctaacgaccatccagtgtatttttctgtcgtcgctgaataaaaatcgtaaaaattgcgtaattcctatttaacataaataatactcctagagtttaataaaatttcaaaaattgagaaattataactctagttctatttctaaaaatagaacccataacaatataaaatcatatatactcattgaaatatcagtaattaatgttagttgcctttactaatccatattctaacatgcagtcattacagttattatccaaatagtcaaagatcctatatagatgatctatattgaatatggataaatttaccgttctacccttcaatgaattttatccttaaaatacttagctacctataaatgatatttcataaactaatataattactaaaatgaggtctcaatcatttatctctattaagccaggctcaaggaaaatcattaattcgcttctaaatacttataaaagttataaattccatatccatgatcaacgcccctactcaattgaactatcatgttcccaagatgtatgtgtttagtcgtacgagctttaacaaacaattctaaaaacataaataatacaattaagatcaaacctatccatctcagtgatattgacttagaaagatataacagtaagtttgtgatatctgttccaagttcaatatcggtccaattcgatgtatactccatacatctgatattggcatactttgtcaatgcctggaaaggacataagtataccttatcgccgataatcatgtcagtctaaatctagtatactgacaaatcatgggacttaaagttttaaacatataagggtaaatagtgacata

SEQ ID NO: 239478 - DNA, 2395 bp, Cannabis indica
aaaaaaaaagggagaagagagaatcagggtcgggtcgggtcgttgtccgggtccctaaatcaacgattcaaatatcgacttctgagttctctcttccctcagtgtgagtcgacgcagctccacgcctccactctgccacttctctcaactagtgagtctctctttctcacatcagttctgggttttctgcacataacaaaaactgttcgtcaattactaaatgaatgaacgcatttcatttctgggttttctttaaaaattatggctttataaatgtttgtattttttggaatttaatggagataaaagacagagaaatggatagttataagattaaagctacctttgtttcattttatatgttattgatgtgctctccttttaaatggaatttgttattgaatattatgattttctatttgttttcgttcaaaagttttggctttttttattttatgagaaatctttaatggactggtggaagaaatttaaacagtaacctatttttgtaagatcaatgttgtctgttttgcatgatatacaagaataaaaatctaaattaagcagcaaaactacatgtaaataatgttatatatatttataacaaagatctgagatatataacaaggatctatccttcactcatcatatcgaaggttgtgtttctcgatatgtagctttccctttgcttttcaatcctagtttttttatgattcttgtttcttgaaattaattttgttcctctcatgtttatggctaatctactctatgtgtttgtagaaatgcccaactgagttctaaaataaagagattttgaatcgaactaaagttatgctccaccagttgcctttcttccattgttattatgattaatactggggagggatttaaaagtggatttaacaaagttcaaggtactactttatacatgtaattctatcagctttaaatcattgtctttaccctgtctctaaatttgtcatcgtaaaagatgggtctatatgccactatttcactgggcagtgtggtgtggatcttgtaagttgttaatcatacacttcaaatgtagaatgttaagtttagagttttatcttaatttgtttctaacgtatatgttctctataaactgttgattgaagtcttgttctatttttcaggtctatgtaggtagatatctccaatcattgttcagttgagccagcagtatcctcatgtaatagcatataagattgacattgatgaggtatgaactatgaaggttctgtggttttatagtatgcttgtctgttagcaatcactagattttaggataagtgtttttcattatgtgatgttgtttgtacataggttaaatcatctcacttactgctttccttccttaaattgctatctgatcactctatgtgatgattctttcattctttgagaaatttaaacttgttttaaagaagcattcaagcataattggacaatgagctttcttattggtacaagaaatttgtcattatttgtagcagctctacccttgttttaagacaccaatttttgtttgttcattctttcgggatttaaaccaactgttcattttcatgtcatggctgtacatgattttattttagttcttagaaggaatttttgaacactctagaattgaggcaattaacatatatctgcattgagaatggttaatcagctagattgaagtcttatatttgtggtattaaaatttgcttaaattattgcttgtgtatcgccttgcacaatttttctttttacaaattcatgctgaactaaattgccaatttttgtttgttccattttttatttatggaaggcaagccataatcttagttagtatctaatatttatttgctctttctggagaaggcaagccacaattacttgcttgttgattttatttacatgcttacttgacaaatttttttgttgaatgatgcattaaaacatgtacaattctaagaaaatatgagatattttgtatgttttcttttagagagaaagagagagggagaaacttccagagctcttatgatttaggtatcgagaagagtatcaagattatcttttagctgggatttagagtaacaaaatgataatttctattttagagagagaaaagaaaaactcacaaagtaggtattggagtttataagagaagaaactagctgaagacagtggagccattcattaatttatccattttataaaatatagtgaaatgcttttaagtctttctcataaaactgtgctttaatttacttatcacttttgcttttagatattttcttttaaaatgaaacaataaaacataaaaccttttccaaaattaaaaatatacaaaattattaataattttaatgagttttgaatcttt

SEQ ID NO: 239479 - DNA, 866 bp, Cannabis indica
caggaaatgaactatgctatctcagaagatttttaaattattatcctttaatcaaataatacactgtacacatacatacgaaagggggggagtcttacatataatatagctgacatactcatagtccaactccctccctactgaatatacaaaatacagtaattcattcactcaatcatagatctacatgtttaaacaacgactaaccattgcttcatttcctaaagtcagttgctgcgaaggtttattttcagttgaagttgcatttggccatgaactggactcaacttcatggttacaaatccaatcaatttagatatgtggaaattgagccaaactgaattaacttatgttgagtgtcattaccatatggatatctcaattttatataatatatatgtatatataatgaatcaatacttaatagttacatcaatatttatccataaatgcttagatatgttttagccattaaattttattcattaaatgttattaatataagtttgaaatatcttctatattaggccactaaaaacatcaacttagcatctgaaattaatggttgatgtaatttttttccattttgcaactgcaactactatagagatatagggattgaaaactcttctataaatgtaaaattatggtgcaatctgatgttgctaacaaagcaaattgatttctgcaaatatcacaagcataagcatgatattgtgtcactcttgtttacaactaaatataattcaacttccatgaatggacattgtttgactttaaacaattatcataggatatcaaatatatatggggaccataagcaagattacctagtgaagctaaaagtccattaacaggaatgaaaa

SEQ ID NO: 239480 - DNA, 2745 bp, Cannabis indica
tattttgggtatttataaatagcgaaataaagtcttaattattcatgatttttaataaactcattgattagcaatgagctgcacaattaagttaaaaagtatgttaacaatcctaaactagtagggtgttacaatatggtattagagctgccaggttgtctttcaaagatcatcatgacatgtacaatcatcattagctatcagctcgactcattgttcagtaagcctttattgctttagtagtttatttgattagtatgttataagaaaagcttgatatgaagcatgttagtagcctgatagttgaataggtgtatgtttaaatttcctaaataagcgataattagtaaattattcttgaccgatatctgaccaggctagtcgtggtattttgggctgttctattagaatgaacgccaggcgaaatgcgagaagccaaaaggaatgttcggattcagtggcggtaagggatttcagatttccctgaatgtacgtggccaaggcagggcacgcggttggggagatgttaagctgccacaggctgcccaggaatgggaaaatagggttgtagcaatgcaagccgaaatcaacgaacaagacgaggaaatcatatgcttgaggaagcagggtgcttctgcaatgcctgctccagacatgcaggtggctctttcccctgctgtgtaggcaggggcagattgctacagtgaaccggatggaaccattgtatgaaaggttccgcaagcaggcacctccagtatttctgggaggtcccgatgtgatgaaagctgaacggtggctgacggttattacaagaattttgaatttcaggggcgtcaccggtaatgacagagtggcctatgccacatttcagttccaggaggatactctggtttggtgggacatggtgtccctgactcgagatgttactactattatctgggaagagttccaggagttgttcaatgcaaagtactacaacaaggcggtcagaagtgcaaaaagaaaggaatttactcagcagactccgaaggagaatacgagtgttactgaatacacaactcagttcgatcgattggctaggttggcctcaggaattgtgccaaccgatttcagcaagagagaaaagtacctggatggattaaacttgaaaataaaacatgatcttatgattactactaacgacaacaccacctatcctgacatggtgggaaaggcactacgagctgagggcgcagttgagtgcatccaggagtctcgagggactcaggttgttggtggaacccctactccttctattgctggttatggtaggggtggtagtggcttgacaacgatcggaaacataaggcaccatttgcacgcggtggctcaggtcagaataagaggttccgagggaaccaggattgaggtaaccgtcagggtggttttgaaacccgatatacttactcggaatatcccagttgtaagaagcatcatctgagtgagtgtaaagggcgaggatgtttccaatgttggttgccaggacatataaaagagattgcccgtaacttaagaaagaggagcagaagtcaactgcaaaacccgctctagcaagggtgtttgctttaactcaggctgatgtagaagctagcccctcagttgttataggtcagctctcagtcaacaactcttacttctatgtattgtttgaccctggggccactcaatcttatgtggtagccataatttttgataaattggatagaccgcatgatagttatgataaatggtcaaaaccctactgcatggcagagaattagttatctccaaaaggtggattaggtctatgccgatcagaattaaggatagggagtcgagtgctgacttgataggattggggtttagcggatttcgatgttatacttgggatggatttcttatccaagtactcagctagtattgattgtaaacgcaagatggtgatcttccaacctgagggtgagaaaccgtttgtatttgtgggatcagttcagggatcccggattccagtaatttcagtattaatagtaagagatttattagaagaaggatgtataggatttatggcagtggtattagataccacacgacctgagatagttcggtcagagaatatcaaggtggttcaagaatttttagatgtttttcctgatgaacttccaggtttaccaccgcagagagaaatagatttcgttattgatttggcaccaggagcagaaccagtttctaaggcatcttacagaatggcttcgacagaacttaaataaagaatttaagattcaacttcaggggatgcttgacctagggttttcctgagctagtgtgtcaccctggggagctcccatattgtttgttaagaagaaagacggatccctacgtatgtgtattgactaccgggaactaaataaactaactattaagaacaaatatcctttacctaggatctatgatcttttcaatcagcttcaaggaaagacggtcttctcaaagattgatctcttatcgggctatcatcagtgtgagaattcgagaggaggacattccaaaaactgctatccgcactaggtatgggcactatgtattctcggttatgtcctttggactaaccaatgctctcatagcttttatggatctaatgaatagggtattcaaggattatctcgatatctgtgttattgtatttatcgatgacatccttgtgtactctcaatcagaagaggagcatga

SEQ ID NO: 239481 - DNA, 919 bp, Cannabis indica
aattatgattgccacgtcatcttttttctacattaatttcaacattcagtccctcctacttttgcagtaaaatccctacaaaacttcagcaaaacttgtattttctctattaggccattttcttcaccaaaacccgaataaaactcaataaactccactaacaactccaaattaccaagtggacacacaaacacatattatcacaagatgaaaggaaaagaactatatataagtaaaatacacacatagattaagctaaaaaccatgacaaataactctttattcaagtgttatcaatgagaaatcccaactctttggttgggaaggtgttaaggaatactaactctaccatcatggaaagccaaaaaaggttcttctttgcaatctatctggagggggcaaggagacagtggtattaggttctcggtggagggtgggttcaggtgagaacatcaatgtgatgaaggaccgttggctacctagaccgttgagttttaagcctttcataaaacttgagatttcgattgatattaaagtggtttattttatattaacaaatggagattgggatgttggttttttaagggtagtctttgatgaggatgatgatgagctcatcttggggatcctgagtggctctcttgacatgaaagataaactaatttggcactattctaatgatggtgaatatagggtgcgtagtggatatactactgctcttaataagaaagtctacgatgagagttctaacatgaaaaacactgagaatggtggaatgatttgtggaacaagtggaacaagagaatacccccaaaagttaaataatttttatggaaattgagctatttgtggctcccaactaatagttttcttttttacaagagaatgaatgtcaataagaaactgttggagatgcaag

SEQ ID NO: 239482 - DNA, 3250 bp, Cannabis indica
gtcagctcgggtaagtttcttaggtttaatatcaatgctcggggaatgaaagctaacctagagaaaatacaagccctcctagatatgaaatcattaacaaaaataaaggaagtctagaggtgaactggttagatagccgcactcaacagatttatttcaaaatccatggacaagtgtgttcctttcttcaacatcctccgaggtaataaaaagttcgaatggatagaggaatgtgagaacgccttccaagaattaaaaaggcaactcacaaaacctctagtactcttaaaatccctggacagagaagaattgggactatacttggccatcaacgaatacgttgtaagtgtcgtggtgataagggaagaaaacaacatccaacatccagtctactatattagcaaatgactcgttgaagttgaaggacgatatcctttgatagagaaactcacctactaccttatctcaaccgaaaggaagttaaggcctgatttccaagctcatcttgtttgggtatacgccgaccaacctttgtgccaagtattgcaaaagccaaatgcctctggacgattactcaagtgggcgatagagttgggacagtatgagataattttccaacctcatacagcggttaaagggcaggctttggcagactttgtagttgagtgtccaggcaaagaaaaaaataacataagcgatgatttggagccatatacaagaatccctacctgaaaaaagaatgaagatagacctacctagaaattacatgtggacggatcagttacagacaagctttttggtgcagaaattgccctcatcacacttaggggcaacacctacaacgagtaatcaaatttgggttcaaatcctccaataatgaaatagaataggatgcactcatagctaggctaaaattggctcgcgaggtacgcgcaaaatacgttgaggtctctagtgattcccaattggtagtaaatcatgttttaggggaatatgtggcccgtggagaaaaaatgatggcctatctaagtaagatataagacctgcttgcacaatttaagggttacaccctcaaacagattccaagagaagacaatacaactactgacgccctggcacgactcgtgagtagcatagtaacagataaggccaacttagtaccaatccaattcttagaagagcccagcataaattgtgtggaagaaattgacactcataacaacttgtctcaacattggagaactttcaaatgacatgaacgaagcttagaaaatgatgagaaaagctacacggtatatcatacttgaaggtgtgatgtatagaagaggtttctccatgccattacttagatgtgtaacaaaagaagaggctacatggctcctgtcagaggttcatgattgattatgtggccattatgcagcgggacagagtctatcacagaaaatactaaggtaaggatatttttgggcaaccatgatggaagattcaaaggcctatgtaaagaaatgtgataaatgccagagattttcaaaaatcccccgtgcaccacccaatgagctaatacaaatgcaaattcctttgccttttgctatatggggaatagtcctgatcggaaagttgcccaaaggtaaaggcagggtacaatatgcagttgtcacaatagattatttcacaaagtggacagaggccgaacccttagcaacgatcacatctaaattttttttagactttgtggtgaaaaacatcatatgtcggttccaacttccccacgagattgtttcggacaatggcaaacagtttgatagctagatgtttactgatttttgtgcgacacatagaatcataaaaagtttctccgcaatggcacaccctcaaacaaatggtcaggtcgaggtaatcaataagacactcaaagacaccatgaaaagtggctcaaagaagccaaagggaattggctggaggaactacgtaaagtattgtggtcgtaccgaacaacaaagcaaataccaaccaggcagacaccattcgctatggcttatggttatgaagcaatgttgcccatagagttagaacctccgtgccactggagactaccctacaaccaagaagctaatcatgccctcctggcagaatcacttgacaaaattgaagtaaaacgaacctcagcaaacctagagctagtagctcatcaataaaaggtggctcagtatttgatcaagtaagtgaaggtaagaaaattctttgtaggagatatggtccttagaagagtgcttttaaacttgaaagatagcacgattggcgtctcgacctaactgggaaggaccgtatcaagtagtggaagtcacagactttggaacatacaagttgggacaacatgacgagaatatggagcttgttctggtaccaaggtattggaatggggaacatttgagaaaaaaactaccagtaagtgcataaggtctgatgaccccctccaagtgcatgatgctcgaacatctactcttaagtacgtggccttctaagcggacctcgcttaaaggtttagataaaatgactggcactcaggtcggatgaccatttctaaaagaacagtctaaaaaatacaatttttttatgttttaattagctaaagaagatcagttagatcatgtaatagctttcgtaatttgataaatgtaagttactacggtaataaaattattcagaccaataaatgaataaagatatttatcatcattctaattgtgtcaattacttttctttatcggaagttatggatttaatattaaaatgtgtacaaagggtctacttgaactcaaaaagctgaacagataaaaaataaccttgtgcaatacaagtgaccagagtcataagtctgctcggtcacttggggggcaactattcttgtacgaaacaaaggtaaataacaagctcgaagaatagcagtttgcatgtgaaattactaaaacaagggaaaatattcatttcaataaaaagataacaaagcataataagttcgggattaaaggctacccgaccagctagttatcttaaaacaaaatgaaaaataaccaagtttaaaggccgcttggtcagccatattgtactgaacaaaggaccatgggccgaactaaaaaaaatggtcttatacagctggagtccctggttatttgtacggattaggctgattgtcaatggccaaagcataaagattctgttcggtcggagctttgttggaaatattttacca

SEQ ID NO: 239483 - DNA, 2425 bp, Cannabis indica
tgtttacctatatatttataatatttgtaattaatattattttattttatagaaatattttgacatcaacttgagtgatgagactacaaaaaaatgtattgatgatcaaatgagaaaagcttggaagggtcacaagtacaagctacacttatacttcaaaagaattggaggagaaaatgatgttgagatggccaagagcaaacgacatcctgacttaaaggaggatcaacaagaagattggaatattttgtgtgatcgttggtgttctcttgaatttaaggtaatttttattataatattatatatatgtatataacttcactaaaatattttgtttggttttatttcatcaggaaagggcaataaagaatactactaatagatctaagaggaaatgggtgtcaaaaaatggttcagtttctacagcgcgacatcacattcgacgtggaatggtgttaaattcttctaccggtcaaattgagacatggcgtctaaagcattatgatacagaaaagggatggactggaccagatctcgagctactatatgtaagtaatttaattttttatgtcaaaaacttttatggttattataaatttttgcttatagttaattaaatatattattagaatgaaatgatggagttaagggctcaacaccttccggaagacatgtctgataaaaagattatggagcgtgtacttggacgtcattcagtttacttgcgaggatggggacgatcttctactgttacaacttgtacttcagatcatgaaaatattgtgagtaatcaagtgaccaatgaagaattacttgaacgacttaatgatacaacttctcgtcttaatgatgcaaatagccgtcttgattctactaccaaacaacttaatgtggttttggacatactccgtcattacaatctagtgccaccacctccaacagatgaagatgaagattcagattcagatgcaaattgttagtttatatatattaggtttttttttttgaaactatatgtgttagcttattaagtaatgatctttatgaaatattttaatactgatgaagtgttttagcgttgaacattttattatcctatgttcttttttttaccttgtcttacctattataaaagagtctaaaaaaattataagtcaatttgttaattaagttttggtttgttagtgttcgagagacaggtggcagccagcagtcttttttttttttttggtaaataagtcagtagaatttcatttcaaaatgagaattacaccctcaacaaattaaatctctccctttctcttactaaacttttcccaccaatcttacctatgtttttcaatgatgtaaagactacttacaatttacttgctttgtacagtgaatagcattttgaatggttttgaccttttggaactacaaggccccaatttctttccaatcaaataaaaccaacatgaaaacttcttttcctctaggagctgcacctgcacttcttttaatatggttcgagattgacataaaatccatctgaacgatgttcaaaccagcccactgaagcatctctttagtgaatttcctgctgaacttgcaaaggaaaaaagatgagtgggacggttattccacgagaaatttgtctcggttctaagttatttggacttaaacttaaataattttttttatacaaatattaatatggtctaatattattaaattgtgtcgtttggtgtattggtaaatttacgtttaaagtttaaggaggtcactaattcaaaactctacctattcgcttaattttttgtattattgttgggatttgaacttagtaattaatttaaaacatgattacgctaaaattattttaacataattgtttactattttatacataatgggctcgtttgatatgttgtattatattgtattaatattatttaatacaatactatgtttggtattgacttatactaatagattgtgtaaagttataatatattttcaataaactcgaccctaacaccgactgcagttcgggttcgggtctcagtaactaggtctgggtctaggtctcgggtccgatcctagattcgagttcggagtcctgggtccggattcgggtctcgagtccttggttcgagtctgggtcctaggcccaggtacgaattatgagtcctgggtccgagtcgggtcaaggtcccaagtttcggtctcgggtcccgggtttgggtttggctatgggtttgggcccgagtcccgagtttgggtccgtgtctgggtcttgggtcctgggtcctaatttgggtccagcacccgagtcgaggatcctgaatccaatcttgagtctaggtcccgagtcctaggtttgggtctgagtccaagttcgagcttgggtccaggtcccgggtctcaagtctggggtttgggt

SEQ ID NO: 239484 - DNA, 1331 bp, Cannabis indica
ttttaatatatacacgtggtgttgatgtgacaactgattaaataagataaaacttgatgtaaataattcaaagactatttttaacagcctaaaaaatttcgaacgcacaataatatataagtcatagttttgtagtaaaaaatcctaaacaatctattatcaaatattattttccaagatgaggatatacatgtagtgattgtgtgttagtttattatagtaaaaaatccaaaaaaatatacatatatatttaatatttttgtgtattttgttttagggcttgtttggcaagtagtgaaatggggccaaaatttgtatttttatgctataataaaaataggtagccgaacgccgaacttggtccccattccaataccaaaacataattaataattaaaaatactattttttgtttttggacaaaattaagtaatagtacttttcttattatggaaaagaatctataattaaataagtaattattaattattatattatattttaaacacaattagtgaattggtggccccaccttatatatcggtgatgtgatctgttgaggggtataattaattaatttaattattatttaagtatatattaaatttggctcaattattatcaaaaaaaaaaaaaaagattttttttttatttttatactttaaaatagtttttatttttatttttatggaattacatctaaaaacgtctatagcaattaatggagtaatttaaatcgcaatgaaaatccacataaaaatcttcaaagaaactattagaaaaacccaaactgtaaatttaaaaaaaaaaatattaaaaaataatatatagcataatttcttaaaaaattattaattaataattaattaggcaagaaatttaaagcacttttaaggtttattaagtggactatatttatagaggcgtaaagatagagccttttatagcactctttttatgtactttttataacacttttgaaaattataaatttaatcaaataaaatatatgtaatgccgaactattaattattacaacacccatgcaaaataaataaataaataacattattaataataaaaattaactagtaatgtagatatatgtgttattacattggcaaaaaaacaaattaaataattaggtggaaggacagcctatatactcatcatccaaatatagaaagctttgaaaaaaaaaaatgcttacaacattaattatttttttaaaaaaaaattaagttagaataaatgtaattgggtaattttatagtacactcgctaaaatggtcgtacattttttattttggtcatttacgagagttttttag

SEQ ID NO: 239485 - DNA, 992 bp, Cannabis indica
aatgcaagatttgaaaaattttaatgctttttttattaatttttttatgcattttaaattttattccattctatttctattccaattctcattctcattcttattcttatattttcattcttgtcaaccaaacgccacctaagtgtcagcttagaaacatgcgggaacatatcattaaactgcatattatataaactaaagaaatatgtcttcacatgtttctaggctagcacttaacagttaaaaaaaggtacaactgtaacataatcgtaaaataaaatacttttgttgtcactttttttaattaggatcatatgtgtaacgattgtaaataaagaaatttgtcgcaaatattctatttcgaaaaatggtgatgatagtttttaagatttaaaattttataagtctgttaatcttatttttaacagattcgttaactacttctcaaaatgttacgatatggtccaactagatggtgacatgttctaatcaccacctaatgaaagttaacgatttggagtgagagaattataattttagtaacactaaatcgttttatcataaaaaattattaaattattactaattataaatgtaaaactgtaaatagttatgtagtaaatatttcaaattttggtaagaataataagatgttcatacacaaatcatacattaattatatgttaggctgtacaatttaattgtagttattatttggtacccatcataattgtaataaaattatgatatgatgactatgatggctttttatttagtaaaaataattacttaatgatgacactatttatcaaattataataaagaatatgaaatacaaagtcttcttagcactcctctcaaaataaagacatatataaatgtaaaaatttcaatcaatagtcttattttaaaagtaatttgtcacaaaaattttatatgtacatattactattgcatcttatatattttaatttaataattattataatttt

SEQ ID NO: 239486 - DNA, 642 bp, Cannabis indica
ttgtgctatatctttttggttcttatcaactttcccctacagttacactatatatattagaaattatatattgagcatatatataatactactcttttttaaattacacacatacagtggaacacagttttcatatataattaattagttaacatgcatatgtagaacaatctgtcaaaattatttgtatgctttatcatcttatttatattcattatatagccaaaaacacacatacagagggggcattatttgttgttctgaattttgagctctttgaatcataagatttccatctctatatatcactagctctgcaaatcacaatgcttctctcaataataccttctttgacttatgatatatacaaatttatataccttttattggagttgtttcgtactgatcattaaaaattattacaattgtttgctgggtctaagtgattatctagttgattgtgattgtatgttgtgggattcacaattttataaggatgaatgcggaaaaagatatatattttgatggagatgaagacattcccgaagtacaagatactactatacaaagcacccacgaaactttgaatgatagtgttgagtttagcatttcaagagatcaaattcgtgaaatggctaatgt

SEQ ID NO: 239487 - DNA, 1712 bp, Cannabis indica
accctagtgtttcttggggaccactacctatttatagagtcatcttagaataactcttgggtatttataatttggcccctcaacaaattataaattaacttatggtatctacacattaattccatgacactttaatacccttttgatacccataacataattggtcacttaatttcgtatcacactttataatagcatatacattatacatatgtgcccacaaaggattttttaatccaacataaccatgtggaaattaagtgagatatattgaatctaaagttaatataataaactataattgttgacagtaaatttaaaaaatcatcaagatcattttacatattaaaaacatatatgcacgtgcatttgctaaaattttatgatgacctaagtaatatgtaactaataagtcatttttaataagtggaactaatcttaaaaacaaataattaattaaatttacttttctataagtttatgttaaatttgtgtgtaatttacgtgcatcattaatacaacattattttttagtatactagagtgttgctaattttttatatatatatatgtataattatatgtgcatgcagttaaggcaagagtttagcttatgcagagtttacaagaaaacaaaatgcttgagagcatttgatagaaggcctactagggaagaaatcataactattaatcccaccaccaccaccaccacacttgatcatcatcatcaccaacaccaaccgtcttcccttcctcctcagctgccgccgccactactcaccgacatgatgagtaccactccttcctcttctggcggtggcagtggtggccagccttctcaaagtgtggagagcgagtacttgaacactcaaacttcgactgataataataataattatgatggtactactgatacctggggatggggctgggatcagtttaatttattataatcgagaacgtatatatatatatactagtaaaaagttacgtgcgatgcacgtattctaaattttatgttagttattttttactttatttaaaagttaacaattaaaaattaaagaaaaaatattataagttattaagtgagattattattatgtatatctaaataatctggtagtgacagagtagtttagctatataaggctgaaaccggtaggctttgagccctttacatgtttaatgtcattgttgatttcaccaattgagttatgaataatggttagaacatagtttaatctcatggttcaattgtaaatcaaaatataaagaatttctatgagggataagtcgaaaagtctagccataaatgtttcccattgttttggtttaatttgatattctacagttctgcttctctcaactatgaatctatccaattacaataaagtaaaatcaacaatttaaatatcaacttaccacaaccacagagttatcctaagtgattcttcttccaactcttcaaaataatgcttaaacacctgcaaatgaaaatagaacaaagcaactattgttgttggacattaaatgtgataactgaaacatatagtttggtgattcaatgtgcttatattccgacaaaaaaaaaaaaaaattcaggtatatatatatatgtgctcttgaattctgacatataaaagtctagttatatatatatatatatatgtgctcttgattaagagtggagaccattgccacccaattcc

SEQ ID NO: 239488 - DNA, 2576 bp, Cannabis indica
tggatgcgatttagacttttcggtcatgctcgccactctcgctggtatacctttaagcgaggtttaagacgttcgaggagtccctcagggacatctcagccttctgtaggaaaatctgagtacacgtgtaccttttaatggggggtctggtctcgagtttctaggtgagagaaatctcactataacacaaggattgcattcattgtcaatccgtttatacattgatttacaataatttaagctgaaaaacgtaaacataataaatgaagaacaatttccagtttcattcactaaatacagcaacgtacgcgacttctatagtgcgagttggctgttcacattttcgcataagctcgcaggcttagaatgcattcgagactagttgagtctaagatgtctgcgttcttgtacagtcgcttttacggacatcatataacgagctgataaaaccaagacatgcgagtctatatcggtttatcgaggctgttgggtcatcgggaccaactcgcaacatagagaatcgatctctatgttttcgcaggaggatcgtggggatactcgcatatatcttgatatatgcgggttaaatctgttccttggtcctacataatgcgagtcatacgaatgcgattagactcggtcatatccgcatcatctcgctgagtctagtttagtctacataatgccagaagtctcagggaacgtgtacaatgtggtgtagttccaccctgagccagcgagcttaggagtaccaaaagatgcattctgagagcttaagggtggcctaatcctcagggagacctcagggcaccccgctgtctaggaactggcatccttccaagcagaacccttggtccagtacacgtgataagaactcgggacaagataagaattcgggcttccagcactgtaatcgtgactctggtagagattccctaactggtttataatatttcgagttactttctccgatgtaacctcaagagttataattacatcgtaatgatagagatctgtttcagcaaccttgaccaagaagtgatttgccttaacaacacactttctaccaaccgtgccataactagacctaaccggaaacctaacaaattttgacagacactggaggaaatctcacagttgccaccactgcgggatcttgcgatatcagtttctgatcatcttcacagctcaacgaaaaggtagtagaagtagtcaacgacgatggacctagcactaacaccaacactggcgcaggaatcgaaagtttagggattggagtagtaactaattttttagtttaacaagcgcattatttttggtaggcctccgcaggttacttgctgccggcataacttttcttgatttcaccgccagacccaagtctttctcatatctcaccgtttctgcatggttgtgcttctctaagtagcagggtgccaatgcttgaaggcaccggtggcctgctgcgctcccaaagagtcaaccaaccggatctgagttttcccaaatatgcctaggtactgcgggactccaaggctgtttacatccaccttcttcactctccccgtcagggtagggatagacttttggccagatctcaataggtagtcaagccgtgtcttttttcccattcttggatgggttctcctttttgtaacttgagatttgtgatagcaaacaccacacatgtttcaatctttccttagctctcaataaaagcactaaattgtttaccgagatttttagaaactgaatttttagagcttaagaaagaagtaaaataataaataatgaacacaaagctttttacatggttcaggtgttaactatccttagtctacgagttcattttattagccatatcaacaaatgatgagtactacaagtagttacattatggacttgaactctatattcctcttgaagaagaagaagctcaataggaatttcaatagagttttttctaagtaaactatggtttttcaaacttaattgagttgcccctcatcttgtgatatgccggagtatttataggcgatctccttcatttacgtgatttctgaactggttttgcttgaagagatttgaccgttgattcggtagatggtttatccatcacatggtgcatagaggtgtcagcttagtattgtctgatcgtctcatacgtgtcgctccatggccttctctttttgaattgcccttataaatggttgttggatcattagggcaggtacaagttggcgtgcatgccctgtactgtggcttaacgcgggggacaaaacctggcatcgtacgagaaaaagtatgactgtcacctttgtaatctgacaggttcgaacggagctctcccgtgacactgaacagggttacaactcattttaaatcattacgtgacccttataggcgtactcaaggaaactcccagccttttctgggcgcttggcctctgttcccatgactgggagatatcatggagcgtggatgctccacgtgtcgctgctttgcacggaagtatccttcgcaaaagcccctcgcgggagctagggcctgagccattaaccagttgattattatct

SEQ ID NO: 239489 - DNA, 702 bp, Cannabis indica
agttcctgtcaaataataagtaaaaataaattacaaagtaccatgagtgagtagttcttaatacttgattacactaataataatatactaaacatcatttattccctctactatttttctaaattaaattctagctttcaattacaaagaggagtcaacacaaaggaggtgagaactattccactaattataataataacacacactcttgttaaatgatattcgtttgatcatgattacttgattacttaattaattcattggtttcccttgtgctttaatatagattggcttttcttttcatcaggaaggtacaagtgtgtaaaattaagtttactcatatgtatatgtatatatatatcgtatcctctgatacgttgcttgttctctctatttgtgagaggttgaggttttttgtttgatcggtttgtgctttgtttggtttgtggtttgttattatggtgtcttgtaacaatgcgattggtgagttggagaatcaatggaattacgctttttccattgaagatgaagatcgatgatgaaaaaaaatttattgagtattctatttcattgattggtaggaaagtttctatttggaaaggtctctggtttcaatatattctaaaatcaaatgtcgttctcttatgaaaattaagcatgggaatgtatattaaaaaaatggaagataatttatttctgctc

SEQ ID NO: 239490 - DNA, 1497 bp, Cannabis indica
ttaacccttttattttatctatagcaacatcaataagcatattatttgatgtaaaagtttactaaccaaattaattgcagataagatttcaaactaaataataattgctgttaaaactcaaaatcgccaagtttatttattgcagataagattttccttcacttcttattttagaatcaagttcatcattttctgacacttcaagtaaaacttctctaaaatcttacatttgagatcttatagctttaatactttctacacgactctcccaacgagtggatgacaatgatttcagagtcaatcctttcacattatttttcaaaatttgctatctcttagtagaattagaaaaaatcgtataaatgcgttgaatagctccaaaaaaaatctctagttttactacatgattcagccatatcacgcaaaatcaaattaagactatgacaaccacaatgagtataaaaagctcttggatttatgtcttaaaatttcttttgtacaccttgatgttttcctttcatatttgacccattatcataaccttgccctcacacatcaaatatgtcaagatcaagttttttcagctcattttgtagcacatcaaaaagtccttgaccaattgtattatttatatttaaaaatcttaaaaaagattcttcaatgctaacagaatttggagaaacattcacatatctcaatatcaaggacatttgctcttgatggctaacatcaggagtacaattaagtattacagaaaaatattttgcttgtttaacttttttaataatttcagttttaattgcaaaaacaaacaaaagtattaacttgttttggatattattccaagataatgaatgtagatatcatcatttataatgcgattaatatgttcttggataacaggattaaactttgtcaacatttcaattaagcccaaaaatgccattattattttgttacaatttcttattagatctacgaaaggccaaattatgtttagcaagaaatttaactattaaaataaacatttttcaagtgatatttttctttttaattagtatttgagtcgctttatcaatggtttgattttttgaagtctgagatgcaattcataccaagtgctcatatttttaacatgttccatgcttatctcatgctccctaaatctttcaccaatatgcacccaatcacaaaagcctgcatttattaactgtcctctaacaatccctattttaaaaactttgcaataaaaacaaaatactctatctaactcttttgaataaataagccaatctctatcacatttctctccatttgataaaaatctagtataccaattagcagtgaatcgtctaaaaaatttatttttaggaccagccataatagaaaaatctctttttgaacccttcatcactaataaattaatcattttttgattaagagcatcccaatttcttggatcaaatatataaagtaaatttttaaatgaatttgttt

SEQ ID NO: 239491 - DNA, 1520 bp, Cannabis indica
tatgcataaataaaagtgaaccttgctttaggaaaatcaaaacctaccatttaaatttttgtttattaccccaataattaaacatcattacatttagaactgttaatacatttgaaaattaatattaagagatggtgttgagtgttgactcgtggggtaattaggagtagatataaagaagtcttcatactctcccgaaattacaaaaggccttactttatatgagtgcatctttttcatcaaatatggtaccatttttctttgaaattccagctcgccgtaatatgtttaccgagctttttgactctcatatacttctttcttttgctaaaattgaccaaactttgataagaaaacaaaaaagcaggccacgtaagacgcctaatatggaataacttcttctagttctagtcaaaatgagagtgaagcaatattatttgttatgccattcacagtttcactatattctactcggtagttgaacctagctctttccagtactatcatgtccacataaattcttagtacagatttagaacctataattaatcagatctttttattaagttcctcactacactaccaacgtcttaagaatcgaaatttagataaattctcctacttttgatcatgaaaaccttactcattttcatcattctcttatttctaatcagtatagtcaaagtttcaagcacctcaagagtagtaccccataattccaaactgaatatttctaaaaccaatcctcctattccttccaccacccaacaacccaaaaactgcaacaaggtcaaaaccgtaaaattatataaacccatcgctcttgcttcctcagcaactctattagcaatattcttctttcttctgggttttactatgttctggagactaagaagaaaaactcatcatcagcagataataaaaaacgacgaagagaaagcatctctatctcctagagttgtcgtaactgtgaagaatcaacaacactgccgtcgttttaccctcgacgagattcgatccgcaaccaacaacttcgaccccgacctcaaaatcggagacggtgggcacggaagagtttacaagggttacatagacaacgacaaagaaaatttaaagcaaaataatataaaacaatcacaataacatttagcaatacaaagatttactagccatccgactgtagatgtattcgcaatactacttcactacagatgaatatttaagatattcaaagtctactaaatattcataattaattaataataaaagttagtaaatgtatacctcgagctagctagaaactgatcactactaagtcggatccttgcaaattaacctcacaacctacaacataaataaatactacaaaattaaaaatttctttatttaactacttactatagttgtatgatttatgagaaactagttactaactaattaatttattagtacattagtaataaaaatacatgaatatgaatgaaaattattaactttttaagtagttgtaactaactatt

SEQ ID NO: 239492 - DNA, 942 bp, Cannabis indica
tcaattaatacaaaaacttaatttttaggctgtaactcatgaaattgagtgtactataatatacataaattaaacaaacgaatcttacatataattacataagtttacatatatattaagaaagattaaaggagcaagttattccagattttaagaaagtttcttccaacaatggagctttatatatttgaaagaaagcgtagaaataaactagttattaattatgattattatgttagttatttatcttttattagcacgtggaaaacgagtatctcatacatacgaaatttgaaacatacattaaactgataaactagttataagtttcctatataatttttgcacatgtggctaattcatttttgatacatgcagttttgaaaagaagaaaagttaccaaaattagaaactcgtacactttgtgaagatgtggctatgcatgtgcttatagtttagtacaaacttttgtcgtgttataattttcatctacacgtgactattatatatttatattaattttaatgccttggcgtatggtgtggtgggagtctgatccaaattccaaccgttagacagaggagtttaacatgagtttttcttttcttttttttttggtagaaaaggttccatatcaaaaatcaagagaatcatttataacaaaaggaaaaaaaaaatttacctcaaaccacagataatgattatctaacattaaagcttatttccccaaatcataaataacttaattagcatctcacttaatataagacacacaaacaaaagaaaaataagatgaataatttttaatgtcaatcaccaaattttgaaatgaagataaagctgatgattgataattaatagagttggccaatattaaggaatcagtttcaataaatctagataattagctttttagtccctgtacttatgatactatactat

SEQ ID NO: 239493 - DNA, 1479 bp, Cannabis indica
tattcacatccttttgttgagggaggttcaacaaggaaatttgaaggaattttgagaaagttagtcactgggtttttggttgccttgatgtgaatgagggcattatctttctctataattcattgagaaatgcaaagatgaatgcggcaaccaagagtgtcataaaggcttattctgttttgcttctaattttctttgatgttcttggttttcgaaacaagaggaccactagtccagatcttaattctgatgttaaagctccactaagaatagtgaagattgctagtctgcttggccaagaaaacaagtgaattttatatatgtttttgcatgttagttgttcatggtattctcttaagagatgcaatggtccaattcaaaagaattttgagcgaacattgttggttgctgcgttcattttaatgttaaataattcactttgattacaggtttggattgtatggtattgtattttgtttttatgcttatattttttgtacatgtttctgaattatgtcgatatatataatattatattcaatgatgaaataacttttatgcaacccgtctaaattagtaaaccaaggaatatagttgtaaaaagtatttgaatctttaaattattgtattatgtataacacattttttacaactatcaattaacggatggacaacttttgaagattcaacagaatagttaatgtaataagaatttttttaaaatttcacattaaagtgtcaaatatgatgttaataatgctttacatttctgttaatgttttggatatgacatacaaccttaaaacaactattatgcaactaatgagttgctcattgcaaagaaggagatgttgttggttgttgttgtattgttaaccatattcgcacacaatggataccttgtgaagtaagattctttcaattttagttgtatataaagaattagcttggatcgtcattaaaggttggttcattctttcacttggtatttcagttacagttgagtattttcttagttgcattccaacacctattttaacttgtgtgctagttcttcatatttgaaatctattgaattaatgtaatggccagtagtttcacaatttacataattcatttattgatcaggctgtccattgcaaaatatgagaaaaaaaattacatcttttattttttacaatttaaaaatttatgcattgtaagtcatctatgggatgactgtcatgaaactgtaatgcaacaattatatttgttgtgaggcaactaatattaaatcttaaaataactaataatgtccttatgttatacaaaaaaacttaccataatcaatttttctctatacgagtcgtgtattgctaatttcgagccaaatttttaatataataatattgtagtagcacaactattacttaactaatatattacttaattgcaactagaaatgaaaaattgaatagacatcgtcatgaaaaaatttgt

SEQ ID NO: 239494 - DNA, 1644 bp, Cannabis indica
atttcaatttgtggcataacagattaggccatccagctaaagccactgtatgtctgtaatggaaacatgtaatatttcaaataacaataaaactattttcgatctatgcactgcttgttgccttggcaaactccacaaactcccttatcctaactcaaaaacaatctacacagctccacttcaagtgttacacactgatctatggggtccttccccaatagactctttcaatggctatagatattacataagctttgtagatacctactctaggtacacttggatttatctgttaagaactaaggatgaggctcttcctacttttactaagtttgaaacacaaattgaacttcaactaaatctaaatataaaagaaatacaacttgactggggtggggagttcagatcctttacaattcttctagaaagttatggaataattcatagagtctattgtcctcattcccatgagcaaaataggatagtggaaaggaaacataggcataatgtggaaacttgttcgaccttattagcacactctagcttacctttaaaattttgcaatgaggcatatagagttgttgtttatctaatcaatagactacctactatggtgctacacaacaccactcctcatgaaaaactattccacacaaaactagattactctgcttcaaaaacatttggctgcctatgttttcctatcctcaaaccctataacaaaaacaagatgagcttcaaatcaacaccatgtactttcctagggtatagtcttacacagaaaggctacaaatgcctttccctgatggtagactttacatgtccagagatgttcttttcaatgaacatgactttccttacaaaaagccagcaaattcatctcatacaacagcatcacctccttctaatttcccgacagcaactccacctattgtttcttctcccttagtctcacaacaatctcctaagtcacctttagtatcactctcattctcctcatccaactctttttctccggtttccaactctgaaacagtgtttgaatcatcttcttcccaaaaaatttctcttccctatcctatatcttctttacctccttcttcctctccatctacacattctaaccctcctgtaaccaaactcatctcagatcccaatttcacattttccttaaaagacctgggggaacttaactatttcttgggaatacaggttgcacatacagattcttggcaatcacttgtcccaaaagaaatatcttcaagacctatgcagaacaaagatgtaggctgccacgtcaagctctactcccatgaaaaatggcctcaaactctttcagtttggaagtgatcaagtacttgattcttctctttatagatcagtggtaggagctttgcaatatgccacaataaccaggcctgacattgcatactcagtcaataaagtatcacaatttatgcaatctccacttgaatctcattggattgcaatcaaaagaattcttagatacttggcaggttctcttgactatggaattcacttaacaaaatgctccaatcttgacattcaaccattctgtgatggtgatgttggaaatattttaccaggatctagatttacttccaagtatgtttcattaacatc

SEQ ID NO: 239495 - DNA, 1384 bp, Cannabis indica
ttaagataagcttttaggtgatatccagatgatgattgtggcctttttaatgggtgtttccactgaattatccgatacttctgtatcttaggaagctgaaactataatgtaagctaaacttgtaaagggtgttcaaaactttttctcgtttattgttctcttggcagcccaaaaacatatattttgagaaaagaaaaaggaagaaagctaattgcttttaagacttagctcttgatttatcattttgttcctttctcattatctttattcatatttgaaacacaacaagcaacataaaaaagaaagaagcagcttttggatcatgacaaaatatgaatttataaaataacatgaaatgaaacacaataatttgaatcatgaaacattatttattcttgctttcataggaattaaaacccagaaatcatgagcatttgataacaaagaatgtcaatctaaacagaatctaatgcttgtgaaatgcagatgccaatcaactagtacagatgaagtgaaaacaaaaagaaattttttagataatgcaagcaaccttcttaccaatttcttaagtgggggaagcttaggggacatgcctatagctgaaggtgctgtcaccgatttgtttgatagacccctcttcttttctctgtatgattggttcatagaggtattcaccctcaattgaaatgctatttttttttcttacattcattcattttggcagcaacaaaaaagaaaatcattctttttcaagcaattaacttgtatatatgtggcttcctcatgctctttgaaatttgcctactctggcagcatggtgctgtgtataagcttgcttttggaccaaaagcctttgttgtagtctcagatcctgttgttgcaagacatattctccgagaaaatgcattttcatttgacaaggtcaatttgcttttcaaattttagtgtatatgtattgcaatttgtttttctctcttctaacaaaattttccctcttcttctttttatgttttaagtagggagttcttgctgatatactagaacctataatgggaaaaggacttatacctgctgaccttgacacgtggaaactgaggagaagaggtgagggagtaaaattcaaagttttttgctcttaagtttaagaagtgtaactctatgctagcttttgaaataatattgattcctttccaaatggtcttgggctgttcaaaataaataaataattcttatttgttctttatcttgaatgattgtagattataatctaacagtatgattgtgtttggccatcagtataatctgattatagaggtttctcttaagttagtattgaatgcttaagttattagttataacaatcatcaaatatgaatacggaaaa

SEQ ID NO: 239496 - DNA, 1516 bp, Cannabis indica
aaaaaagttgacattgcagtgttgttttaggttttaaggtagagccatctataagcatgtataagccatctttaacattcactttgagcagaagttgtctagagtccttatccttaataaaacaatagtgtttgtgaaattcaagaaagacatcattgtcttcagttagtttggacacactaactagattattaataataaaaggaacttcaagaacagattttaaatgtaaaagataattagtagatcatggtaaacatgttaaaccaatatgagagatatggagtttcttaccatcaccaacaacaagagtttcatggccagtgaattgcattgttgaatcaagatttttcaaggtgttggtgacatgatatgtagcactagtgttcgcaaaccaaaaagagtcatcaccaaaatttggaagaactaagaaagtatattattgacaatcttgattagtgtcatcctcaacaagaaaggcatgaggtgtaaaagtcccgaacttgggagtaatccaatttttgttaaatttgtaatgacacatagtcataatgtgtcctgttttgagatagacctatcaaattaaatgagagttagagaaaccttttccagttccacgaccttgcttttgattttgaaaattagcagctgtacatagaccaagagcctgatatgacctgttggagccattgggagcgcctggacttctttaagactaagcagatcacttattgaaataattccagacaccacagaatcataatcagagcctagaccattgagaagttggaggatgacatcttgcgtgcgtatggcggatccaacaactccaataacatcggtgatgcttggtactttgtcaacatagtcagaaattgataaagaacctttctgaacatggaaacattgaccctttgagctgaagtaattgagcttgagattgattggaaaaatgttactctaaagcttttcaaacatagtagatattggtgaaatgaggaacatatccaagaacactttctgacatggaggattgaagtcaagatagaagcaattggtcatttcatttccattgttgatattggggattaggctcaccgatgatgagagcttgtggcggagggacaccactaaacaagatctaatcaagatcatggccaataatcgtgggaacaacctaggacttctaggaataaaatgggtttgatcaagcttgattgtgagggaggcaatgagcaagtgagaaaacgaattccaagtcgttggagcggccattagaggaacatttgtagcgggaacagtggaagcaagagttgtacgatttagaggatcgatttgtgtgccagaggctaatgttttatcagttgaagccatcagagacactagttaaaggcgacgaataccatatagaaacttagcaatgatagagaaaattttagagagaaaagaggtagagctgagagaagagtaactaaagaaaaacttaaccaattggttagctgtgtcactttattta

SEQ ID NO: 239497 - DNA, 1653 bp, Cannabis indica
aattatgtatattagtgaaaaaatcccattaacttgctatatgtgtatgcaacaatttttatatgaaaaaggctttattatgtgttgtcccatttacttattaaatagtcaaattatttaattttgattgagtcaattatttgcaactcataatttgtggttattagcatttattttataataatttactttcatagtgttttcttttaatttttttaatttatatagaaagtaataaatatataagataatgctcttcattatgttgaattatttttttttaatatgtgttaggaattttattttatgtctatatttaatattattttcttatttatttatttttataaaattatttttcaaaaacactatcatttttcttgtcacttctctctcactcaaaagttattaaaaggaatatcgttaatattatttccaaaagtgttataaccaaaactaaatatacatatatagacaaagagactttgatttgttttgtgtatcttctattttctaaatgatcgatttgttgttttatgataatatatgagtgagtaaatattacaattattgtatataactaataataaaataaatcatcattaaccttaaccttgccaattttcacatggggatagaatggaagtgatctaatcaatgacataccaataccatagaatttgcccacactttttttattattattattaattaagaaaaaaaataatattatgctatgaataagtttgttttaattaatcatgcattaccatatatatatatatatgaacgtgtgaggcaagtaaaaatgaagacttttgtagtttggtcaaacaagttttatataatatcatctataacaaaactttgttaattttgcctctcttttaattaatcaattaattaattagtaatagtattactaaagttaatagccgagagagttatagagattgaattatcaatggaattcatcatcatccttccctttcttcatcctcaaattcattattattattattgtaattgaaatttattaaaatattgcggtctgaatatctaaatttaactttaggttgcacataaatatctaaatttaatttttgatagtaataatacttaagttatatttctgaaactctgtaagtatctaactgttaaatgttaagtcattatccacgtatcatttttttattggtatatttaaactaattttatatatataaaaaattaatacttaaaaatcaggtatttacaaaagttccataattataacttggtattattaccacaaaaaattaaacttaaatatttatttgcaattgagagttaaacttaggtatttatgccgcaaattactctaaagtatttttcaattaatttgaattttacgtatattcttgaaaaaatttcaaaaaatatacattgacgcgcctctatctgtttcaacatgtaaaaaaaatttcatattcgtgtgttaacgagtctcacattattaatgtctggaaagataatagaatatataagttgaatgtactcctctcattgccaattggttttgaaatggaatctcattcaccttatcccaaattctaacatggtatcagagcaaaaacaaaaaaacctcatgcaccttaccatacactcacctat

SEQ ID NO: 239498 - DNA, 2025 bp, Cannabis indica
tgtttggcgacctgcttttgtagtatgaataggcaaactgaccttagaaggtgctttaacagaaggggttggtgctgatgtgggaattgcatcagtagctgttgctgatttttgagtaacagcaggaccagttgcaggtgtttgaatctcagcagtagtcattgctagtgtgggaatagcatcaggagttgttgctgatttttgagtaacagcatggtcagttgcaggtttttgaatatcagcagtagtggaagctgctgtgtgagtgtcaaaaaccacagttgctggtttattaatgtcaacaggagccattgttgggggattggatgactttgaagaaaataaatagtatccaagtgatcgagattaagagatcccttgagtggaaaaatttgctcataaaagacaacatctcgagaatggaaaattttctttgtggcaaggtcgagaagtgtataggctttcattccatttgaatacccaatgaatatgcaggcatgtgcacgtggagaaaacttgtgtcttgaactggctagagatgaagcataggcaaggcacccaaaatttctaaggtggtcatatgtaggaggcttattatgcagcaattgaaaggaagttagatgctgcaataatgtagtaggcgttcgatttataaggtatacagtagtgtttctgagatatggaagattgaaaagccaaggccctagcaacatttaaaatgtgttgatgttttcgctcaacaactgagttttgttgaggcctttcaacccatgaattatacacttgaatacctttttgaacataaaaagattttatattgagctcctttgcattatcacatctaacagccttaatatttttagaaaattgagttgagattaggttataaaattgtgggattaagtattgcacatcaaatttggattgtaacatgtaaacccaagtatgtctgctgtgatcatccacaatagtgaggaaatatctataaccttcaatactttgaacatgaaaagggccccatatgtcaaaatgaactaaatcgagacaagattcaacaatattattttgacaattgaatggtaatcgtttttgtttagccaaatgacaaatagagaacaaggggaaaaatcaatattctcagaatgtaattgactatctattatctttgttgtggacaatgaaggatgtccaagtctagagtgccaagaatggacactactacatgatttagtagaggaaaaagtcgaattacagtgactaggaaaattgacagattgcagcaggaaaaataggttgccaatgcgattagctatcccaatcttcttgtgctatgtaccttgaagtatacaagaattatgagtggataaaattgtgttggtaattgtaagaagaaaactgggaacactaaaaagattaagttgaaagtcagggacatataaaacattgtagatggttaagtcttttgaaaaaatgatatcacctgatctaacaactttagtggtagaaccattgggaagagaaatagagttagtaatagttgttttgtgtaaattggaaaataaagaaagattacaacatatatgatgtgtagcaccactgtcaacaatccataaatgagtagaggagtaattgattttaccataaacatgtgaagcaaatggtttcgatgtatcggtaggagacgattgcagcttttgagtgaggagagatatgatggcttgaatatcttcctgtttggtcaaattggcaagaaccccatactgatctgcagaaatgtggaggcatggtgaacagagggagtttgctctgttttctttttatctccatagccaggtggaaagccaatcaagaaaaaacacttttcctttaagtggacaggtttatggcaattggagcaataaggcctcattttctttgcaggtctaggattagttgaagctgctgatgctgagggattttgagcaagagcagcagcaggggagttattttcttgaacagaagaaataaggggaatttggggattct

SEQ ID NO: 239499 - DNA, 2029 bp, Cannabis indica
ttttgtgtgaggttgcctttctatgtatattaggattagactacaatatatcataagatctatcatatttaagtttattaagtgggagcaaacaaattttacatcacattatatactacataattttcctatgtttttagttcctgtttgaccatcatatttgtccatcttttccattttctcatggttgtggactgtgaaattttcaaggttgcacttggtgacatggccgagcttagaactgctaaatatgatgctgataagctgccagagggaaagctaaggtttgtttatctattttttttcttggattgcttacatattctgtctcatgcttattttacagttattacggattatattacgagaacatctcttcttcgcactttgacggattatatattctgcttgatatggcagcacaaaaggcgttgggcgaactgctccagatctctcaaaagctcggcgtctagacaatggtgttttagttcctgaaggaaagccaaaagacaatccacaccatgaggtactaagcaccattattttttcaccattcttcacatgatactgtagttggaattggtcatttgcccatcaattcggagatctttcaagagctttcttctcttggattgaactgatctgatttatattgttatcgcagggtgctttattgtataacgagtacatagtttacaatgtggagcagattagaatgcggtatgttgttcatgtgaactttgattttaagaaatgaaactttgtccatcagttagtggacctctgcattttatgtactgttatcttgtaaatggcatggtagttctaatgcttagctttttgtcttcattttgggtcaaaatgagtatatgggactttttaatgcaagttaaattttcctaatcaggttatattttatttatgttatttcattgtactattgatggcaagtttactgagtagtaatgagaatcaaaataaatgaggaaaaactgaaattgatatttgtaatattttgtttactcaaattgtttggaaacattataatgattttatcttgtttcatcaaaggaattttggttaaaaataaaagggattgttgacactctacataactatgaaagttgtaattatggatattttcaacaatactttctaaataaatttattagttttttttttttttttgttaagaaataacaacttcattgaatttagtatttgaaatacagaatgtccaacatagttgctggagtgttaaacacacaaatgctacgtttagaaaaggaccgagacatcctaacaacatgtgctaggtggtttgctgaacgtttaacaaattgaatttcaataaaaggcagagataacaataaaaattgatagtcttaaactaagttcccaaataaagaagaaagagaaatgtgactacgaatagcttgaataaagactaaattgttggattctagttcaacattttgtcatccatgtcttttgacctagcttaatgcttttgtaatacccataatctcggcaactaacaacttcgggagcaaaagtctcgatacagtaattggctttggcatcgataagtattcctgagtcgtttcttgcaaccataccgtatccaaacttgttgtcactagcaaacgtagtagcatcaatatttatcttaattgtatttgcaccaagtttagttatagctaagcctattatcactattgcaaaaatgaatggatgatagaaatctattatcttgagctttaatctaatgatcaagagttatacgtgctgatgttaagacgtttgctgtagtgagaactttgttcttccaaacaatagagtttcttgatttttacaaggcctaacacaccataaattctttagttataatagggagaagagactttaaaaaaataaactttaaccatacaaaaaatgactctataatagagaatggatatggagttatgtaaatgtaaggagttttttacatttttgctaaactcttttaataatattttaataaaaa

SEQ ID NO: 239500 - DNA, 1659 bp, Cannabis indica
gtaacgcgtttatgagaaaggtctttttttgggaagtaattacgattttaccaaacctatttatttattgtttttttttaaaaaaaaaaaaaagaaaaataaaaaatttaaaattaggaaaaattttagatactgttaatgaatctaactcggattttggtcattatttgttcatttaatgtatctttgcgcaaatctttactagagtttaaatttcttttttttttttttaaacatagtatctttcttttttatcactatttttactcactctgtgttgtatttattattgaatttttttaaaaaaaaaattatattttgtccttgatattttctacagatttttcttattattttattgaatactagagaaggtgttacacaatacgtgttacttctataattttgctaatattttgtgacgaataagttctaaattataaaatatgacattgtgttgttatggaaattattaatttttaaaagatgtattataggaattaatgttacatttattgaattagtaaaatacaagaacaatattgatttataattttggcagactgtaaatgaaaatttaatttacttacttgagagttgagaccacttgcaaagggtgctttcagcaatctttgcccaatttgtgagaagaaagaagataattatgatcatttatttttttaattgtgatttctctcaacagattgtgcaacaaattcataattggattggcacaattggtcattaaggctcacaattggtcataagtgattgtggcaacaacttttttaactataatttattatatttggcttaataaaaatacttgttttataatatttacatagagtgaatgtaatcgtagatatgatagaatgttagaaaaattaataatattaagatacaaaatttatatataatatagaatactataatatatagaataattagatatacatacttgatttttttttcttttttttgaaacaaagattgcaattttattaatacaaatcagctaataaaatagcttccaaaccaataggaacagaccccctataggaaagacggtcaggaacgagctaaccaattagtcgcttggttcccagaccgtttaacaaactgaactgaaatatcaaacatcgaaagagatcgtataagactaatacaatctgaaacaattaaaccaagaggagaaagaatttgcctattattgttaataacattcactaacacgagacaatccgcctccaaacacaccccagtagggatccaaccttcaaacgaaccaccatcaccccaagtttgtttaagccaacttaaagcttccttcatggacattacttcagccaccacagggtcgacaccaccaatcctcttctcggcagcagcagtaagaagcacaccagcaactaaatagatgatatgtatttatagagttaaggagtgaatttaactacataaccctagttagattggacatgttcatttaactagaagagcacacatttctgcttcaactagactttacacacaaatgttaagtccattaactactgatcactaacaatatgggctaacatagctaagaactattcaatatcagctgaaattttaataaaattaataaaagttaatgtaagcccaaataaaagtcta

SEQ ID NO: 239501 - DNA, 2495 bp, Cannabis indica
ttattgagacaggcgagactttaccgcagtttctgagacgattttttggatatagacatgatttcttggaagttgttgcagtcgtcaatgtcgcctttacattgatcttcgcaatcagctttgcatttgctatcaagaccttcaatttccaaaaccgatagagatatataataaagtattcatttcatttttctttgtttgtatgaaggcatccaaaaattttaatgtgctcttttttttatttttttttgaaaagatttactttgttttttacgaatacattattaattatttctttaatttcagcttaatttaatgtactgtttaatttttttgattgaacaattactactattttttttcgaaagaaatgcaaaatgtattaagaaaaatctattgttacaaaagaattcaaaaattgaggacaagcatctatccaaacacaatctcctaaataataaaagaggttgctagtgtatgggcaacaccattcccggatcacgaaatggcaccgcaagaactatcaccaacaacagctaataaagaatagatatctaataaaatagactgaaaactaaaattaatataaagcttattgatccaactaattatcacagtggaatcactattaataatggagatattgaaaccaaactgatgcgcaagaaccaagcccagacgaatggcaagcagctccgccacattagtagagaaatcacctagcacacctgatgaccaccccaaccgaaccacaccttctgcatcccgtatcactcccccggtccaacaaagccccaccttagaattaccgaagcatccatcgctagagcaaaggattcaggaggaggtggcatccatcgagtagctcagtttacaactaggttcacatggcccagtcccaaatgaaggcctctttgatcatactccttaaactcttccaaatggttattagttaagtctggaataatatccaatcttgattgcttgttgccaaataatattgagttcatatcataccacagccaccaaaaggttgtcatcatcaattcaaaagcctcacgggatagcctatcatagagtaataggagaatttcctacattgtcccatatgcacatcgacggagcatcgaccacccctaaccgatgccacactggaatcaaaccagaatagaaaaatagagcatgctcgggagtttcagcttcttctccacatcgagaacagtaaagaggtacccaaacattctgggagataggttttattaacaggttctacttgtccattcgcttgaggccttgatattgatgataaactcttaataattttgttcctttcacagaactcagtgaataattcaccatcaaactgagttccattgtcagatactatttcaattggaatgccaaaactgcaaatgatgttcttgataacaaaattaagaacttttttacaagttatggagactagaggttcgacctccgtccattttgtgaagaagtcgactaccacaactgcatactttgttcctccttgccctgtgggtaatgccccaatcagatcaatccatcatatagcaaataggtacgtcgaggtcatcattctcaactcggttggtggtatggaaggtatatgtgaaaacctttggtatttatcgcattttttttaacaaatttatgtgtgtctttgttgattgttggccaataataatcttctttgatggactctgccaacatgcatgatccccacagaagccttcatgaatttctttgattatttcatttgcttctgttggtaacacacatcgtaagagaggcgtggaataaccccttatgtacaatttccccttgaccattgtatggcgaggtattgagtataagagcttgtgtgcctcagttttatctgtaggaagttctccactgactagatacttgacaattggtgccatccatgttggtaaagtatctatcatcttgatttcttccttttcacatatatactttgcttgtctaagactttcactggtaccaaattcaacttatccagatcaaattgggatgctagctttgctagtgcatccgtattagagttttgttctcttaaaatttgttcaattttaaaataattaaacttttctaagttcttccaaactttctctaaatattttgccatctttaaacctttcgcttggtactctcccaagacttggtttataattagttacgagtcactatagcatgttatatttttgacttttagtgcctcggctattcttagacccgcaaataagacctcatattctgcctcgttgttcaaagtatcaaactgaaatcttagcgcgtagtgaaatttgaaattatttagcaacatcattataactcctacccccgagccattctcatttgaagtcccatcaacatatagtttccatgtttctgcctcacgctcaatatatgggtcttcttctgagttaattccttcaattagaaagtcagccaaa

SEQ ID NO: 239502 - DNA, 2782 bp, Cannabis indica
attcttaaactaaatacaagattgcttttagcataatccaatcttgtctagttcagttcagtctaattcaattcaatcctttccagtccaatcttgagttccaaacgggtcctaaatgtataactagcaggaaaagctattcaagagggtgtggagtttgtgtaaactaaagttgttcttgtgatgttttccaagtgaggaatacttggaacttgttttgtaatcatatcaataaaagtaacctaccttatagtcttacaagagaataaaaggagaaataatagactgaaatttcattggtagtatattgaatccatatttaaacaatggctgtgtcttccatcaattggaaggacaaggtaatgtggtggtttgggattcaaaaaacacaaaggtatgatacaccaccaattaggttcacttattctaggagacctaagaaataagctttgaataatagcagtaataataacataaagaatagacatattagccgaggtggcagtattatgaatgagctgtcaaaatattagttaatagttttgttagtagtgtctataaatattagtgagaattgtaattgggacggaaggaaaagaagaatcactttgtaaacagagtcttgaactcaaggagacccccgggcttctcgaattgcctagcaccattgttacttgctgaaattcaataaaacttcaattctttctaccccattcttgtacctgttctagtgtgtatcaaagtggtatcagagcagttcttctgggaagtaaagaatgttgaagaaaccaggaaaatcagaccaagaacgagcggaggagatgtcggaggaggaggttgtcgactccaagattggtgaagttaaaacggaggttggctctgtacgagcagatatcagggatttcagggaagagatgcggcaactctaggaaatggtcggaggccgatcctactttgggaagatcttatgttacttctcttgaataaattctgaaacacttcaaaaggatctttacatgaacaatttcttgattttcggcaaatcggcacggttaaggaatattgtgaggagttgctggaaccattagatggggtatccgacgctgtggctttgggtcaatttcttttcggtctcaaacggggtttgaaggaggaattgtgattgtttgaactgaggaccttgaataaagcaatggagattgcagccaagatcgagagcaagaaccggtctttatttggaaatcgttctccttggggcaattcccaatacacgagccgccacgaagatcgcagggacaccgaattttcatccaaggatcggaaacccatggccaataccggaggatgatcgactcagaattgcaagagaagtgacgaaagggaatttgttatcggtgtgataacaaatggtcgctgggaatgtgaaaagaaagagctcattgttattgtgactcatgacgatgagggtgaccgaggttgcgaggaggactcaaattctatgcaagaggaggatctcaacctagataatgcggaatcgatcggtactgcagaagtctctttgattcagtcacaggtgtgactgctcccaagaccatgaagattaaaggaatcgtcagcagccaagaggtaactgtgcttattgattcaggagcaacacatgattttatttccaagaacttagttaagcaacacaacctgcttttgacgaaaacaggagcttatggagtgactcttggttcgggtaaatcatttaaaggtgaaggaatttgtcaaaaagtagtttggagttacaagggttgaccattgtagatgattttttaccttttgggttgggttgcattgatgtgatacttggaatacagtggctggcaactttagggaccacccatgttaaagggaatcaacaaacaatgaagtttcagattgggggtcaaccggtaacaatttaggggaatacttccttgggcaaaagtgtggtaactttgaagtcaaggaagcagcctaagataagtggtgggcacaaccaaatatgttcaacattgaaaatagtggagaagacagaacaaccagtttttttggaagagcttttggtgaaatttgaccccgtgtttcaatcgccaaaaaggttacccccaatatgtggtcatgagcatgcaataaacctcaaagaagggaccccagcagtgagtgttcggccttatcggtacccctaattccagaaaaccgagattgaaaagaagacagtagaaatgctacgtgtgggaatcatacaagatagccagagtcctttctctagtccggtcttgttggtaaaaacgaaatatgggacttggagattttgtgtcgactaccgggcactaaatcgggccaccattcttgacaaatttcctataccaatcatcgacgagctcttggatgaactccacggtgcacaaatattctctaagctcgatcttaagtccggataccatcaaattcgggttagggaagaggatgtgccgaaaattgcttttagaacccatgaagggcactatgagtttaaggtaatgccgtttggtctcaccaatgctccagccacctttcaatccttgatgaatgctattttctgcccttatttgaggaaatttgtgctggtttttttcgacgacattttggtttatagcccgagtgacgaagaccacattggacatctcaccatagtactacaactacttcaacaacaccaactctttgcaaataggaaaaaatgtgagtttggccagagccaaatggcttatttggg

SEQ ID NO: 239503 - DNA, 2924 bp, Cannabis indica
tttccagtttaatagatttattgcttatttgcagacagtctttggacaaactggcgcagaatctgaagctgtctttccatcaagtcccagtgcttatggtgcaatggctaatttccttgcccctaagctcttggttgggctgggtggaagtttatctaatggaagatcatttcattctgtagaacaatctaaaatcttcaaaaaagaaaggcatgcagttcgtcctcctgtgaagcataattggtcactccccagaagcagctcagatgagaagcttccacaaatttttcagcatgagctgattcaaaatttttccttcaatatgttttgcaaggtactgacttctaagattttgaggctatccatctcttcctgagtctacggcaggggtttaagcagaacagcttactcgaatagagttctaagttaatactggttttctactcctgaaaaagttacttatgttttgagatgcttacatgaatgataccattttcttgaaaacattgtgactctatgcaactagaatgtttgtttatggacacaatttaaattgcctttctcctttcttttaattatatgttgtgaaaaatcttgcagattccagtgaataaggttcaaacatatggtgacttacggaatgttctgatgaagagaatatatctatctgctttgcattttcggattaatacaagatacaaggtgtgtttataatgtcatattaaattttctatagtatactattcaaaattcttgcttgactggtttattatcactagtactgtagtacataatattccatagtattggcttccccttttatgaacatgtgttaatctttaatatggagtcatttgattcttgagtcatgagtatttaggctttcagaagatttaattcaactgttttgtataagcttaagtctttttcttggagggtacttagaagtttcgtagcttgtactgggtttcttttttggctgttgaataaactaagcaaacttaagttagctgctaacccattgtaatttttagagttcaaatccaccatttatctcaattggattggaccatagtgactctggaagagaaggatgcactgttactacccttactgtaactgctgagccgaagcattggcaaagtgcaataaaagttgctgttcaagaggtttgtaattttctaatattcacacgaggttggtcttcctgttctcaggttgatgcatttccaccccctgcttgatgagcaaagaagctttttgtttaattgacgacaatgtgctaattgtgtttgagttgtttcaggttcgtcggcttaaagagtttggggttaccaagggtgaactgaccttccatatggatgcacttttgaaagatagtgaacatctggcagctatgattgataatgtgtcatctgtagataatttggattttattatggagagtgatgcattgggccatacagtgatggaccagaggcagggacatgagagtttggcaactgttgctggaacaattaaacttgaggaggtaataacatttttataaaatgctagttctgtcattggaatctgtactgtgttcgcttgatggtaatgtggttatattatatagctttatggtgaagttttatttatctttgggtgtgttgtgcctgtgagcaaaatattaagcagttgtgtgaactgaaattgttttcttctgtaggtaaattctattggggctaaggtgtttgaattcgtttctgattatggaaaacctactgcacctcttcctgctgcaatagttgcatgtgttccaagaaaagtgcatattgaaggaaagggtgaaaccgaattcacaatatcccctaatgagattacagctgctataaaagcaggattgaaggagcctattgaggctgaacctgaggtgttgtttcattccatgctattaactttaaccgtttgattgcattgcttttcaacaattttcagtggcagatttttggtttgatataaatttgatttgttttttgtagcttgaggtgccaaaggagctactatcttcatcacaactacaagaattatggctggagcgcagcccatcctttatttccttaagtcctgaaactaatgtctcaaaaattcacaacaaggaaacaggaattactcaatgtcgtgtctcaaatgggattcccgtgaactacaaggtgacatgatttattcaattgcaagaacttattatgaatacatttacgagtatccttaattaactcatggagttagcttcatatctgtggcttcccctccaactgttgatattctcaatagaaccttatttcaaagaaatgatgtcatcatctccaaattgttatttccttcacatgcagatttcaaaaagtgaagcctgtggaggtgtaatgcggcttatagttgggggtggacgagcagttgaaagttctgaatcaagaggagcagttgttgtgggtgttcgaactctcagtgaaggaggtcgtgttggaaatttttcaagggagcaggtttgtaaccctgtattcattggcaaagctaatagtctaaccaattatactatgtattcacagggttccgatattatgaaaattttgaaagttaactgcatgatatgtttcctctgatagcatgtacacattctcttctccaggttgaattattctgtgtaaatcacctaatcaattgctccttggaatgtactgaggagtttattgctatggaatttcgttttactttaagagataatgggatgcgtgcagctttccaattgctccatatggtattagaggtaaacccaattgatctgtgtctacttgttttcttttatatgctttgaaatgtttacttggttgctaatttttaagatatatttctatggtttgctgatgcagcatagtgtctggctggat

SEQ ID NO: 239504 - DNA, 1086 bp, Cannabis indica
ttgtttggaattcaaaaaggtttccaccttttcaagcatccacttgtccttcaaccatgtgaaagggagaatgcaagcctcaaaattacctccagttctaaaggcttggaggtaaatattattcgagtttttggatagaggacaagtgtaattctaagacagttgcaactcaattgatccaggcccaatcgcaggcccaaccaacataatagattggatccattagcgaagtcaagccatccagatgttggacagatgactcgtcccaacaagagacatcttaaatacaccgtatctctgaatggcatcaaacaattcttccagatgagtgattaatgggcatcaagatatttagctccatagaacaacaattattaccaaatcccacaatatcaaggcttcatttctaggatcatgttcaggattcgtatctttcaaatgaagaaataaagtaattatcaatcaagcattaatgtatctttattatccacaaaagtatgacatggtttgacaactatcaacgtgatgtggctcccacgtcagtaaaagatcaaagcctcactgactaggccttgccaaagcagcccaacagtcatcatattatttgaatttatcctatcagtgggcaaggtgtacatatgagaaccctagtactataaatatgaaaaatccatccatgcaaaaggttaaaatctcgatacatgagagctaaggaaaattctagggttcaaacaattaacaaaaatacttatataaatctataaatcttttctagctttagcataattatatggacccgtggactaaggctcgttaacaccccaaccacgtaaaaattctagccttattctttgtctataatatatttttattaagctttattattttttattggttttcaaaaatatcggtaaacaagaaaattgtggcatcattctaaaaaagttcaagctaagacttcccacttggaaaagctatcacctctcttatgcaaatagatctcaacttatcaactcaatactgttaggacatagaaattagatgagtatatttttgcttccttaaagaattgtcatagaggtagat

SEQ ID NO: 239505 - DNA, 3816 bp, Cannabis indica
aaacaaaaaattacctaaaaaaaataaatcaaaacaaagacgaataatgaagctatcaatcacaaagacaagattataaaaacaaaaaaaaaaaatggcaggaataagagaatgagccacttactgttttgacgaagatttttgggcaatgaagaactttgggattgatattttgatgactaaaacaatgggttttgaaattctttgaggttggaaatgtaatatgaagaaatatgcaagaaataagttaaagatattgagggcatgcaagatgaaaggggagtaatcgtaggttacagaggaaatttgaaggtctaaaatttaaaaatggcaaaaagactgatacttttgatttttataccttattataaaacactgttagatcaaaagaaatatgatctaacggatggttacattgcaaattgaaagagacgaagcatttaatgctaatgatgttcctcaaagttctaaaccatcaaaaactcaaggcatgcaattttttaaaactgggtaatacgattatacccttgtaatcatttaaaaagttcattttaattaaaaagtactttttaaggggcaattgttatacctaaaatttagctacacttcagaagttgacatgtttccaacagaaggaatatgaatcaattttgaatgatataataatattataccaataaatgcatattaaataacccgttattattaaataaaagtctgatagataatattcaaaacttgttgattttatagtcaaaagcaagacaaggataataactattgagctgaggttaacgagccatatgcatacctcaaaatatataggcaagaagggggatgttcatccactcgagtagaattaatgtaacaatgtaactacctcacactacatagcgagaagatcacctcgcattgttaatgtcaataagagaatatatgatgagatgaactacttcccaatacttagcattttttcttattaagacggacaaggaggataactcgtatcaagcaagacacaactttctaagtcagcaataactgtctaaaggataaaagtaaagagcggttgggtagtaattagatatcatcccacataagattaaaataaaacgtggagattgtccacatttcatgaactgttatatttgaatcaatttcaaatagggtaactgccaacctatattcatttaaataggggcagatcccatgggaagagggacgacaaaaatttaagagtgaaaatattattcaaattttgaaatagtattctgtaatcaataaatatccataataataaggactcatggagtatgtagattttaactacaaaattacataataatatctggagttattctatcatttattacttattaattactgtagagaatttattactaaaaggctatttattttctgttaacgaaaatctatgtcaacagtaatctcaaagacacacaaactcaccagggaatagtagaacaactatcatttacaaaagaaacactctcttctaaaaatattaaaaattaagaagtagaagagttgaacttttgttgctggtttaggccatatttatagtgataaataacctttaaatcgagctccaaaggtctgagtacaaagagaaaatattaattagtttttttacaaaaattcattaaatgacgaaattttgtctaaacagatatggaaagtgtgcagatgaaatcataatcccaaaaatgaaagtcagaatctattcaaatagacagtcaatccactcaaacagatttactatacctagacagattttcagcaaagtttctttatataaataaggaaataaaatatacattaaaggcatagctctatacattttcttgactaggaaatcagataaaaattaataaaataaataataagactttccttaaaaattaaaagtaataaatactaaataatctaaataaaaaaaaaatcacatatttattcaccaataaagtcacaatctgattcgaaagacttttcacattgagaaaagagaaactagttttgaaaaatattaaatgtaataaacaactaattttgaaaatacataaatataattaattttgtcatctttaccaaatataccaactaaggactctagacataccatttcacatttccacctactttatttagaacaacatatcaactaattgaatacttaaaactcacaaattgttgtaaattcattacctgctgaatcttctccttcactctgataatttgcctctaataccagctaccttatgcagtggacttataatcccaccaattctttcattttaaataaacattgtgcacccattctttcattcccaagaacaacttgattctattattataatttttgaaatccaaaaccacctcttcttcaaacttacaaagttgccccaatgaaacacaactaggactccctaatcttctacccccttccataagattgatatacatatagcatttacttgcttcaagatactttttaggcaataatataatacatgcccaatataagtgaatggacactaaaactaaattgattaatgtcactctacacgcttagaaaatattttgggtactccatgttctcatccgccctatcatcttttccaacaattttgagcaattagccattgtaagtcttttagcacagattgaaatacccaaatatcaaaatggaaattcgcttctcaaaaattaatgcatccaaaattctttggacttcactttgctccatgccccacaacaatatattattgatttaggttcactttcttataacccataagtttgagaaaacagatttagcccttataattatatagatagatcagaaattacaattgcatacatcatctacaaagtaaaaggttatttagttgaagattacgacacatctcatgaaacgtaaattttactgggttgcgcactttggtcatgatacttgacaagtactccattccaagaaccaaatgtaaaggagacatgacatatccttagcgtaaacccctcctagcttcaaaaaaccatccattcttccatttagtattagactaaatcttgaagtgtgaatacatatcatagcatgttggatataattcattagaaacttgaagtctctcaatatttcatcaataaaatctcactccatagtgttataataagccttatggagatctagatttatcatccaatcaggtattgcattatttatcccataatgcctgatcaaatcttgacaaaccatcacattataagctatagaccttccttgcacaaaaccactacgattttgtgaaatcaattatagaagaattcccctcaatcttgcataaattatttttgtagcaactttttaaagcatattacaataagaaattggtttataatcactaatatttgcttgacatttactttaaggaataagagatattaccgtgttattaatttccttcagcaacttctaccaaacgcaaaaaagagggaataactccactatacttcattgtcaatcacgtcacagctatcttaaaagaagtaagtaccaaacgcatctggcctcagagtcttacttccatggattccaaaaatagcttgttgcacttcctctttggtgtacccactaataatgtattactttaagctttagtgaccagtggagctagcgaagcaattcatcgagtgacaagtctcctattatccatttaaagtctaagaagatgattataaaattcaagaaaccttcagtaacctcatccagatcatcaaaccatgctccatccatat

SEQ ID NO: 239506 - DNA, 771 bp, Cannabis indica
ggcttatcgggatattacatgttccattgttggagcgataggcttctcaaatttgttgagcaagattagctcttcttttctcttgttcagtacatttagtttcaacgtttctttagtgttacatgaacaaagtttggaactacccttgttgcttgtcaagagattctcgaaactgttgttgtaagttatccattaatttggtatgttgttcaacctgagggttgacttcctcagggtctcctaacttcacgtgaggctcatcaggtggaatttggttgctggaatcaataccaacagtagttggttgtctcgaaggacgagctaaggaactagttctgaggcctccacctgacatctagaatttaggtgttatcccatcaccagttccaccaactggcatgccccaagtgggttgactagttgttttaaacacttgctgatctcattgcaaccatcttgattaggatcttgagttgtggctctcaataaaagcaccaaaacattgacgcaaaaatttggctaatgctcactcgctagattggcaagagaaaatagaatttaagtagaatcaatgagagagagacacaagatttgtagtagttcactccccatatcgtgacggtaatggagttacttctacttcgattttttattgcttatggaattataagaaaattgactaagaaaagagctctatatttcttgagagagaaactagagagagatgctctaaacttatgagctcttgtctgaatgtgaaaaatgaactag

SEQ ID NO: 239507 - DNA, 1900 bp, Cannabis indica
aaaataattcaattaattaaaatgaaaaatcgaaaagaaggatagagtgagtagagtgactttttcatccatgttttgtatttttttttctttatttatttgacctttaattcttaaattattattatttttattaattttttatatttttactttaattttctcctattattagtttaatatatgattaatgtttaaagttcaataaaaataataaacacttttaatttattgtggtgtatttatttttttcttttttctctcaatattgggacagagactataaatttttttactatactttctcaataaatatataaatcggtatgttttttttttaaaaaaaataatttacattttttataatctacaacaaaaagaaatcatacaattcaatacactcatcttttgagtggttttttagacctcaaaagcaacatgtatttacattttacagctttattattttattgttgcctaatttatagtaaactaaacgttaataaatattatttatgttaaattacattttaaataaaatgtaaaaaaaattacattaaaataattaaaagaattaaacaagtgaggtcgaaccgcgattcgcgcgacttagttccctaattatgtatataaaatcaaaagcgaacatatcagtttcggatagaaatttcatctaactgagaagcatttttgctaataatttgaaccagaaagacagctacgtgactgaaatttgttcaaaagaggaatataaaaagagcgaggtaaaggaaacttgaacatatatattactgtctgatatcaaataagattgcaattttggacccctgcccgccctgccctccctgcccttactgccctgcccttcaactcaaataattgtttttgtctttattagccaagtactatcaccacaacctcctacactatactacacttccaccaatattcaaaaagcacaaaaagcttgtgtactaattaatatcatacatatatatacttaatagaacatatatacacatatcatacttatgaaacatttcaaatacatagtttcccttgttatataagatcgatcaattatccatacactatttaccatatgtatctattattgtaatgtaataaaatcaattgatggagatcagaaaataataaacttattatgaaactttatttctcattatatctagctagcttttaatatacaaaaagtgtagatctcaggtcccagcgcatatatcacaaaacacaataattataatagcttttggcactagtttcgaaagcaaacatgacacgaggataacacgtaatggatttgtatatattttttctttgcctcgacaaatcttcctatatatatatggaccatatatacatatatagtatatatataaataaatttatataaatgttacactaaaaggcaaaagctaatatttggaggttgaggtacgtactagtaattactagtgttgaaaatattattggagctgatcatgctatatttgtgactgattctgtgactttgctctatagcagcgtaccatattccctcgttcaatcatgttaggaaaaagctatggttacaagatatttgataagctgagaatatatgtctctttttcttttgatatccatgtcaataaaaatactatttattatgcgttgcctaataaggcaaacagctaaatcatgtattatacgtacgttcagaacaagacgctgatatatataaatatttgtatgaaattttcttctggttaattcgatgagacatgaaattattaattaattttgttgcattataagatggtactggtaccatacatgcatgcatacccctttcaaaaatatgtatatatacatttttcataatataaatatatttatgtat

SEQ ID NO: 239508 - DNA, 1373 bp, Cannabis indica
cttccattcatttgtctcagttatttacttacttggcccgaaatactaagtgccaagtcaatacgttgttgccatgtcactcaaaatcgcattacgtcgcattgttaaaattaaaaactttattaaacattttattttatatactcttttaaaaatatattttttttaattattttttattttaatttcttccttccttctaattctttcctttttacacgcattctatttgcaccttttttttctttttttttttttccaattttattcttcttcttcattcttcttcatcatactatagagaatcaccaccatccaccacccacccactacaagaaagatgagttatctcagtaatttttataaaaagtcgccaagattggtgattctttaaaataaataaataaataaatattgttggaggcccaatctcaaggggtcaaccgagatagggtattcttaatatcctaactaggtagttctcagtggacctgccaatattatgtctcaaaattcaaaaagaaaaaaaaatcttagccggcccatttaattctctccctcatctcttcttccttcattttctagtagttgcgcacaccaggaaatcccagtcacaccaaccccatttttcttcttctccttcttctttcttctttctcctatctcgctcccagccttatcctctccttcttcttattttccttcatctttccagccaccccagtcttattttatgaactaaaaagttaaaaatgaaagcaaaataaggtcctaaaacctatccaaagataacataatttcgttgttgaaaacttgtttttctaatcccatttatcaatacaactctgaaaatcaaagaagaatttgtatattttcttttttctatgactttatctagtcattgataatgtttctttttcgaaaagtgagtaaaattaagaaatgtgactttgtttactttgctccgatgtattgggcagtataagggtccagacgagttggcagtcttcgtgtttgtttacaatgacacatttctcatctcaagatgattcctctagtttaattagcctaaccctagatcgattcagcttaaatcaactcgatttagctcagacaaagatatttttgattgtggaaattgaaatgaagcttcaacaagaaagcaaaatctttttaattttttaattttagatggaaccgcatataagtttaaaagtcttttagtacctctagaatcgtagagtcgcatttttcaagattaaaaagaattacttgatggagctaaaatctcaaagcaagatgaagcaagccctagtagagctctcggagtgaatgagggtgaatgatgaagtcttctatgttgggttttatgc

SEQ ID NO: 239509 - DNA, 1401 bp, Cannabis indica
atgctcatttttcttgtagtgtgtttttaaaatttttatgagtttttaaattttatttacataaaatatgatttattgttagaatttaaaataaagtgaatgtggttacatcttaaaattaattggcaacaagatgagtccatccctcttatatattctattatctttctacacattagcaatgtgagactatctaacatttatgaatagaaattgaatgtttttttaaaaaaaaattaaattagtttgtggggagaagaaagaagtagaaattgattaagaaaacctatttgaatgtggtcaccacctattcaaaatcctaaatatgcacatacgaactgttatgaatatgcatattcatgagaaacattatacatgaaagtgtggctgtacgcgtaagatgtaaataattctgtaacgttcttagttgaacttcctcttgttgagttattaatgacattataggaagtacatagttgatggtggtgaataagaatataattcaagagagttttctaaaattttaattttttgttttaaaaatgtcattaatttatctatattacttggaattcactttttctcatttgttaaataatatgtaaattagtaataatgcttatgcgtgctatccatgcatggcttggcaattatttggcttgagtcttacctgaatcggcttttgtggttgaatgctaatcgtgatcccaatctgctttatagggttgttgcaactacttgtgcggcaacagtttatattatttggtggaattgtaatgcttgtatctttaagcaaaaagttttttttagtttctcatgtgaataatttgattagaatcatacttaaagttagattactacttgttaacaacaggcctggccctgaacataggcgggctaggcctgtgcctagggcccacccagtccaagggtccaaattttttttttcttcttttaaaattatacattttttttaacataaggaaccaaaaaaatttttacctatgacccactttgtttcaaggctggccctagttaacaagaggaatctttttaagagggaccaataaatatttgattttatttgtaatatgtaaataagtttttttgttgttctgtgtgctgatttttgtaatatatgctctattttgattaataacatttttcctttaataaaagaaatgcttatcttttatttgttttttaatttttatctagcttgatttgtatatctagccaacaaatctcattcgaaagtattcctcttcttcttcttctattttgtttttttactacaattagtttagttcaaaaatataaatattagactaaaaagtaagaaacttttggttgagagtgtataagccatcttttgaatattacttgaagttagtggcaagt

SEQ ID NO: 239510 - DNA, 2625 bp, Cannabis indica
ctctctctctctctctctcctatgtaggtcaatggttgtgggagcttttgtcgtgggtggttattaaagccgttcttagctctatagttgttggagccacatatgagaccttatttatttgtgtttcctttatcttcttaaatcattttttaagatttgactatatttgaacttgttctctccatcactaattttgtcagggttatcataggtgattatcggggtcattggcggtgagtggagtttggttttgcaggtggtggttggggtgtgggattaatggcacaaatggatttgggttgtggcttaatcgagagagaatgattagggtttctggaaaaacaaagaagaaaagaaaaaagggaaaaaggaaaaaggaaaagaaagaaaaaaattaattattttttatttttaaatatttaaactattaatattaaatggactaattaaattttaccacgtgtacacttgtgtacagagtggcaatccattttggcacttaacaaatcaaagtggacggaaggagtacaaagcaaaacgattatgtagattgaggagttcagccctcaaaatttcaatctaagggattgatcgtctcaaacttcaaacttcagagagtttggccccaaattacccttttagttatttcaaacttttagttgtataaacctgtaaggatgatatatttatacatgttaacccataaactttccctagtattatggatatcaatgtttgacacgtggcatgaaggatgacgtcacagggttgagtagacccgaacctgggaggggcccctagccctgcgcccaggttaactccgggatctttcagaatggaagtttgggcttcaataacttgaatctaacccactatcttttaatattttgtatcatgaagatatggagcaacctaatccaagcctcgggagctgaaattacatgaacttgcaatctaaaagccaacctgggcacctagagtttcaatttttgggattgtcttagtgcaaaattgccaaaacttgcattaggacatcaactagacatacctcagacatgtttgaggcattagaatcatattcaaagcaagttaatttttagcacccggggccccgagcacccagcgcctaggttgacaatctgtcaatctgggcgccttctaagtgttcgattgaatatccaaattttgcatttaatattcttcatcaaaaatggggaaataactcctttcagaggaaaaataacaatttctggccataaataataggacccagtgcccaggttgatacctagggttggccttgcgcccaggttgacaatttgccaacctaggccacaaaaaatagaggtttttaggaattcttttgagcgtcatcttcgtcttcagataatattgagataaatatttttggggactgaaaaaaatttctaaaggggaaaaattgggacctagtgcccaagttgacacctggggctgggcctagccccgaggttgaaattttgtcaacttaggctgaatctgattcagttcagaaaaaagttctaggcattttcaccgtcatcagaaataataaagattcaagcaaactcaggaggaaaactacaaacctgactccttggatacaggtcccaacgcccaggttgacctggtgctgggcccagcacccaagttgacaatcaactgaggacgctgccttcaattgctcaaatgccaaatctaatgcgaccatagaatctggcatggtcaaaatgggggaggagaccttgtcctcaaattcagaagccttggaagtatcaaaaatagatcaaaagcgcggtttaaagggcctagcgctcaggtcaacaaatggtatggttcgttgggttctacttatatgaatttgatgttgttttgatcgtctgtctatttttcacaagtgcaatgatctatgaagtttgaacaatcaaattcacaacttcatttttttgaccagttgactcacttagaaaatcggaagttttgaatcttttgtttctgtagtaacatctttgagaactagtgaccagcttcgccataatatataaatagactaagtggtataaaactatcatttaggcatctcaaaggacaccccttagacgtttatacacttatacattgtccaggttgacgttagatgtcaacttgagtgctggaatatcaatctggacgctggatgtcaacctgggcgttaggacctgaattgcctttagtaaaatagccataactcactcattttttatccaattgatgtgagtcaacttgcgttttgaagctatttaaatgctctatcaagtcatgtctcacacccacacataattctgaagctatcgtcatcaaaattcaccctcaatggagttacaaaaataagctatgagtaactcacagcaggactcgctgggcaccaaaaattagttatcaccatgtgacagtcagtagtcccgtgatccgtaaggggaaataccgggtaagttgtgcaatcccacatcgctcggggaaggtcaagtgtgatgattctgagactgtgtaggtatgggactgcacagttgaagagagattaaatagattgatcggtactacctatatcaacaaggtgcatcttgtttt

SEQ ID NO: 239511 - DNA, 2092 bp, Cannabis indica
gaaaaaaaaaatagaaaaagaagaaagaagaaagaaaataaaagaaagagaatgaactgaagattaacttttaatggttaatctttcagtcttttttatttttattttactttttaaaaaattaaattaaaaaaaaaaaagatacctaacatgaacaaatggcacaataaaataactaaacttttatatcaaatacaatatataatataaactttcacaatattttataaaagatactgtgtaccagtataaatgtaataaatttaaaaaaaaatgtatatagtgaaaattttcctttaatttatgttttgtgaatatatttaatttcttgtgaaatttaaatctggtttgtgatttagttgtctcctcattggaggcacattccataaaaaaacaaaaaaaaatgaactaaatttagtagttttagtctatttattagagatgatcattcagacatctccaatacaccaaaaaataattttgtgatatatttgattttttttttatgaagtgatatatttgaattacttttaaatattgtattctaataaataataatcctatcattaattttttatataaataataataataaaaataaataaataactacaataataagaatagcataaaagaaaattaaaaaaaaaataataatgatcattctattttaacattttaattgacaaaattattttattgtatatttatatatttgggttaagttgttttgtgatttaaaatatatcttttattgatttatttcattacatgtgtattaagtatcaagctattttaaattgggaaagttagacaaaattagtaaattttaatggaaaagtcaattatttctttttctttatttgcctagccatatttcttattatattcttatcctatattagttttctaattagtttggtcagatcttgtatgaagaaaactaaaataagattttacttttctataaaaggaaagtcgcacttatagttcacgattctatagctatagaactgaaaattcctgggcagactgaagaagaagaatagtgctacctacgaaaaaaggttctacaagtttttaggaggtagcttttcgaatcttgccttgagaggaagaaagcactctaaggagatcgaagggatttcaaaaacttgaagtttcggcaagattcgtttgagaagatagaatacattaaacttgtgacatataataaaagggagtctatttatgcataaataaattactatgtattttttgggacctatctaatgaatcttatctttgggtgtgtccctgtggactagtaacaatcttgaagaattgttgacgccatgtatcaaaactttgtctacttttatcttttctacactgtttatcttctattctactttgcagttacaaaatcgtgttctgtagctacagaataactatttcagtaccaattttattattctgtaattaattaaattaattaataaattggtaattataaaacacagaatttcactctatatattttcaccccaaaatatttctttctttattaagagttatgaaactccatttttaaaattaccaaatgaaattaacaaacaatttcattaatgtaaaactattgtaaaattgtttgaataaaattaaaatctactttatcagaaattgaatttgatagatcaaattaatactgtagaaattaaaatgatagaagatgttttatatgtggtatcagcaatcattcttattgacctcgcttttagttaacgacagtgagtcaattattaagcgattagaaatgaaataaaaatagagcgaaaaccaataagcaataaagaataccagattttgaagaggttcatcccctttagtatggtaatagcctactcctcttatattgtattgacttgagaacaaagaactcaatgttttctctctcaaagctcttacaatgaaatctctgagtaattttcttagatctctctctaaagaaattctttcaatccctttccagtgaagctagatcactatttatatagccttaatgcatgagggaaggtttcccttttgcttacaatgtctataataggaagga

SEQ ID NO: 239512 - DNA, 2839 bp, Cannabis indica
atgatggaagtacttagtgttacgatcgccgtgagcaagccaaagatcccgacttctttgtttccataaaatctcctccttggcctcggcaacattaagctctctttcattccttcgtcggttcttccaatccaactctccaacaaatgaagaaagtttctttagctcctctttgagtttctttgttctagcacccaggtccacttttttatctttgttccaatcgtgaagcacctctccacaatgattaattctcccccgcagcccctaaagagtaccccaattggaaccatcaagccaaactgattcaacaatctttccacaatcctcttcccccacccaagcttgttcatagtgaaaccaagatctccatttaggcaccatggttggaagttgttgttctttgctgaaactaagcttcaggggtcgatgatccgagttccaccaaggaaggagagtgactttagaagcccgaaatcttttaaaccaatccgggttggccaacaccctatccaacttctcaaaaactagattgttgtgtcgcccattacaccaagtatactaacccctgtccatccaaatatccttgaaattgcagagagaaacactacaagaatgccaacttttgcaagcgctattgggtaattgcgtcggcattagttgacatttgacggtgcaagtcaacaaagtcgccagcaaaggaagtcaacattttttgcccacctcaaccttttaccggcgactattttcgctggcaatagaaaatattgccggcgaaatgcaccaattgcgccggcaaacgtaagagccaaatccatcttctgaaagtcacgcatctaagagtcttgtttcaaacatccacgtttcttttcactagccttaagaatctcattatagtctcctccacaaatccaagccccctatctcatattacggagtctctccaaaagctgccaggagcttttgctaccacccggatcagggctcccatagaaaccagtaaatctccaagcaaatcccagaccattctccactatagcatccatatgagaaacagtaaaatatttcacactaacctcaaaggggtccttccacaagagagccaacccaccacttttacccttggcagccactacaaaatagcaatcaaaacccaacacaatttgaattctctccatcgcttcctcttttagtctagtttcggataagaaaatcatccatggatgatgatccttcacatggtaactgagagtcttcaatgtgcaggggttcgcaagcccctgaacattccaaagcaggatattcatggttctcggcgacccagttccactgggttcgccacttccaaagacactctagaggccaaatcagcaatgttagaaattcctcctggtacaaactcctccacctttccttcctcgccctctaccgattccttcttgatggccatagattgaggggtgttcttagtggcaacctttttgttcttcttggccaccactttcttcctccttcccccctttaggcatgaagtgccacccccgatttcattttcaaaagtaattggaatatcaatccactcacccccttcttttgattgccttgcttcgattccgattgcactccagagccttctatatgaactctcttccccgactgctgtaccactccgtctcccaaattcagaaaatcccagctgtccgcccttctcttaatcctcgatcgtccctcaccctcaatttcactcattctccggctgtcttcttttctaaccatcagtcccacaccctcaacagacagaggagagttagaaacatgtaccttcttcctcggagaatttcgattattgatcctgggtaatcgctcgtccccctgatcttcgcttcgagcctactctgaaaccgagatcgaattacccaaagtttgatccctattactcttccccgaaccagcaacatcttgtgattttcccaatgatctactacgggtcaaatcgtctccataagcaccctcttgggtcttcctttccctaaaccccaaaggtccctcctcaattttcaaccacgcaccataggccgctgaactcttcccctcaccatttgtgatcttcacaggattcatcgcacacgtccggtagtcatgtcccacacgcccgcagttgaagtacataaaaggcaaccgttcgtacttgaatggtagccaaacacggcccccagaacagggaaaaagaaaccctggacaaatgggttgatcaatcaaaatccaaaccttgaaccagaaaaaaacaattcaaagcaatcttagtcacgtcttcttgctgaacttcaatgatctaccccgccattccagctaaacgcatcatattattcctggttattgatttcatagggaggcttaacagtctccccgaaagaggaaagcaggtcaattcatcttcccactttgtcagaatcttggaatatctctgaagaagcaagactccattattcagcagccaaggtgacttgttcactattcttttcaaatcattttcgttcttgaaagagaaaaccataaaagtggcctcagttgtgtctcgtttgattttcattccacaatctacttccgctgatctccaaactcttcccaggatagttcgaatgagagatctattcacattcttgttagagtaaaacctttccataaggcaagattttcccacctccgtttctctatcttcattaacttcccagccatcttcatccaaaacctttaagttactcgtgcgatcaagaagatcctccatggtcaggtcaggcgtgttaggcattcctacaggaaaggctcttctcaaagagag

SEQ ID NO: 239513 - DNA, 2401 bp, Cannabis indica
aaataaataaaattatattagtacatacattttaaaagggtataatatagaattttctaatagtttgatattactaaaaaaaaactaaatatattaatatatttgtttctttttcctttttttatacattgtctttcattttaaatacattgcttctcacttaaatacatttcaataaaaaaataaaactagtaaaattataaaattatctctaaaaatatttatactatataagtaaagtactataaagtatcaataaataaaaatttattctttttaacatgttacaatgtgaaaagaagttacataaggggtttttttttttttttttgtaaagagagttacataaggggttactagaggttataatgacaaaaaataccttctcctacagtaactatattttgtcgcatttgaggtgtgtcacacctctactaaataactccccaatacataaatatgggatatgagtttatgagtatctctgccacccgttctggaagtggaaggacaccccatagagaaatggccctttatttttctgtttcaccattttcgtcgctgaaaacattacctaccctccctcaactctcgtccggtaaagccccacgtgccaaaaccacactgccggccgatcaatcacgcctccaccccaatgtcgaaactcggagctccgaccactctttgcttactggttcgtcctgcgcctgcggaagaagggtcttcattaacgcagctgccacatctttgcttcccatttgctccgccaaagcttcccattacacagtacgatctttcactcacaagctgtaatatctatacatctaacctcagatttgcttcattttacacaagtttttgtatttgtgtcagttctgcatttttacatatgtaggatacgttgaaaaaaattcaccctccgagaccagattggtatgaagaattctatgcttcagttcttgatacgagcatgaaatcttatgaagctgaggtgagttcctaatatctttgaatagtataatgtttaaattttctccaaccctcaattttgggacaagaatgaaattttttcaggattgattgttttggttgatggtatatacatattggtaagattgcaggttacaagtctgagctgtttgctaatttgagaggaaaggctgaaagagtggtagagattgggattgggacggatccaaatcttaggtactatggtggagataaaggtgtccaagtttttggggtggatccaaacaaaaagatggagaaatatgccaagtcttctgccattgctgctggtttgccggttcagaattttaagtttatacaagcagtatgttcaatttgtcatctgaaattgcattttgtgtttgtttgtcttagcaatgaaccataagctttgtttttgagacagctatatatgaaaatgttatatcttaatatgtgactatgtgaacttgtgaagtaggaccaatggaccatctctacttcttactagctttctaacccaattatttaattattaatagtataaataatagtttacataccaagattgcagcagcaagttagtgctgttttcctagcttatatatcccagcactttttgactttttatgttacattacaatcttttcttaattaagttgattttaaatgtccatcaaatctttaaatatcattaccatagttgtggtgaaacagcaaaaccagttatgggatagaccatagattttctcagtaatgccttttttggtttaaaaatttgcaaatacattgaaacatattaaagctcttttccattggatatgtatgactaatacctgacataatttgtttattgcattttactttttcctttgtaataacttcatctgcacaacttgtcttatcttatcataataatgtagacaaaaaattataaaatggtatcggttaggtttaaaggtaactaaccaaccttgtaggatttgcttataaaacagtcgggggggaataagggaaacacagaaaacttggctctgctagttaagtgacagttttcattttgatacccatgagggagaaaagccttagattatttggttttgaagtgaatctttattctgatggcaagagtcattctgaagaaaacagaagtttgatgtccatagatgaagtcggttctgaagctgagcatactgatgcgaaatcagatggttcagtatgtcagctagaacaaaagaagcatagatgtgagttctgtcacagagacttcatgaactcacaggcactgggaggccaccagagtgcacacaggaaggagaggctaaagaaaaagagaatgctactacaaactaagaaagccaagctttatcctcaaccaatgctatatagatttttcttcttctaagttagcttt

SEQ ID NO: 239514 - DNA, 1545 bp, Cannabis indica
tttttttttgttgctaaaatttaatatgtaaatgttatatggatcaaaatagaataaataatttaatcgataaataatttaaggctaatgttaaggacatgtaaatttcaatgatgaccaagtggttaactttgattcaatttttgattacatagatgcaaatttgagggttttaaaatgaatgatgcttttgaattgtgcccgccgaaatacttgaccttacaaatgtggcaaaagcaataataaaccagtactagtcactttcaattggaaaataattaaacactaagaatgaaatataagaaccctttcttacttgttgctggtcctagacctcatggccctgctcctatttaaatgtagaattttttttatattcataattttgttgttgcaatgttgctggtccttgtcctactttttttttcttctcccatttaaaatttaatttaataatggagggctaccttgaaaatacatgtgaaggaaatcagttcacttgaatatcaaactcgaggcaccatctgaattgttattggtcttagtttgatgtggttgatgtcattggacataaatttaagatcatccattagtaacatattattggttgccaactcacacaactccccacttgtcacattaatgcccataaaacaattagtatctcatggtactatgtcccggcataatgaccaaatttggattttctatgtgcatacataatttatgttggtaatacttttgtgttttattagaaatacaatatccaaatttaacatcttcactttttctttcatcatatttaccaaaatttttgaaaaataaatatttaagagcttaaaaatattaaaatgcatacataaatcagataaatttttttttacgtaatttaggtgttaattaattttagtccatgaattagtctattagtctcaaaggacttatttaatgtttttaaattattttagcacgaaaccctaactctgtattttgtgtttctcttgacaaagaggaaaacctacaataatgtgagcagagtttaggttcttaggttctgtcccccttcgtttgaaaataggaaggtatttatagactaaaggcaggtatgtacatgtccatgacttacctagggtttttgcaaaaagctcaatattaaagtaaaacatatgcaaaaaagagctgactgttaggcctttggagggatttgtgctcgtgcattaaaatagttcgacaataggggaccactgtacgccatggacacgtgtcgccagaaggtttaacctttaaaagtaaatgccagggataaccgtcaagcaaaaaagtgtgtggggtgtgcacactgccatgtcttggcacaagggacaagatctaatcttatgtcaaaaaagcataacagttgttgggtgatccgaattgcatccaaggtagacgcctgtgatactcttgggcagtcagcatccgcgatatgccctttaagtcccatctaggtatcatctgggcagactttgagtttggaccattgcaggttcgagaacggtaataggt

SEQ ID NO: 239515 - DNA, 1213 bp, Cannabis indica
aaaaattaaaaattatttattttttttttacttttttttattttctacagaaaccctcccaccctcgaattcgaatcaattcgctaaagaatcgagctccaatttcaagcgatcgcattgggaaaacccaattttgatgaagaattgcaatccgatattatctaaactaatgaagcataagcacacatgggtcttttacaagctcgttgatgccctagccgaggggctccacgataccacgacataatcaaacgcccgatggatctgggtaccctaggaggtctgactcccctgaatcaggagacctaggtgagtgatctcgatactcttgctgatgaaaccgataaggtaaatgaagaaggttcgaatttgcagctggatcgacgagaaggcagtttcggggctgaggatatggaaattgaggatgagcctgacagtagcgtggggagtaagttcccagagtcatgtttcgtaaggggaatgaagagagttttgaaccaagggttaggggaatatggtgatgaccacaagctaatggtaatggcggttcattcagttcttctagaatctggttttgttgggttcgacttggtttctggtctttaaaattggaaaccttctatggcattttcacctcagtttcactataccttgcctgagattctgagaaaaaaatgaagactctacttcacaagtgattgaaagagttggtttaaagtttcagattacgggtcattttgtaattgtatttggatcattatctagtggtggttcagggtcagattatgtttagatgaacacaaatttgtgtcgagtattggtgcactatccccgatggtgattctgaaagaacagtttacgaattttggaaaatttttaaggacaagcttgtatcacctctgttgattgatctttgcgcaaaagcagggttgccctcatcaccatgtttctgcagaaaaaagaagaagaaagaagaaagaagaagaaaaagaaaaaaagtaaaaaaataattaattttttaattttttttaatttaaaaaagtaaataagaattttttttttttgattttttaatattttaaataatttataattttttttaaactaatattacgtgtacgtggaccactaaaaacttgccacgtgtacaagtgtctacacgtggacagcccaccgtggcacttaactgttatttttggacggaggtgtgcag

SEQ ID NO: 239516 - DNA, 2094 bp, Cannabis indica
agggtttagtcaatgtggagcagcccccgcgaaccacgactgactctagtccctaatattatgctggggaaatagggctaggaattgatgaacctcatgtgagacttgggagaagactttgaattggccagacttagagaggttgtatgccaagtcggccaagctgaagaaccacacgatgttggttgtgatgcatttgcacaataaagacgcaaatttctaagataaatggatgaccaggagtacattttctgatctcatcaggtggagatggaccaccataacaaggaagctagtgacctgataaggtgattcaatgaaagaagtgtcaagagaggtcaggatctgattagagattctctcaaagggaaactcatcgaaaaattgggcagggtccacaggaaaacagtccaactaagctctttaggaacgagaacgaacttccccctgcctgaagatggacaagtcctgccacacagatctagtggcgggagtagccaaactctggcacctgctgccatggcactactacaaaactcacatttagcgtcaattttaaagtgacacataaagaatgtctaaactgaccctataaccacagatgcaaatattgagattttcgcttcattcattaaccgacgccaaaagttttttgcttcagttcataactgaagcaaatagtaatgtactgacgccaaaaggtttctacttcagttataaaccgaagcgaagaaacaaaaaaaaaatctgaaccgccaccaccaccacacctcatcaaaccaccacaaaaacccatcaccaacaacaaatattgccaccaaaccctatcggaccaccaccaaagcccatcgaatcacctaaagtaccacatcgaaccaccaccatcccatcggaccaccaccacacgcctatactgcctacaaaaaaaaaaaccagagagaaaaagagagagttcagaggagaaagatagatcgtaggagaaaaagagagacattaaaggagaagagtgagagagagagaaagaaattaccttcgaacggtcgtggcggcaacgtgtctgagttgttgggggtttccactacctgcgatggcgacttggctccgatttgagctgagcggtttgggactttcaaaaataaagagagagaatgagagttgatggagaaagaaagaatgttagaaatgggggaggcgactggggttactaaatctttagggttagggttttcttaaatgggcccgaagcccgttattatgtttgatttttttaagaaaaaaattaggaagtttgcgtcggttgtgcactcaggcaaaaagtgagatttttgcatcggtgcacaactgaagctaattctctaaaaaccgattctaaacctgcgtctgcccataactaatgtcataaccgacgcaaaatgtaatatttgtagtagtgtggggatcgtctaggtatctctggctctttaacacccccacttagccaacctttggtcatcagccatttagtagtgcacctttggccaacctacaaactgagattcctctctaaaccatttgggagcaagttgttctaaggccaatctttatccagctaggtttgggaacgggtggaaacaccatagacaacatcaactcgaggagtgagaatcaaagtgatattgttccatcattgaacaatcactttagacaattggatccaccaaacccaagcaattaatgtgatcaacccctaccaacacactgttgcatcggccaatcagcggagcacaagcagtcagtcactacccaacatagggctagttggccatggccagttgtttgacccaggcttggctgaccagagtctgattccaagcctggggctggtcgaccatgaacataccctttcccagggtatggacgaccaagtcttggctaacccagggctacatcccaaccaagaagggccactcagccaggctcctacagcatcagatcttttgtgcaagcacagttggaccaaataagaaatatgataaagggcttagctggcccaaaaccattagaccttgaactagataggtcaaggggctctccattctcagcatacatcaatgc

SEQ ID NO: 239517 - DNA, 1097 bp, Cannabis indica
ttttctctcaccaacccaaacacccgtttcacctgcttctccaggtttagctttgacaccatacaaagatgccaattcaatcatagttgactcaagtttctccacataactcctagcaccaagtccaatatcccttaacgaaacaatgggatacaatatcgcttgatgtggaccgtgaaaagttatatcccctcccctcaatgtatagcataattcagctcctatactttttaaatcagactcgggaatcagtaaattgtgatcagtccttcgttttccaagggtatatgtaggtgggtgttgcaaagacaaaatagtatcgggaatcttattaactttcctagcacttaccagtttgtcctgcagtttatgagcttccaaatagttgacaatgcccatcttccatacctcgagatttcgaggacctctcattcccctgtatcacagtaaaacttcaatattacaactcggattaatgggcatgtgtttctttcaattaaatttttgttttttgatcacatgatataaccactcatcactaccaaaaacaatattaaaagactcaaattctacaaatggaaaatttaatggggtccatgaggaacacaatttgtttatttatttggcacattagcatcacatgcctttacacctatttaaaatataagggagtttcactactaattaccttatattttaaataggtgtaaagcatactcatatatgacttgtaattcaactatatgaacatagccaaacttgaaagttcgtgtgctaaaaattgagccaaaaacatagctgggaatagtgaagtaacacattttaaaacaaagtgtcaactcaataatgatgcataagaacataaagtagttagaaagcaatagtattaagattatgattcaagtccatcaacacacaagaaaactttagttggtttcaaaatatgaggattgaccaaggttgaacatctacttcaatttcaaatcattaataacatgaataacaatcttaatattttcttgttatatacataatcaacgaaagaaaaagaaatatatatcccttttggcattaagttcttactcaatcacagagag

SEQ ID NO: 239518 - DNA, 1786 bp, Cannabis indica
gttggcagcaaccgatggcagcaactggtctcaaaggtcttatgctgaagctagtgagattaaagcaccaacttaaaaagttcaaccatgatacaatcggagatattggtagaaagtaccatgaagctaaagatagatatcaagaggcctgaatgcttgcctaggcccatccaactgaccttagcttccagcatgatgaatctgccgctgctgctaattttagtagcctcgagaaaagctaccacaattttcttaaacagcgaagcaaggtgaactggattaaaaaaggagacgctaacacatcctattttcatgcttgccttaagaaaaggaaagctgagaatagaattgttagtttcactaacaatcaggggttgcaagttgataattttgctgaagttgttgagcactttatgagccatttccgaagctatatgggatgtaacagcagggttggaaggaagatcgatctaggttgtatgacacaaggggctgttctttctcttgattaacagcttgagattctgaagccgttcacacccaaggaaatcaaaaaatctctctttagtattcctgactcgaaatcgcctgggccagatggttatggttcgggttttttcaaagctttatggcctcacataggagctgaaatttgtaaagcagtagcagatttttttgaaaatggtacaatcccgaaggagctgcatagaacaatgatctctcttattcctaagattgagaacccgtctagagctgttgactacagaccaattgcttgttgtacaaccttatacaagtgtatctcgaagctaatgtgtaccaggttggccaaagtgcttttgtcgataatcaatcaaaatcaaggggcgtttgttcaaggaagatcaattgcccacaatgtgatgatccttcaagacctcctgaaaaactatagaaggaagaattcttcgcccaggtgtgctttgaagattgacattagtaaagcctacgatacggtggactgggattttcttgaagatctccttaatgccttcaagttgcctaggaaatttgtggaaagggtgatgatttgtgtgcgaaacacttcttacaccttactcatgaatggtcggatgcaaggtagctttaatggggctaaaggtcttcgacagggagatccgatttcccctctcttgtttgtgttgatcatggaatacttgactcggttacttcaagctgcaactcaaaaatcaaaattcaggtaccatcccatgtgcaaaagtctaaagcttgttagtttgtgctttgctgatgacttaataattatgagcaaagggactagacaatgtcttcttgtgattaaaactgttttagatgagttcagaaatacaacagggcttgccattaagtcccacatatactttggtggagtgaaagatagagaaaaagatgatatcacagctaatttgactcttattgaagggactttccctctcaaatatttgggagtccctctgcggccaacgaagtggaaaattgaagactgtggtatcgttttatctaaaatcaagcaaggcttacacacctgggctagtagacatctgtcacatgcaggtagagcccaacttatacattcagttctgcttgggctccaaaactactggatgagtatttttgtcctccctcagagtgttataaaagaagtggaaaggttatgcagatgttttttgtggggcactaaagatgagagacttaagattcacatgacttcttgggagaaagtgtgccttcccaaagcttatggagg

SEQ ID NO: 239519 - DNA, 2862 bp, Cannabis indica
cttgatatcaagcaacaagtgagcctgatctgtcctttttgcaagaagggtgtgaatgaagcattatttgggattcagttgtccaaaagcccgggtcccgatgggtttggtgccggctttttcaaagatctttggagtgacattggagacgatttctctagtgcggtgttggggttttttcaatctggtaagcttccttaggaagtgaatgaaacatccatatctcttatccccaagattgataaccctcaaggagctagcgactacagacctattttctgttgcacaacaacatacaaatgcatctcaaagatgatctgtactagactctcgaaagttctttcttggctaatacatgagaatcaaggtgcttttgttaaaaagagacttttagctcacaatgttttgattttgcaggaccttctccaaggttacacaagaaagaacatttcttctaggtgtattatgaagattgacttgagcaaggcctatgatacgaaagactggtgctttgtggctgacctcttaaaagctctttgctttccttccaagtttattacttggatcttaagctgtcttcaaggagcctcttacgccctattgtttaatggaaggattcaaggctcttttaagggtgaaaaaggtcttcgccaaggggacccgatgtccctgcttctctttgtgttaataatggagtatttgactagacttcttatccaaagatctgagaagaaggggttcagattgcaccctctttgcaaatcattgggccttgtcaacttatgctttgcggatgatctcataatcttttgcaagggtaatgataagtctgttcagttggtgaaagaggctttccttttattttgtgatgctacaggtcttgttgccaataaggctaaatcaacagtgtactttgggggtatctcaacttcttgcaaacagagacttgcgaatattttacaaatggaggagggatccttccctttgaaataccttggtgtgaatctaaggccaaccaaatggtgagctgctgactgtggtattatcatcgacaaaatgcataagcacctgaacacctgggctagtatgaacctctcttttgcagggagggctcaattgattcattcggttctccttggagtcagaaattattggatgagtttgtttgtgcttcctcagaaaatcactgcggctattgacaaatattgtagggactttttttggggctccaatggaaccagaagaaaaatgcacatcccctcatgggagaaagtctgtcttcccaagaactctggaggtcttggatttagagaagggaagaaatggaacatagctcttatggaaaagtatatttgggctatatcaagtaaacaacacaatctttgggttaggtagattgatgcgatttacttgagaaggttgagcttttggacaattgatttcaaacaagacgcgagctggtattttaaaaagatccttcgtcttaggtcaactgttaatgaatccagaatcatggctgctgttaagagaggtaaattcagttcaaaattgttttatttctcttatatccaagctcacactgttgactatgctagaaacatctgggatagaattgttcttccaaagcataggttcataggttggcaaattgtgaatgaccatctgctaaccagagacaatatcagcaaatttatctccatatcctctgatctttgtccggtctgctgcttggaaaaggagactcaccatcacctgtttgttagctgctacttcacccgtagagtgatcattgagataacaagttggtgtggacattttgactggccctctaacatcagagagtggttttcgaattcttccaacaaccagcaggaaaaagtgctcaatacagttgtattggcgaccttatacactgtttggacaaatagaaattgctgtatctttgagatgaaatgtaagacagctagaactatgagtaaagagatcaaatcttgtgtaaaaaccaggtaattaagcggctgtattgggggaaaagggaagcttgatagctatatttttaatgtaatctcaagttggctttgagggctgggggttcggccagcagccttgttttgcttgtgaactgttttttgttcttgtctgtttgaataaagaatcctcttcttgttaaaaaaaaaactataattagaattaaaaaatactacatatataaggtattcatagaacaaacaataaattttataccaggtaagaaattaatatttatagatatttaataaaattattttaacataaattaaaactttaatttgacttataataataactaaatcatataaaaattaaaacaaaatttaatatcaagatttagtcaatcaataccataaaatttcaaaattgacacaaaagagagagaaacttactataaaaataatttaaaaaataaataacaataaagaaagacaaataatatttaaaataattaagaaaataaaaataatataaaaaccgtttttataaaaacaactaaaattaagaaaattaacatctatatttatgggtgactactcaatggttacatttttattataaccattatggttacatgttttttacctgtaatagcatgttactaataggtaaaactttcttttttcaagaatcaattaattgtaattattatttttttaaaataattaattaaatatttaacaagacttcttttagcaattaatatttataaataatttttttatataaatccatactataattattttaacaattaaaccatttaattataatatttacaatgaaactttatttttttttactaaaaagtaaacttctttttacacaaat

SEQ ID NO: 239520 - DNA, 1652 bp, Cannabis indica
gtacataggtttatgggtaacttttggaagactcttccttcgagttgtgctagggttttttcgtgcgccaccatgattcaattatcgttgtcgtcgtcgttggcattcggcgttctcgttccttcgggatccgtaacccctggtgaccgttgctctccattacagtcctcttgaagcctgctggttcacgccgttaacggcttcgcacatcaacagattgacccagtaatcatcactgcctacttcgccattctacatctagaccttcctcaagtaggtatgtatcacttccaccataaccctttgcactatgtcacttctgttattaatgttgttgtccaaatccgttttcaacccaattttaaccctaaccgaatttcccctttcatttcggcaccctttttccaaaaatagaattaaattaccatcacatctttgaacctccctggttactcatcattgctctacgatcattaaagcctccatcccctccaagcatcctttggaagtttttagggggcactgacagaaactcaccatcgagctctgctttccctggtttgcagagaacttcattaattttactgcatattgtggtaatgttttctcagtggtgcttgagtaattccttttgtcacagatcctcaccaaattctcaaagccctctctgtgccttgattttagctgatacactctccattataaatataacgacattatataaatattcctcccattcagtttattcttgcccatccaatatcatccctcactgccctgtaacccgaatacctcacctccccaactatcatacacctttattctggttttttctcccttccctgactgaattttccatggaagacctctctcaaactctcaacaccactctcaatctcactgactctaaaactaaaatacactccctctctcaattacccaaagagcctgaagaagacgcaggggaagaaccctttactttccttgcagtcaagttgctaactaatcatcatttaaacaaatttgctttcaaaaaacgccttcaccaaatgtggcctggacattactccatcaatgttctggtgaaggaaccaaatttcttcattgtagaatttggttgctttcgtaatcgtaggcgtgttcttattggccagccttggcattttgactacaaactcattgttatgactccccttgaaatcaagtttactatcactgccgacatctcagctcaacacccttttggatccaagtctttggaatcccttttcttcatcgatcacgggctttagcacgaaagcttggtgaaattctcggtcgctttattgaagtggacactgcctctcttaaagaaacatggggcccttatctgggtgcgaaaagaaatcgatgtcactcaacctctccctcgtggaaccggtttctaattcaccaatatggcttcccctatttggcttgagtttcgatatgaaaacttgcctgatttttgccattattgtggtcaactgagccacattgtgaatcattgtgctgagtttctgaccaaatgtgattcgtcttctattccccccttgtttcgctatgatcacacccttggagctaaagttcgtatcacctccaaccctgttgggttttgtgccttaaataaaact

SEQ ID NO: 239521 - DNA, 3107 bp, Cannabis indica
gattaagatccatagacctaagatcaaccattgatattaaattagaaagatataacagtaagtttatgatatcttatccaagatcaatatcggtcccttccaatgtatactctatacatccgatactggtaaactttaccaataccctggaaatgacataacacttatcgaaggtgtaagtataccttatcgccgattatcatgtcactctaaatctaatgaattaacaaatcatgagaattaaactcttgaacatttaatcatgattatattacattgtgctgaagacactataatcatgaacaagtatatacatttatatatgttctagacttaatagaatttatacattaaatataatcacgaaataaatcatatgaaccatgcaacataaaagaaatatctgatcttatattaattactaaatctaataatattgaaatgagttttatttagggcacaaaactgaacatcttatagaagtatcactgcagcaagaataccctgaactaattaaatttaaagatgagaaggggtacaacacgaccatcgcagtctcctatgagtgcaagcctatagtgtgcagccattggtctggaatggggcgacttagatgcagattgtaggaagaaaactgaacgaaaacaagaatagatggtgaagaacccacaaaaaaaaaagataaggcagaggaaaaggaagttaatgctgatggttttcaggttgtgatcaaagggtagaaagctaaggataaatagattggcatggcagcaggcacaagcaatccatttcaagtgctgcagtagaaagaaaatggaaatgagaaaactaagcaaagtgaaaagaagcaagaataagaggttggggatgttaacacaggagggggggggggagatccctctcttgttaatggataaaataatgagttagaatgtctggggaattaacaaccaacaaaaacaaaatttagtcaagcaattgattggaaatccaaagatcttgttggttggactcctcgagacaagagttaagactcagaatcttggagccttataagtttgcatgttctcaaggtggtgttttacctctaattgtgcttggcataagtgagggaggataattgtaagttggaaccctcatagttttttagtgaatattttgaagtgctctagtcaaatgattcatctctatgttaaaaccatagataggaaagaaattttttttgtcacctttatctatggcttcaatactgaggataggagaaggactctctggaaggacttaaaagatctggctgtgaaggagtctttgcttgtgctaggggattttaatgacatcctcaacaaggaagaatgaattggcaatagagttcgatacaaggtgtatattgacttcaatgagtgtgtagaaacatgttagttggaagatatccaattcacaggaaaattctttacatggagtaataaacagcaaggggaagataggatatactccaacattgattgagtgttagcaaatcagatctggatggacaattttcctgctgtagaagtttatttccaaaatgaagatactttcaatcactcccctgctattttaacagtatacaatatgaattttgggagcaaaaggccgtttagatactttaggatgtggtctaatcatcctaagtatgatgaaatagtatttgaagtgtggtctcaacaggtgaaaggtataaaaatgctccaggttgtgtcgaaactaaggaagctaaagttggcttttagggctctaaagtagcagctgcagtgaaagcaaaagacatgctggattattgtcaagataatctgagaaatgatcctttgaatgatgattcgcaacagtaagaactgactgcaaggaatgcttatgctgaggctttggacaattatcactcttctttgcagcagaagagtaacttgcaatggctaagggaatgggatattaattctggttttttttcactctttaattagagctagaagaacacaaaacagggttctctccatcacaaacttggaaggaataagagtggagaaaccataacatatcaatgattctttcttatttttttatcagaagctgctgggtagtaaatttgcagacaagaaattagttgtggctagtgtcatcaattagggtcctatggtttcaaaggctcaagttgatgcaatggtttctgatttttctgttgaagaagttaagaaagaaatttttgatattccagggaacaaagcaccaggcacggatggctatggaagtttctttttccaggacaattgggaggtaatcggtcatgatatttttgaggctatcacttcctttttgcatattgggcaactgctaaaggagcttaactctactgtgttgactcttgtcccaaaaaccatgtgtccgaacacaatgagtgactatacactcattgcttgctgtaatgtgttatacaaaccagctactaaattaatctgctcaaggattaagttgattctttctaattttgttgcacaaaactaaggaggctttgtacatggaagatttattggccacaatattatgatctgtcaagatcttattaggaactatggaaggaagacaagtaattccaactatatgattaagctggatctttaaaaggcgtatgatacaatcgaatgggacttcatggaagagatgctacatgcattcaagttccctctcaagttcattaacctagtaatgacttgtgttcaaacacaaagattttctctgatgatcaatggctccttacatggatttttcgaggccaagagagggttgagacaagagaacccaatgtctttgcttctcttgtcttaggcatggaatacatttcaagaattatgaagaagattgggaaaaagcaagagttcaagtttcatgagagatgtggggatcttgagctaaatcacttaagttttgcagatgatgtagtgttgttctgcaatggagactttaagagtatctactacatgctgcaaggtctaaagctttttttctcacacatcaggatggttacctaatccctcgaaattttctctctattgcagcaacatgttagatgcagatgt

SEQ ID NO: 239522 - DNA, 2802 bp, Cannabis indica
gagttaattaattgctataacttttttttgctcctcacagaagtgtagcactctgggctccaaactgatcccctcgtatttcccttacttcgcatttataagggaacttgatcacttgatggtaagacgacgcaaccgccttcattgcatggatcaacggctggccaaggatggcattatataggtcgagggatagtccacaatcaagaatttaactgacttgtttactccattcacgtagacaggcaattggacgaagcttcgggtgacagcgctttcccccgagaacccaactaatgtaacttaagtatcttgggcctttaggtcctcgatctccatttccttcagaaccccaacgaataagatgttggttgaactcccagtatcgactaacatgcatttcattcgtacatgggccacatctaatgtgatgacaagtgtgtcatcatgggggtgctctagctcggaggcctccccttggttgaatgatataagtatgtcaggtccctcattaccgattactgccatcgctttcacagagtgaatccggcgagtatgggctaatgatgctcgcaccgaattccaacttaggtccgaccctcccgagattacgttcacaatctttttaatgtatggtgggaggggttgatctcttatcgcatccctgctggacatgtagtgttgaatctgtggctaggcaatcccggaaaaatccttctcttgccagcctattgacctcgatcttcagtggcctacactcataggtagcgtggccatgctccccatgaaaggcgcagtatcggctcttatctcttttgtcagggtcggtgttcattttggtgggccactttgtttccttcattccccgcagctgcctcatcatctcggttaaagtaatggtcatccgaggtaactcctcctcgctccactgagtatttggctgcctagtttgtcccatactcgcaattactgtccctcgggtgtttctttcattagccgagcaattctcagtcctattgtgaggtcgtacagctggcattcaattttttgattcgaataggaacgtatctcccatcgccgacatttcttgacacacctctttagcgtgttgtttcttttctacctctagagccacgtacccccgcgccatggttagggcccttgttagtgacaggccgggttccactattatcgtcttttttaactccgagccatgcagcaatccttgcattagcactttcgttgccactgaatcagtacacttcgggatactgacatattcttcactgaacctgttaatgaatctctccaaaggttcatcaaatcgctggtgtattaacatcagatccgtatctactttcgcagtccagacacttattgcaaagtttgtctggaaccttaggactaggtcttggtacgagtttactgttccggacggaaaggttgtggaaccagcgtagagcgggacctcttaatccctgggtgaaggttttgcatttgattgcttccaagtcttccaatgggatagaaacagttagcattttctgttcgaattagcatacatattctgatgggtcccctgtcccgttataccctggtagctttggggctacgtaacgtggtggagcctctatacgtaaaatatgatttctaaaaggtgagaaggttgacccccttcattcaagcccattcactgtgtattcccatctagctttttgcctccaaggctagtaacttattccacatcatttcttgcagcttttccgtttctctacttgccattgatggacttctgggaatcatcggctccatggttcacttttgcggtgccattcgaagtccctctacttcagttaattcctccacctcgtccctagctctcctttgctggttttgcggatgtattgaggcctctaacaccgttggatttcccttttccccaggttcttcatgcatgcaccggatgcggttgcctgggtggttattgttggcgtggttttctttctcaacagcttctcccacttgatgattgttggtttcttccgcatgcgggggcgctggtatctttcgagaacaactttcatctgcccatttttgctttcaagcctctgattgtgttctttttggagggcactttccgcaccttgacttgtcattttcccttcttgttgctttagcctttccagaatctcccggcatggtgggattgggtgtgatgcatctctattagcgttgccagtgttcatctgggtttcgtgagtgttgtttggatcgtcgtgaagaacaagactttcctattcattcgccatcttctctccttctttttggaacttgcctttttacccaacttttctactgtctttttcttttgccttttttattctgagatcaatcatcctatgaaaaggttttttcttgcaaaagaagaaattttagtttcccacaaacggcgccaaactgttttggtcaagaacagtcgtcatttgttttctctgtgagttctctctttttcagttcctaatccccttttcttttacgtgggtcgcttttatttatatggtacgttgttttgattgcatgggtaacctgctgtttacctactctcctcttgacgcgtgtcctttctttccattccttccaccttgctacgtgtctgcgtttgagccaacagctatttttattattgctctctcttggtccgacggtcttatatccttctaggaagtgcttatctgtccctttaaagattatacctattttctctgttgggattcctgtttgatgcggattgggtctcctccc

SEQ ID NO: 239523 - DNA, 1852 bp, Cannabis indica
tagcaacgagctgcacagtacatgtaaaaaatcacgtaatacgcctatggtagttagggtgttacagtttttgaggtggcttcaggtcagaaagtaaattatggtaagtcatctatcttcttcagctcaaatacacctgttgcaactcggattagactatgtgggacgatgggaatgatggaggctgacgaaaattctagttacttagggctcccaagtaccatgggaagaaataaagatgttataccggggttcttaaaagagaaattgcagcaaagaattcaacgatgggaggggcgtttcttatctaaggcaggcaaagagattcttttaaaaacggtgctctggccgttccaagttatgctatgtctgttttcttgttgcctttaaaaacatgcagccaattggagcaaatgatggccaaataatggtggcaatcgaattcaaagaaggctcgtggtgttagttgggtcagctggtcacggttgtgcattcataggagtgttggaggcttgggattctgtagtcttcgggatttcaatttgtcacttttgggaaagcaagcttggcgtttgctgcagcaggaaaactcacttgttggtcgcctcttcaaagcaagatattatccaagaggatcctttctgaatgcatcactagaaaacagcccgagttatatatggagaagcttgtttgagacacaatctttgatcaaagagtgtgctcgaattcgaattggtaatggacaacgcaccagtattttggggactccatggttgcctaatgactctaatcctcttgtaatatctactcatcctggcttgagtaactattcagttcaaaactcgatgaaggtgaatcgaagagagtgggatgaagagctcattcaggatatgtttgaagacagggatcaagagattattctcagcatacctttgagtaattcgattgaagaagacacttggtattggaataaagacactgttggtttttatacagtaaaaagttcatatcaatatattcaagagctaaaaggggcatggaattcagatatggaggataaggtttggaagactttgtggaagattaaagtcccacctaaagtactccatttgatatggaagcctttaaccaattgtctacctacccgtacccaactttactccaagcacgtacctgttcagttgacatgcccgttttgccatattgaggaagaatcaataactcatgtgttgctgcaatgtcagttcaccaggtcttgctggaaccgttttggtttggccactgcctctgcccactacaataattttttttctctagtttaagggtgttgtcgacaagaatgcacgagacctattggaagaagccgtgatgctttgttggtcaatatggcaagctcgaaatggagtaatctggaaccagaaagtatgtaatgcagctgatgttatgttcacagcaaggttaactttagcacaatggaaaaatgctaactcaagagatttgagccactgctggttccatctggaacttatgacagtggtgagcgttgggcaaaacctgctgctaatatgctaaagataaacattgatggggctatctttcaagctgccaatgcatactgttcgggtgtggtaatcagggacactgctggttctttgatcgaagctttttctgtgtacaacctcggctgtagtcaacctgagattgtagaaatggttggcataaaggaggcgttaagttgaataaaaatgcaagaggatcaagtgattcaaggtgctataattgaaatggactgccttgttgctctgcaagctttgcacacttcaattaggatgccttctttatttggtttact

SEQ ID NO: 239524 - DNA, 2726 bp, Cannabis indica
aacccatacttagacctagacgtggacctgaatccaaatcagacccagtcccatacccgcacccaaacccggacctggactgggaggactcgagactcggcacccgaccccaaacctagacctgggaaccgaacctggacctgggacccaaattgaaaccaaaccaagacctgagatttagatctggatgtggatctagacctaggaccagggacctggggcttggacccaacccgtagtttgtgtctagatctaggaccaagaaacagacttggaactggaccaggactcggagccacacccggtcggttcttaagtcccagtcccgattttgggtccagggtcctggtttgagtttggattcaaaactcaagtcctggtccgagtttggattacggtcgaggtcccagtctaggtctaggcttgggtctaagttcgggtcctggtcctagttcggatatgggtccgggtctaggttccagatttaaacaccgactataggtaaggtccaagcctcaagtctccggtccatatccaaatctcggtccagttctggttcaagtcctggatccaagttcgggtcctaggtccaagtctggggctgggtcgagtctcgagtcctagtcctagaactggggcctatctcctaggtccgggtctgagtctgactctgtgtctaagttcagctctgggtccaggttctagtccgggtctcgggtcacggctcttgggtttcgacttttgaaacctaagtctaggtttgagttcgggtctgggtctcgatctgagtctgggttcgaatttgggcccaggttttggtcccagtttgggatgaggttcagttttgggtccaggtttgagtcttggtcccggtcttcttctagggtcccagttccagtttcgggtccagtacaacttttggatcttgtttgatatccaaatctagacatcaactacgggttaggtcaaagccctgtgtcttgggtcctggatttagatttgaatcccagtctcgagtcccagtctggttctgatttgggttctaagtcctggtctggttccccaatctagttctgggtcatggtcaagatccatgtccaagtccaggtcttggttcgctttcgtgtcctgagtcccaatgcaagtttggatctaggtctaggtgtaggtctcagttcgagtctgggtctgtttgtgagttctggtcctcatctagttcctgttccatttctgggtctgggttctactctcgatcccatttgcaggtcctagatcacttcaggttccaatttcgggtcacgaggtacgggtcaaagtcttggtccaagtttgggtccaagtctaggtccaggtttgggtcccaaattaaaacactagctacgagtcatggccaggccccgggtctagatcccgatcacaatctagggtcccaatgtggctctaatttgggtctcgggtctcagtttgggacctaggtttgagtccaggtcctaggtgtgagtctgggtcccccatccaagaccaaagcctaggttccaattcgggtccaggttcgggttcgggtctggagtcctgggtccgagtctaggtcttggtccgggtttgggtcccagcccagtcctaatccacttccagttttggttccagttttaggtcacgggttacgggttcaggtccgggtgtgggttcgagtcttgtcttggtcttggtccgggtccaagtgcgggttcgggttcaggtctggctctaggtcccaaatcttgacactgacaacaggtcggctccaagccccaagtcaagatccagatctcgatctcaggtcccgaaatcgaagctgggtcctaggttcgggttcgggtctggacgggtctagggtcctggtcccaattttagggcccaagtcactgtcccagttctgcgcctgggtcccccatctcggtctgggtcctaggtcccagtttgggtccaagtttgggttcgggttcgagttcgggtctagggtcttggttcaagaccaagtctcggtctgggtttgggtctgggttcggcgaccgatctcagtccaggtttgggtcccagtctggggtctcaggacttagtgtgggtctacgtcctgacatcgattctgggtttgggttcaagttcttgtccaagtccgtcccaggtctgggtctcgggtctcaagtcccagtccaggtcttggtttgggttcaggttttgtctagctcccgatttgggttcggttctcgattctcatatcccagcttaggtccaggtcacggtctcggttttagttcgggtttgtgttcgagtttcgtttcggttcttgttccaagtttaggatctgatctgagtccttgtccaattcaaattccagttctaattcaatgtttgggttcgggtgagggtctgggtcggggtttgagtcctggttcaagtttgggttgtaagtggtgtccagatcttagtctgggttctggtcggggtttgggtctgggtcccgggttcctatcatggtctaggtctaggttcgggtttgggtttaggttcgtgttcaggtctaggttcaggtctgggtcctaaacaaggttcggatcgcagtttgggtttgggtttgggtccgggtttaggtaccagcccgagttggggttaggataatggtccaagttggggttccaggttccgatcccagtttgggtctcagttttggttcaggtttgggtctt

SEQ ID NO: 239525 - DNA, 1713 bp, Cannabis indica
acaatgttacaggaattcctaaaccgcatagtcaaagaccatggaagcattgaccttgaatggttaagagatgttccccctgatgaagcaaagtaagctatttgaaatatatcaattttcctgagaatataacaaggtcaaaatcacaaaccaggggcaaggttatttgttacacatttgattttgtatattttctctacaaaatatgctacagggattacttactaagcatccgaggactaggtttgaaaagtgtggagtgtgtgcggcttttgacacttcatcatcttgctttcccggtaaggtcttattggctgagctttttagattataagagttgatggaaaaaaaaaacttaggaccagcctatcagttttctgtttcttttgtttttggctaacctagcatttatcatttctatgtttgtaaaggttgatacaaatgtaggaagaatagcagtacgactgggttgggtacccctccaaccacttccagagtcacttcaattacaccttctggaactgtaagtataatgtatgcttcaaataaaaggtaaattatattagatgaggaatttctgaccagaatcttctgtaggtacccggtactggagacaattcaaaagtatctttggccaagattatgcaaacttgatcaacgaacactgtattttcaaaattccctcaacttttcaagtttaaccttacaagaatacattttgctattgaataaaatcttgtattttccataaaagcttttgttattaactattaaacttcctaactacagatacgagctacactaccagatgattacatttggaaaggttaattatcaatcattactaaataagttaaacatttggaaatattctatttaaaaggtctcacccttgaatgaatatacatacgcaggtcttctgtacaaagagtaaaccaaactgcaatgcatgtcccatgagaggagaatgcagacacttcgcaagtgcttttgccaggtatacaccctaataaaactgcaatgatgtatattagttccactacccacacaaatatcgaaaaagcaagtaaaatattaaactaactagctatccggaaccagaattcatatgtttaggcagacatatacaacaacacccaggttatctactaattaattgcacgtttaaactacaaagttcattaattacataaaaatagtaagaaaataggtggggattactttctatggtaaattttaaatttcattatcacgaatgttctagaaattgtgaggatcaacctaaaaatcatggctcaaagatttacatgatacaataatgaaatgtattttccatgcaaccactatgacccaaaatgatatttgaaacttccaaccaaatcaaatatggaattaaaggaaagcatctaacaagttcaatttattttttatttgcaaattgttgaattttctgatatgtgcacaactaacaattattaacaatgagactaataagaattatgcttaatgcagtgcaagactagccctaccaggcccagaagagaaaagaattgtgacttccattgatcctacaggacccacaccagttaacagtcctgctgtagttatgaatcctgcactactacctccaccagagaacaatgtacttgcagaatctggctctaaaattgacaagtgtgaaccaatcattgaagagcctgcaacaccagagca

SEQ ID NO: 239526 - DNA, 1690 bp, Cannabis indica
tctttatttttatgtttttcgatatttctttgggcgagtgtttactattttttgatttggtatggtgttgttttttaacagtttgctaacagtagtattgtagtttatttacactgtgttcactatttattttcatatttacatttttttgtttgatttcaaaaatggaaatgcaagtaccctaaatctgatcactgtagatcgaaagtggcatacacttgcagttacaatgtcatttagtagcttaatgctactcttttgggaaatgtcaagactttgtcaaagattcaacagtttagtcaatttaacaagaaagtttttggaacttcacattaatgtgtcaaatataatattggtaatactttactttttgttaatatttatgatatgacatacaactttaaattaactattacacaactatttataaatcaataatgttggcaatgtaagcaatgtattaaagaaaatatttatgcatgtatgagttctaaaatattaaaaaaaaaattctttgatgtagaagaataggcttggatcatcttttatcctcaacggttggtaaccttcttacacttggtattttagttgcagttgagtattttcttggttgcattctagcacttgttttaacttgtgtacaagttcttcatattttcaatcccttgagatgaattcccactagcttcgtaattgacataattcattctattatcaaacttcctattgaactatatgagaaatggaatttcttctatttcctgaaattttaaaaatttaattatggtcagcaaactataagaaaaatgaaacacaatagggggattaaaaataatacatgtggtgttaaaaatttattttacaacgttaaaacaaccaataacctccacttggtaatataaacaagtttaccacgattgagttttctctatatgagtagtatatttctaattttgaatcatcattttttttacataataatattttagtgacacaactattagaaaactcagaaataacgtacgcacaactatgaatgaagaatattcttggacatcgttaagaaaaaatttaacaaagtattattgcactgatgattaatgagttgtagtttaagaatatttttgtgaagaagcaactgtaagaacactgtcaatcaacgtgaactcaaccaatgttaaaatatgaacaaagtcaccatattagaattactttttatgagagccttatgttggatgtctatataaaattgctgcaaataagactaaaaagattgtaccattatcactatgttattattgatgcatcaattattggggtgtcaataaatggagagccaactgtaatgcaactacatagaaacaataaaattaaaatgacggctccagattcaagattcaagatgcgagatgaatgtaaatttagttattttttcgcaattagaattgaataaatctaagattaaaataaaaaattagattatacttgattttgattgatcgggaactcgggatctgtttcttacaggtcttcatcttattaatctataaattgaatttgggaggattaattttatagaatttcaaaaaatttcttgggtgagtttatattttaaactaatgtttatgcagaaacttccatcaatcagtaatggttgatttttagtttgatatttttattcttctcaggt

SEQ ID NO: 239527 - DNA, 1360 bp, Cannabis indica
ttggaatgacaaactcaaaactactttacttgcatggggattcactgcatctcgggctgattctgcattatttgtttatggctctggtaagaatttaatcatatttctagtatatgtggacgatatacttatcacgggccctaatacttctttaatcaccaagttaatttctgatttgaatcactgttttgaacttaaagatcttggtgccatacattacttccttggtgttgaagtatgcagaaacacagaaggcatatacttgtctcagtccaagtatatttctgatttactagtaaaggttcaacttgatggagccaaaccatgttctaatcccactagtacagctcatatactttctctctatgaaggtactgcttttgaagattcgaccttataccgaagtaccttaggggctttgcaatacttgacccttaccaggccagatgtggcatttataataaacaaattgtctcagtttattcatgcaccaacctgtgtgcactgggatgcatgcaaacggctactcaggtacttgaaaggcaccattaacgaagggttactccttaaaccagcatctcggctatccttgcaagtgtactctgatgcagattgggcaagttcccttgatgacagacgttctacgggtggttatgcagcttttcttggcccaaatttgatctcttggtccgccaaaaagcaacaagtagttgctcgatcatcaactgagtctgaattccgagcattggcaaatgcagcagctgaagtcaaatggctttgctccttgctttctgagctacaagttacagcaccagatattcccattatatgggtggacaatcaaggtgcggctgctcttgccgcaaacccaatctttcatgctcgatgcaaacatattgagatcgacttgcattttgttcgtgagcaaattctgaggaaagagatctcggttagacatgttcctagtattgatcaaattgctgatattctaaccaagtctctacccaaggatcgctttcattatctcaaaggcaaactcaaagttatttgtacaccttttcgtttgaggggggatgataaccaatagtacacgtgtcaaattggttgtgtattgtctgttaatactgttaagattcttgtaactaattctgttgcataacagaattctctgttctgtaatcttgctgtataaataaagagttttcctcctcagtttaaccaagctgttttctcttggttctgaggcttttcttcctctgttttcttactttgctttaaagctttcatctttgatgaataagaatatattgaataaccagcaatttacagtactataacatccaatcttatactacataaa

SEQ ID NO: 239528 - DNA, 1718 bp, Cannabis indica
tattaaccattattcttgtagtgggtctgccactatatggtttattttgctattattttatcttttttatttcacataatttaaatcctaactctaggtgaaacagtataaagggaatatgatgctctcattctcatccaacctaataacctggtttacattctgtcagataactagagtttttaagagcctccttcctttatttttgaatctctctctattgttcttcataatttttgagtctatagtgaaagagtacatgcccacccataacaagttaagtactcaatcatagtgtgtaagattgtgaagaatccaacacttgaaggagattcgagctcagatcttgataatactccacgacagaaaggaacaaggattagagatctgagtggaaggagacatattattccactgccatacatattattccactgccatcaaggatttggtgagacatctcaaaatcttggtcacgatatccttttatgtaagtaccttgccaagagagtttaattcattagtaatagttgtgaaacgggtatacatgttagcaatagtttcatgttgtagcatcttgaaattttcaattgagtaactaaaagttgaattttagtttcatttatggcactagttccatgatgagttacatctaccattttccacatatcataagccgaggaggcttgctcaatatttttaaaaatatctctatctaaaccacatataagagcatacttagccttagcatttttagataacatctttttatcattttcattatatgcatcatatttcttgacaatttctactccatctacaaaatgcataggagtgtaaggaccataccatacaatataccaaaaatcataatcaatgaattgaagataagtttctattctaattttccaataagaaaagtctaccccatcgaaaaatagtgctctacttgtgcttaaatcttctagcatattattgtgtgaattacttagaaactctataaattttgaaatccactcaaaaacaagagccttttcttcgatattaactgtgagcccaagataattttttaaaagggagtaaattggaaatttaaaactctaaatgcaatttataaaaatattcaaatttaaagcaatcacatagataaacactagtataagcaaataataaacttgaaatataaagaatttagggataaaaattacaaactcgcaatttttacaaggttcattagaactaagtcacctacgtccttggtcttcaaagctatggacctagctttcagttcaattatcgagtcaacttaacgggcttgactaacccttacaaccggagaatttttcaccaaggttttcccgaacctctcacaatagtgttcttccaaggactatcgacctcaccgaattgttgaagtgtcaatctcactctcagattgttgtagtgacaatctcactcttctcgggttatttaagaactggtgtcaatgtcacctacaattgagttgtttttatcttggtgtcaacttcacttctcaataaaattaatatttaattttgaaatacaaaacatactctctctaataagatgatatacaatgtaaaatcctagagagaattgcaagtacactagagaagataagaacaagtttgactcaagtgtgtgtggttggtgtatttatgaaaagatgataattctttagcttagaacacttagaa

SEQ ID NO: 239529 - DNA, 839 bp, Cannabis indica
aagcttgattgccctaattatcaagtacaaaaaggagacgataaagtaacgatgtaaccgaaatggaacactttttgaattgataaacaaactgttgagcgaacgaaccttttcctttgccatctcggcagattgttccctgctgacaacaacatttctggaagcttttgattgggaagcgagatcagcttgttcttgaagagacacatataaggaattcactgtatctagtaaaaaccgatcaccaccatgtcgggctataaaggagactgaaacaggcgacttctcgtgaaacccgagtggaactgtaacctgaaaatcatataatggtcatgtcatatatgatatagatatatgttaacaagaatccactcccacaattcttctctttttccttcttaaaaacattttggattcagacaaacattaatttgaattttcaagtcccgattgaccgtacataagcaaatgcatagacacaaatgacacacatcacaacttttcaggtgtaagttgatcaaacattagaaacatacaaatttcaaacagctcggggggagattaaggggggaagcaaactagcaatttttacctgacaacagcctgatatgctagcgatgcttaatagactaaatgctcggctctgaaactgctctgataggatctccttcgcacctacttttggaggaggatcagcaatggtcggtatcacaagaactccttcatcctaaacaaatctcaagtaccagagtcagcatgattctaaagtatataatgaattaaaatttcaattagtacaatttagcagaaagacattattttaaaaattcttcgataaa

SEQ ID NO: 239530 - DNA, 774 bp, Cannabis indica
aggcctctctgccctttcattctcaacacatgtcattgccaggtccacaaacctttcaaaaccattcatccttgttcccacacccatagctgggtcaagaagtgcatggaggttgtataactctttattctcatcgatagtgtctcgtattactcttacgatgtacactcctcgctcgataggtttccttgcagtaatcagctctaacattaacactccaaagctatacacatcactcttctcagtcagttgttgcgtcatgtaatattcaggatctaagtagccctgtgccaataaagatgaacatgatctatggtaaggaaaaaagaaattgtgtagttgtagatatctatgacactctcaacatgataaacgtatgtgttcatctatcttcctaattagaccataacaaaagttatatgttttgtttgctaattgcctctgcttgcataccattaattgcaactaccttttcttagacaaagatactagactcgtaggctgcacctcatacatgagaaaaggccgtttgatggttgatatgacagtcttgaaagttctttctaaatatattctcacaatgataaaagtgaaatataaatatatctggctttaagcattcatgtgtgcatctaaacaattttgtttagtttagaaggcctagctgcaaactgattcaattcaactgtaagtgtaacacaaacattatgcacgtacgcacacattctattttgatttgtcgagggattcgaaggttaaacctaccattgtgcc

SEQ ID NO: 239531 - DNA, 2005 bp, Cannabis indica
taattaatttttattaggaaaaggcctcaaccaccactaagagtaatgaaactcatcaaaagaggtggcgagaatgcattaatgagtagcatctgctactaataaattttgaatagaaattagaaaatccgaccaccaaacagtgctagaggacaatgtaatagcgattttagtaaaagtgtaggcaacaatattaaaatcttcagaataatgtaaaaaataagtatttttaaaactattacaaagattgggacacttctggaggggaactctaagggatactcccgaatgtcaaccatgggaggactctcagatgcccagcgcaggatgagtgtcggatgtctaccaaaagatggcgtggtcacctttctaacacataattagatattgtgccctatgtcaggttatggtagtgcgcacaccaccaaaagtatacatcctttttgtccaatagcgcctctaacattcttctttacaggagtggcttctgtgtgacacgtgtcctgaatcaagcggtcccctgtctgcatggatccttcgccccatgtgctgaatacctactagtgggcctcaaagtcatgtattttgtgtattgaccccattggtgaccatattttttcatagaaacccaaatggatcaagatccaaactcaagcttatataaaccttggcaccccttcgtgcaaaagggacaaaaccctagaaatccactctaatctttcttgttctccaagaaaaacctagagagaaaactccatagcaagagttagggctcttcaagattaagaagcacgtacaagattgtaatacattcaaagccttaaaggtaaatacactgactcatagactagggttcattaacactcaaatcatatacaaaatctccatcttatttacttaatagtttatttattttcttaaagctcttgtttatttatttttcaaaaatatcgatgaacacaaccagttttaacaagcagctacaacaaggtgataaaaataataaggggatttaatgtagtgtcaagggttttgtcacatacaagtataatgttctaccgcacttaagaagaagaaagctcttgctgtcacatggagtaataaagatgaagaaggagtcagtggtgattctaaagaagaaaagaaaatggttactttaattgccaaagataatgtttctgagacatctgatgaagacggagatttaactaactttgaattagattttgatgttgtagaaagaaataaagtatatgaagagatgtttgcataatggatttacatggctaaaatttgaaggaattacatgacaaacaaggaattggcagccaataatgtagaactaaacgaaaaagttaaaaactaattcatgagccagagagtaaggaaagtgagatttacaagttgagtgttgaacttgtttgagcaaaacaatctctacaatttatacctcctggtacaggagctctcaaccaaacacttcacctccaaaatccctatggagatagaacactattggctacaaaatattgtataacaagggaatagaatttccaattgaaaggccaagtgagttcgaatcaggtgccaaaccatcatttgttactattgttggaaacaatagcaaagatggatttgaagaagcatcgattgaagccagtgaagctgagaaaccaaaatggccatctactggaaaagagtccagacattttaaaacaatttgtgccaacatgtcacttctacaatagaaggggtcacattagatctcgatgttataagttgcagacatatttgaaaaatacgattcaacagtaaggttcattctcacagtcaaattagaataaaagaaaattttctagagtgggttggagacctaagtttgaaaatctagctttggtggcacaacacatccccattagccatgataaagataagtgataccttaatagttacattttatttattttttgtgtaaacatttatttcttaatgtatacttatcgag

SEQ ID NO: 239532 - DNA, 1006 bp, Cannabis indica
cacaagctcttatgggttgaaacaagcttcaagagcttggtttaaaagactgcatcattgtctcttgtccctgggattcacttcatcaaagtttgatcattctctgttcattctacacaatgcatcatccattacacttgttctggtgtatgttaatgacattttggtcactggaagtgaccctagaacagttgcttctctcattacttcacttcacaatactttctccttaaaagacctcgatgaactaaagtacttccttgaaattgaagttacaaaaaccaacaacggcctatttctatctcaaactaagtatgctaaggatctcctctccagagctgatatgcatgatgccaaactgatttctacacccatgatcaatggctagaaactgtctgcctatggtagtgatgtgtttcccaatccacaaatgtgcaggtcaatagttggaggtctacagtacctcaccataaccagacctgaactatcatatagtgtcaataaagtttgtcaattcatgtaaaaaccattacaacatcattggcttgctgtcaagagaattcttagatatgtggctggcaccactcaatatggtcttcatctcacaaagcattttgaaataaaggcctattatgatgctgattaggcctctgatgttgatgaaagaaagcccaattcatgttttgccatattttttggcttcaatctcattgcctgaaagtcacaaaaatagcaaaccatttctagatgaagtacagaagtcttgccagtgtggttgctgaacttccttggcttaaatctctattttttgagctccacttccagttgccccaaccttcaacagtttgatgtgataatctcagcacaatttttctcactgcaaatcatgttcttcacgccaatactaaacacatcgaattggattcgtaatttgtctgggaaaaggtttagactcaaaagattactgtcaaacatattccagcagtagatcaactagcagatgacc

SEQ ID NO: 239533 - DNA, 969 bp, Cannabis indica
aaaaaaaaaaaatttgatttatttgtatttatgtgttgtgcttttaagcttgtggtattgtgtcatatttaatttatagtattgtgacgtatcgtgcccaaaaaaatattaaaaatgagtatcatgggattcgaaccagatattttataatatatcatacaatcgaaccaactatttattatttataatatatttaattttatttaaaagcctaatgtaatttttttattttttattttgggtcgccaaaaagtgtgtactcttgacacgggcctagtttgtctatgcctagggccggccctagccctaggactgcacatttagacctacaaacccaaatatcccgaccactcgcccggcccgctgccaaaaaagccgatcacctaaaaacccttgtagtcgggtcgagttcaacccgaaaaagactccaaacgggtttcgggttcatgtaaccttaattagtttttttctggtcggtttataacccgtaacccaaaatattaaaatgatatttttttattaaaaaattaatactttaaataattaattactaatttaatatcatggctatttgtattctgtagaggtctctacgtgcctatttgtattcttctgtagtaaatagtaatagtgtaactgaaatttttttaatcatattcaatttcaaacaaaagctcttagcatgcctatttgtattcaccagtcgactcgactccagtcgtcacccacacccataaataacaagagttattatttaataaaccaatttgataaaaggctgtcgtgtgtttgaaaacatagaaaaatgggaagataatatattcaatttaatttcgcccataaattaaacattcgggctcagcccaataggacctgaactcgactatgtccaacccgaaaaagcccgacctgagacccgacgcacccgaacacccgaaaattgggttcggttgtgcatttccaagaccc

SEQ ID NO: 239534 - DNA, 1491 bp, Cannabis indica
ctctttgatgaaacctctttcccattctccaccactcccaaacacagtactgattcttactcatactctgatttttacacttctgctattattcctacaatcactcaaccccaatctgttgcatccaactccagacctgtaccatctgaccataatgtgccaaatatggcaagttgttctgtgcctatgcaggttccagtttcaccaacaagaatcccagagattccagaaattccagccgcaacttcatcacctacaacaacagaacctgaggctactggctctgctgatcttcctaatgatcaaaccaactctcctgcaactcatattggatccactggtgtaattaatcctgctggtacgccacacacagctacaatacttcttattcctcatcttcctgagcaatctgtcaccaccagctctcaaaatgctgctgctactcagaatccattggccaattctcaccccatgcagactagggcaaagtcaggcatacacaaaccaaagagttacatggcaattaaaattcctaaaacagttaaagaagcattacaagatgagcagtggaacaacgcaatgtctgatgaaatgcttgccttaattcgaaatgcaacttatacattagttcccttgcctcctggtcgagaacccattggctgcaaatggatatttcgacacaaagaaaattctgatggtacacacaacaagttcaaagcccgacttgtagcaaagggatttcatcagcaaccgggattcgacttcacagagactttcagtcccgtggtaaaaccagtcaccatacgcatagtcattacattagcattgtcccaaggctggtgcattaagcaattagacgtcaacaatgcgtttctaaatggtgatcttaaagaagaagtatacatgatacaacctcccggttttgaaattcaagcttctcctccacttgtttgcaagcttcacaaagcattgtacggtctcaagcaagctcctcgcgcatggttcgataagttgcatcactgtcttcttcaattggggttctttccttcaaaatcagatcactccctgtttattcagcatacatccacatacacaacattgattcttgtctatgtggatgacatacttataacaggcagtgacccgaaagtggtatctactctcatcactgctctcaacaacaagttctctttaaaagatcttggtgatcttcactactttctgggtattgaagtccattctacaccatctggtttacacctctctcaagccaaatatgctcgggatttactagtcaaagctcagatgcaagaagcaaagccatctcccactccaatgaccactggtgtaagactttcagctcatggcagtgaaccaatgtctgaccctcatctctatagatcaattgtaggtgcactacaatatttgctcatcacaaggcctgacctatcctttagtgtgaataaggtgtgtcaatttatgcacaacccc

SEQ ID NO: 239535 - DNA, 2012 bp, Cannabis indica
tcacttgcgtgagtatactacttgattgcgtgcacttgcgtagtaattaataattttcgtaacacaatgttattattattttttattatttttattcttttgaagactaaatttgagttcccataaaataatttgaagttcatgaactatattttgtaccagagcttaaaagggctatgcgattgtagatcgaactcaaaaaagttttctatgaaaaattgtgaagaaaggagagaggcaaaggcaaaggagacctccaaagggggtgtcgctagaggtgtaggaaaatatgatcgcctactagaaggaccaaaacaacatgtacaaattcaaacatctaaaattttatttccattataacttataatttaaaaatctaatgaaaataaatttcttttaagttagaggcaagagccgaacaaaacaaaaaatatcaaagcaagatggaaattttaagtgaatggggctccacgaccattgttaaccacattgtcaagcagctatatgttgggattttatgctctaaataaaattttaattcaatataatcttatttactaattagtaaaagatcagaattaatttttacttttgtatatttcttgattcacatgttactttcatgattatatgactaatatatacatttcactaaatctcaaacatatagttattgaagattatagtattgtcaacatagtagaaaataatcgtgatcatatgcctcaaactatttagtccagcaatttattagttcattggatttacactgacgcgataatcagagatgtggtttacttacacttgaataagtcaatggtcttttccagggcattagcaaagtaaacttgcataaaatgtattagttatatacatcagactggactgatattgacagtagaaaatatattataaacttactgttatatcttttctaagtcaatatcacttagttgatcttagatcatatgatctcaatcccgagatgattaatctttaacctaattgttgtattagagttcttggacttgtttgttaccgacttacctattagaatagcccatacttacttcttgcgaacttggtagtacaattgaatgggagcgtaatcatagatatggacatctatagcttctatgtttgtctataagtaaaacgatagtttgcttagagcttggcaaaacgtgataaatagaagggatatttttcaatgattatattagtttactaaaatatcattgataagaagctaagtgttttaaggataaaagatattgaaggtataaatagtaattatttccctactcgacgtaaaccgtgtatagatgattattgattattgagataatggataatttatagtgcatttgtatctgatatataaagaattctatgtaatcaagagtaagattctgaatctacaatggagtcatgaagaattaataaattaggaaatttactcagtaagtttcagatctacttattgggagcttgatttcatacgcccatggtccccatattatttaatttagtatcatcatgtagattaaactaattgatttatttaatcaaatgaaattcaaaaattgataatttcatatttgaaaattttcactaagtttgggttattttgagaagaaaagagaaataagaatttatttattaattaagacacagacactctgtgtgtctaactaatatttttatttaataattatttataattaataaatttataaatgatcttttaaataattagatttaaaaagtggtaaaattggaaaaagataatttatttcacttaagcataaatgaaacaaaagttggcaaaaatttaaatcatgagctttctttgtgatttcggccataataggaataattagaggaaattacactctatactcattttatattctcctcttttatttttaccttcttttttaaagtctatcatttttacctctttttttaaacattgtaccaattttgcccctattacttcaagatactct

SEQ ID NO: 239536 - DNA, 1729 bp, Cannabis indica
cgttgtgcgagaaactgtcttgggcaggtctcctattttaagaaagagatcgtgggttctctaagctttggttgcttagagccttgttcttcgcctgccaagaagttacttttgggctcatgacggagtgtccaacgctatagcactctttggctttgttggtctcgtatgcaatatggggtccaccattgtcgaccgttaagtgtcttgccatctgaggttttgggcaaagtttggtggtacctgcctgtagcgtagtccaaagatggtggccaaaccttcggagatggaggctagccttttgtggtagaggacagcctttggaggtagaggccaaaattaggaggtgtaggctagccttctgtgatggaggctagccttcggaggtggaggccaaacttcggagatggaggccagccttctacgatggaggccaaccttcggagggaaaggccaaacttctaagatggaggccagccttctgtgatggaggctagccttctggacttcctattgctgactcgccctgctgggacgtttggtcatgccttgttttgggagatttgatagaagagttaagcatatacacttctcctccttcttccttggacttcatggcataaagggatttttgaatttccctctcttgccattatgttggtcagagccatcgttgttgcgcttgcctccaccattctcattgtttgagaattaaatgatatcgtgtgcactggtcgatatgctggacagtgtttggggcgctatgaagccatctgctcgctcaaggagctcctccaaatttctcgttgagatcctcctgatatctttccaaaagtcactcaacggtagaatgcctccgagtatggtcgtatatcagccttcttctaacaagcatgtgacctaggtggcctcggctatgattgttgaatgtagtccttcaagggttcatcttgtctttgctttatttcaacaagatcctccagtcgggcaggtatttgtcttgaagtagagaaatgaagatagaactcgcaggagagctcttcccaagaattgaatcttcttggggctagcttgaaaaactagtgttgggctatttaagcaagaattgccagaaaattcggcattgcacatctccaaatacttgtaggagatccgtctagatctcaaagtacttcaggtgtactagagggtcttcttttcccgtgtacatcttccaagttggcatcttgaatttgggcaagagcaaggcattgatgtatgccgagaatggtgatcccctagccctatctagctcaagttataagggctttggactagctaggcccttgagcatatctcatatttgatccaactgtgcttgcacagaaggatctattgttgtagaggctcgattaattagccttctttgattgagctgcaacctcagattggacagagcctaaccagccataccttgggagagggtacactcaaggccagccaaccctgagtctagggcttgcacatggtcagccagccctatctgggtagggcctagccacccacacttctctgcctagctggtagagtttgtgcattgacatggagtaaatcccaccaactgttggtgtttggtcgatccaactatctgaagtgattaacttcacttctcaaattgttgttttgggtgcttccacccgctctcagtccttgtcgattgaaaattgatcttcgggtgactcgctcccct

SEQ ID NO: 239537 - DNA, 2298 bp, Cannabis indica
caagaaacttcatgagagaacatgaaacgatttactgttctctcagaatatccatatttgaactcgccacaagaaaatggcaagtctgccgaaagccattttaattcattcatatttgatggcttcggctctagccaggttatgtgcacattgaacccgggagaagaaaccctttttatcaaagcatagaatctaggcaagacattatgataatcataagcagcccatatctgccctgcattaaatcgctctgcattcctgtccttgtcaaagtcattgaattcaggatctggatatagtaagaattccaagtctggtgtctcctccaaggtcaagtcaatattagcataaccttcagaacacttcttcaatccatcactttcgagtgcccctctaaggcctttgctcttcctggttttgtctgactcttcctcaccttcttttgctttaacccctttctcatcttcatcttctttcattttagtagcaacatcagagatcacactaggtgctttttctcttttcctttttgaacaattcacattcacgtagtcattattatcaccaccacttaagttttctttgtaagcagttttgagttcagtatgaagaacaccattctcatcaatcatcatcatatcttattctgaatcaatattacttccagagactgaaacatttatgaccaacgccacaaagcacttcgtgcaacttatttattgtactaaaattaagcttatttatggtactgaagataccttactgtacaaaagaacttaatcagtgattagcttgtttccatggctactgctttaaagacctaaaaagtggcttccattgtagtccccaagagagcccagtacctcagacatctacagaaccgaataattcaactttaaaacaagatttttcaataatgatcaaaattacaccaaatttttttaaattataataaacgtaatgttaaaaaagccttatctacatcaatggaggagagaagggaccaggttagggttttgttaaattgaagattagtcctactgctaggccaaatgcccgattgtagagtcaggttttggagggagaatctataatgtttaagaatttgtttaacaaaattaccagatattatcacaaaagagaataatcattccaattcaattaacttaaacaaaccaacaatgtccatatgaatgtataaataaagcattttaaaagccagtacgagagaggtagtgacaaaaacaataatcaatacaaaattggcagataaaacaaacctaagaataattgaagcagttcatgagaaaatttcagcaaaggaataattatttgtaaaacccattgaaatggtaaaactaaatctctctagtagcattaccatgtcgcagcgaacggtgtgggggtaaaaaggtcaatatccatagattttacaagtcgaaagagctcggaatggggcattgacttggccctgcttcgggctagaccagcattgctcatgtttctccaacctctcttgttcttattttcttcctcagttttctcagccgatggtgtgcagtgcagatctcgatagcattaagggcactcacagtctcacagtcacaagagtggagataaaactgaaattttatttacaaccccaaaaatttataacgacactttattttaataatttttattttatataaaatttatatctttaattatattaagtttttaaatttttttttaatttatatttttaaaaaatataccatcaaacaaaattaaattatattttaaatattatgataaaaaattaaaataaaaaattatatgaaatttttttagaaaaaaaataaaaaatatatatacataaattagaaaaattatgaaaataaaactaaaatgagtattcaaattaatataaaataatgtgagaaaaaaattttaaaaaaatattaagagtaattttttaaaaaatttaagtttatatttttttaataattgagtatatttataattttatggggtgcaaataaaactccccctttctatttatcaaatccagtttacatacatcatatataattaaaaaaaatatatattaggaaattaatatttatgtaaattattttaattttataaataatttctaaaattattttaagagaagctacacatcaattctatttggtttagcttctataattttttttttctagtttttagaattaaaacaatcattttaggtttatttagataaaaaatgaaaaattcgttttttttttaatttaaaagtccttttgaaagaag

SEQ ID NO: 239538 - DNA, 1356 bp, Cannabis indica
tgtgtagtgtctatgtgaataaaaataatttttctagtgttttttattataaaacatataaaatataccaactcaatatattactaaaaaaattgaggaattagaagtttgtgtcttttttttactagaaaattaatatatattatatattataatttttaaaaatatctataattaagtgcagattggattggatcggttactttttgaggtcaaacaacattcaatccgcacaagtgtggattttagatttttcaatctaatccaatccgcgcaagtgcgaatatccgcattttgcagattggattggattagatcgtgcggattggattggatcgtgcagattagattggatcagatacttagtgaacacccctaattttcacttcttggaagaatatattaaatacctggctattgattgattcacaatagtaaaataaaaatacaaaaactgtgtttttatttaatttgtttttgttttatcaatgtaaaaattttcattaatcaaacatgtagattacatcaatttaggagcatatcccatcatgtagattacaaattactcgaaaactaacacaggtattaatactcatcttaactatgttagtttacaaaataaaaagaagccaaacattattttttaagaacacataaattcgaattattctatattccatatacaacttcagctattgtatagtacaaattgtggacaaaattcttagctcttgtgatgttcacccacttaatccattccttctgatgttttctaattgaaaaatactaaaaggtatcaatggtatttagatcaatatcacaattgatctaaataagtatcaggtcttatataggttaatataatacattttaagaggtatcactatccaatcgccacatatctagaggtattagataccactggtgcttagtaacaatactctttttaatttatgttatttttactttataaaattaaagtcaatcaaacctatataaccattcttatgcttgaatcttgcatatgtttataagttttgtaaattgtttttataaattaattaacaaacatgacaattaaaaaaaaaattgaatttagaactgtaaaatcaattcattttaaaatattttgcatttcagaataaatttttgactaatctaaaaacattcttaaaattaataaacaggcaatagtatttaaacacgggaagagccaaaatagtaatttatcttttatttggcatattatttctttattaattttcctactgtgcattgtcatgaaaaatgacagaaaatctgcattggtgtaaagtaccgattgtgccgcaataaaatgcatcaaagacccaaaaa

SEQ ID NO: 239539 - DNA, 1078 bp, Cannabis indica
ttttatgccgttataatgtccatttatagtgttttatttctgttaagtttttaatattatcatagttttaaataattaagtaatctattagtattaactgagtttaaaaaatcacacacatgacgtccctataaattagggcattacaatggaccagaaaccctatccttctactggtttctccaaggtggtcgagagagagagagaaagagtgataaagagagactgttttatctaacctttttctatttttttttgaaaaatgaaagaattagtctaagtgtttatctgttaacatcatagaaaccaaattaatattttctaattaatcaacttactcaggagaaaaccaacttagggcaaaagactattttgtcccttgcttcatcaggaagcaactttgccactaaagggcattttggtcgaatttaaaaccactaatattcctaatattctcaatgtctatccaagttaccccgctattactaaaatactaaaccatgagaaaatgtgactctacagccaaatgtcgtgttccactattactgggtataaaatactaaaaacataaaattttatatataacataaataacacacttagaattcaaatatatctccataaattcataaatcataattaaaagtctaattccgaattaaatcttaattatctgctaattttatattaaactgaagcggtctttacacaaaatttaatatctcattaatgctcatctaataatttattaaaaatataaaacaataataatcatacaaaagtaaatataaaatttaataataaaataataataattatgaaagtcatttaatgcaaatgagaatgctaattaaacttgaataataaaatattaaaaataacagtaataagtaagatcataatcaactttatagtcaataattttaatacaattaaacgaataaatgtttagaaaattatatgaaaactatatatcgagatcaggtatggagtgggtagtgtcacctctgatcctaccccaaacccgctttgggtatataaaatttcccctcaccctgccccattgcccatcaaaata

SEQ ID NO: 239540 - DNA, 2232 bp, Cannabis indica
ttatttatttattttatttcattaattctcaaacaaaattatatataggcttgaccggccggccttagataatgcctactaccatatataccatatgccatgtgcacaaaataaataataataataatattaattttttagtagtaatattcatatatataattaattacaaattgtatgtatgtatatgtatatataaatattatattataattgtatagcacatttaaaggatcaaaaaaaaggggcatttacgtggaattatgcatgaatcttcttgcttctaaaacacacacgtagtacattttttgaaattccaaccacgtaactactactacttctactacttatactctatatatatttatatatatatatatataaaaatatatattactatatatatacatatatatatatatatatatactactacaattccatcgtctaataataacttgtcaaaataatctttagatcctaaacacaaaaatttagccttagatcttaatgtttcatgttattaattattacatatgtatacatattaatgagttttatacataatgactatttgcaatataattaataaaataatacattcaaattttttagtatatgaaaaattatcactcaatttaattatagaattattgtctcctaattgtgatgtaagtattaaattgtatccttcaaactttctatgtggctgatttttttttaactattgagtaatttattaaatttaaagacttctatttactttttttaatataaacacttgacgtgaattaaaatttaggaagcatgattttgtatatgttaaaatttgagagatactgtttggtatatattaaaatttggagcacaatttggtacataaacattgttacattagtaaaattaaatagaattaggcagaagtccttgaattctaacaatctcaataattcagagaaaattttaatttaacgtctgtaaagtttaaagatataatttagtacatgttaaggggattaaaatcctaattagtataattttagcttttatattctctcaaagattaagaatatgaaaaaaattaaggtatctcatttttaaatctatagtaattattagaggctatcttttttctctggctagatctgccgactttctttttgggcttaagtatggcttgatcaaggttgtattttgctactacaattaatttttactattgtgattagtcttatctctgtgacatgattttgagtattttaattttgtctatgtgaaatagtttggagtgttttatagtcttgtctctgttcatgaattttagtgttttagtcttgtctgcgtgacataattttattttgtttcgttgttggtcttgtttgttctttgatgactcgacatcaaatcattgttagtggttagtgataacaagttctctgctactgaagagagtattagtagtgtaattatgtacctcatacaatagctgagtactgctcgaagttgaatgaacctattgcaataatttctattgcttcatattgtgagcggtggatgaaacatatataatatatgtattcttatggttaattaatgctgcaatcttttttatttaattttattttagtttcttttttgtcaaacaatatgagaattagacgactaattatttgactcgtttttctaattttaatcatagtcgtacctccaacaggaaagatattctatttacattgcaaactattattttaattaaattgccattaataaaattctatgattttatttaaaaaaatagcttatataaactttattttcaacatttaaattattcaaattttttctaaactaaatgagatatttgttatcactacaatattaacttcatatctaatccaaatataattatatataatttttagtactacaatcatctaataatttgtcaaataacacttagatcctaaacacaaaatttagtccctagattataatgtttcatagtttattaaataataaccatttgcaataatataaatatatattacattaaaatttaagtgagatgtatcatgatgaccatttttaattgtttctaattaatattttaagatatatgatgtatttttttttcaaaaaataaggcttgatggaaaaatcatatataaaaaacaatattttttgaaatttaacaagaggcttttactcattaatattttttaaatataattt

SEQ ID NO: 239541 - DNA, 1327 bp, Cannabis indica
ttatcagatgtgagctttgaaatgctaacaaggtttttagtaatattaggaacatgcaaaacatcatttagcacaagatcagtagacaccagatttccacaaccaacatgagctatttggagtctattaccattaccaacagttagagattcctcaccattgtactcagtcttttgtgtcatgttgtttgtctcagccgtgacatggttgctcgccccgctatccgcataccaagccgtatcttcaaccatttctggtgtggcaatgaaggcagctgctccaccttgacttcccttatttccagtgttagagttgtttggatctgtgcccatgtacgcctcatcgtaccgattgtagcagtacgcagcagagtggccatagcgaccacaaacttggcatgtgggtttcgaattacttgtgtgtctgccaccaccacggcctcgagaacgcccagaaccaccagagcttctgcctcctctaggctgtccagaattaccaccacgatttccacttccatagttattaggattgtgacctcttccacctgagaaaccaccaggttttgttgtagcgacattggcattagggagaatgggatttgttggagagtttttgttagtgccagacaaggcactaagccgttcgacgtttactgtcaaaactcaaaaggatttcctgtaattcttgccaagttgttgaggatcttgcctcaacttgaaccactatgggtaagtactcaatatcaagaccagacaagctgttggaaacaagctgtttttttgggtaaggatcacccgcaagagccagcacatctgcccactgtctcttcagacgaaggtaatcagccatggacatagaccccttcctatatgtttgaatttttgtgcgatactcgtccatcttgacccgagagtgtgcaccaaagagagtctccagtgcctgccacaaactcgatgaggaatcgcaccccatgacttccgtagcgatgctttccgtcatagatccatataaccatccaagcaagagttgatcatgaactatccatgcttcaaactcaggattcacgataacagtagtttcaccagcaacttcatcgacgggaaggaactcaatcggtttaatcttggttccgttgaggtagccgtctaaacgatgaccacgaacgatagccgagaccatggtcttccatagtgtataattatttctatccagctttagggcaaatggctgggttagggtactggccacatgaggtccaggaattacgagcaggggaggctgaggactgagcaataacgctggctgcactgcggccagttgagtctcc

SEQ ID NO: 239542 - DNA, 3173 bp, Cannabis indica
tgaagttttttttttttactattatcatgtatttgattaaattattaatctactattactaaattatgttccaaaaacacacatgtgacatccctaggaattagggcatcacacagtgtgtcgccctggggatttctttggatgtgtattgactatcgggagttgaaaaagttgacaatcaagaagaagtatccattgtccaaaattgatgatttgttcgatcagcttcaggataagactattttctccaaaattaatttgcgctcgcgttatcatcagttgagaatttaggaggaatacatcccaaagacggcattccagacaaggtatggttaatatgagtttatggttatgtcttttgggttaacaaatgctctcacaacttttatggatctcatgaatagggtgtttaaggatttctcgataactgtgttatagtatttatcgatgacatccttgtgtactctcagacagaagcagagcatgagcaacatctctgaattgttttgcaacgactcagagttcacaagttgtatgcaaagtttaaaaattgtcagttttggttaccacaagtctccttccttgggcattatcgagaaagatggaattatggttgatatagggaaaatagaatcagttaagaattgaccgagaccaaggataattactgaggttttaagttttcttggattggcgggatattattgacatttcgtggaaggattttccaagatttctattctgttaacagaattaacttagaagaataaacagtttgtgtggtcagacaagtgtgaatcatgtttcccagagttaaagcaatgactgattttagtactaatgttagctttgccatcggatcgagaaaaatttatggtgtatggtgatgcgtctagacatggtctgaggtgtgttttaatggaggtcgacagggttattgcctatgcttctcgtcagttcaaggattatgagaaaggttacctgacacatgatttggaacttgttgctattgtattagcgtgaagatttggtggcattatttgtatggagaaaattgtgagatctatactgaccataagagtctcaagtatttttttcactcagaaagatttaaacataagacaaaggaggtggttagaactagtcaaggattatgattgtgagattttatatccccttgggaaagccaatgtggtggtggacgctttgagcaaaaggttctgggtaggtttttagtaccatagttatctcacctcagttggcttcgaatatggttagggatggtatcgaatttgtagttggaaaacttcataacctagtgcttcaattgactttttagaaaggatcaaactaaggaattctcaatcttgaataatgggatgttactttttaaaactcagatttgcgtacccaacaatgatgggctttggaaagagtttattgggttaagcatataatacaccatattcactgcacctaggtaccaccaaaatgtaccaagatttgaaactctattattggtggtgcagaatgaagaaatatgtggttgattacgtgtctaagtgtctaacatgtcaacagatcaaagcagagcatcataaaccaacagggttactacaacctttatcacttcccaagtggaagtgggaggatgtgaccatggacttagtttacctagaaccatgagaatgtatgattcagtataggtcatagtggatcatttcacaacctttacagtggttcaatatgtagagttgtatgtggaagagatagttcgtcttcatgaaaatctaaaatccattgttttggatagagatccgaagtttacatcaaagttttggataagtcttcagataaccatgggtacaaagctgaagtttagtacaacttttcaccctgagactaatggacagtctgagaggacgattcagatattagaagattttttacgagcctatgtcatggattttaagggttcatagagcaaatatttgatcttgatagaattttcttataaaaatagctatcagagtacaatagggatggctcaatatgagatgttatatggtaggaagtgtcgtttcccaattcatttggacgagaccggaaaaaggaaatacttaggtcctgagttagttcaggaaaccattgaagcaatagaaaagatcaaagcttagatccttgtttcacaaagcaggcataaaaattattctgatcctaagcgtaatgacatagagtttgaggtgggataacatgttttcttacgagtgtcactaatgaagggtgctaagtgctttggcatgaggggtaagttaagccctagattcatagggccatttgagatacccgagaaggttcggtaggtagcatatcagctagtcttaccaccaacattatcggctgtgcataatatattttatatttctatgttgaggaaatatgtgtcagaccctactcatgtcttgagttacaaagccctagaactagagtcagatttgtcctttggaataaggccatattttatattcctaattcaagtccttgataggaaggaaaaggttcttcggaataaggccatatcattggttaaaatactttggagtaaccaataaggtggtggaagccacctaggaattagagtctggcatgagggctaaacatccagagttattcatgtcagattttgaggacaaaatccttttaatggtgggataattataatagtcgcatacttagaatatgaattagtagggtaattaacatcaattatttgaattttatggttatatgtgaatatcttatgttgtgggccttattttcaagaattaggaattaagattataatttttcaattttagagattttattaaactctaggtgtattatttatgttacatgtaaaatttatcatttttatgatttttgctcggtaatgatagaaatgcgagggttatggttgtggaccattttatccttaagccttacgattgagtaagggtgaagtaagggtaaaattagaattttgctatttattggttgttgtcttttagagggatattatagaataatctcacttattctaatttgtgcaactagagtaaaacaaatagaattaggggtttattcatttatagcaaataagaaaattaaataaaccttatctctctctctct

SEQ ID NO: 239543 - DNA, 1547 bp, Cannabis indica
atgcatgagaatctttttattgagtatcctttattgccttcttctaatcttccgaataggatgtaatgtcatctagagtagtgactccctcttcaatagttttctaaagattttgtgattaaaaatagctactaattttaattaaccaaaaatcatagttttatccataaaaaattagaagaggtaaagaagagcggttggattcggaactcatagtgatgatgagtagcaaatattatgcccattaatgatcgaacagaggtctgataccactgatggtttgagaattaatttttattagtttaattagtttagaatatatgaatatgtaggataatgtgtttaatgattgttgtggtaatgtgttgtagttttgatattgatgagtagttattgatttagtatatgagaattatttggcttagaagacagaattgtatgtagaaaataataagctttattaagagtttgtagttgtttggtttggatgttggttacaattttgaatcctaacttgatggtatttatagtagctcacatatttattctagatctttattctattaaaaagaactttatccatacaaatgtcttatttctaaaatacaaactagaattttctacaatattaatttttagaaatgtttataagaaattcttgaataaatttttttacacgtacctaaataatttttgagtaaactttttcttcaaatgtgtagaaatttctaaattaaagtattgtagaaatgtgtagcacattttgaatagaacgaaaggggcaaatacagaaatcaactaaagaaaagacagttgacaagggaatgtatcagctattagtgggagagctgatctacttattccacagaagacttgcatttgttcccaacaacatggatagttttacatgcatatatcattagaggaaaaattggagtttgtgtatagagtacattacataaagggaatactttaaaatggataaatattcctcaagaaagaaaaaagagggattgaggcttttacagatgcagattattgggcaggtttagtgtgattaaatttagaagtgtttggttaaggtgcatgaggtttcatctgatcaaaatcaattaacaatgaaaggagtagtccatttatcttatatatgacattttattttttcaaatgaaaaatgtgggacaaactctaatacacactcctctcgtttaggcctaaaatgtgtgagtataacgaacgactttaaagagactatagggccaaatgtgacatttgaaagaaattcacaaggccaaatcaagttctcaaatggtggttgaagggaagagagcagaggtttttttttttttggctctgatagtatgttagaatttaggaatatatggtaagggatatagtgttcaatcatctcaaaaataattagcaataagaggagttgtctattcattttatgtatgatattttatttccacacattaacaatgtaggagtaactctaataatttgtaagaacatcaacaactagaatttgtactcatgtattaggg

SEQ ID NO: 239544 - DNA, 978 bp, Cannabis indica
aacactaaaaaactattatttcataatttttttttttcaattctaaccacaacactaaaaattccactgaattttatattctttattattatattattttattaatataataagaatattttaatactaaatatatataattatttagtttttttcttaaaaatattatttaattattaaaatttttaaaaatgaatagtgtagactatggtgtttattaaatttagtgtgatactgtaaacaaaattatttatgagtttatttatagtgttctattaagataaatatagtgtgaaagcaaattatatatatttaatgttttagaggcgaattagagatggcgttagattggattgtatagtattattatgtcttgtaggtagtgtacagtgtacagatgtgaattgaaataattagagcaaggtgtgtttgtctagggaagagaggagctgaaacaaaaataaaagtagcccacttgcactgctacatctttcataatttttatattagaatactacattatcctatgtatgtatatagtcaagttgcagaaaactaaatctgtttttattcatggtgccgttaataatgaagatgtgtcatgcacgtggtgacctattcatgatatatgaataaacctgcatcattatatcatctatattaccataatttaatgggatatatgaggtacacaattctttttatggtaaagtatccgatattaacattagtaaaattgagtcgagatttgggtcacggttctgttaaaattacaattttgagatttttgacgatctatgaaatataaaaatttcaaaaatatataaataaaaaaataaccataataataaagaagttacgagaaagacggaacgagagagagaagattgaacaatgctcgttgtggctcgtggttgcacttctgtcttctaacaagagagagagagagagagagagagagagagagagagtagttag

SEQ ID NO: 239545 - DNA, 2089 bp, Cannabis indica
tatgtgggtgtgagggcccaatgggggcttgaagcagggacgtcacaaatgggatcaaagccttaacccaaccagaagtgtggtcgacgaggacatcagaccccgtaagggggtgattgtaacagttaatagtcccgtgatctgttagggaggtaagttgtgcaatcctacattgcttgggaaaggtcaagtgtgatgattctgagattgtgtaggtatgggactacacagttgaagatggcttaaatggagtgattagtactacctatatcaataaagtgcatcttatttttaggtagcccatcacgaaagaactccagagttaagcgtgtgtgacctggggtaatttcaagatgggtgacctcatggaaagtttttccagaaagtgtgcgagtgaggacaaggcatgctgaaaatactcatgttgatctatagggctaattgtgaatctagaaagcagccaaagtggtgtacacgtatataagagccatcattccatgggtgtgaaggcccaatggagacttgaagtgggaatgttacaaaataatatcagagcgaggttttgatcctgagacttgtgggttatgggcccaccacgcttttgatgtgccactctgataccattttataacatcctcacttcaagcctctactgagaaaaaacatgctaaatgagcttaatatgatgaatttgtcatagaattcggagttctatgatataatgggtgaaaaaattataagttttggatgttcaaaacgtttcatttgtgattgaaaatcaagtctaaatcttcaagccaatttttgactatgatttgtttactttcaagaaaagttttatgaataaaagttctagatctttcttttagcttttcaaaacatcttgaatcatccaatttcgaaaaatattgaaagatttatggccaaaatattattggtcattgcacaaagaagcttgcagtctaaaaattagctactcgggctacaactttgaaagagctatgtcgcggctcgcctgtttttagaggcctagtagggtatttaaaccctaattttgaaggagaaaagggcattttcattaggcaacttggaagcacaaaaataagagagaaaagggagatttttcaagcacaaccattatttttcttcaattcttctcttctatcttttattttaagtttcaatttttcatttacaattgtttagaatgattattatgagctaaactcatacataggatttttaatggatattaattgatacttttctatggtttaatgcaattctagtttttttttcgatttcttatgtgaatctatttcatttgtgtttaatacttttaattccttgatcacaaattatttgttttataatctcaatgtaaaatttgaaaagtgagttttgattatgctatagtgaaataaacgtagatttcgatattgaacgaacgtacttgtatggtctatgtaacaattaggatttctttatttaatgtaaactatatgtgtaatttaccacagaagtgtaggactttttcatatgatttagagtttgtatgtgctcactaaaatatatattgaactaataatctgccatcacatgaaattgaagagtaattagattgtatttttccatcggaaattgatgtaattgacattagatactttatatttttaatcattgttaattatcgttttctttatttattttattttttattattaaattacaactatcattcaaattattgccaaatagaaataaagattcaattatttggtaattagctatagtccttgtaggatcaacctcactcttgtgagtattacttgtaaacgatacgtgcacttaggggtgttcaccaaaatttacaaaccgcccaacccgaataaaccgcccaaaccaaactgaataaatcgacaaaaaatacaacctgaaataatacaatgaaaatctaaacctctcaatgaatatattgggtggttaacaaattattttaaaccgcccaattaactcgaataatctgagttaaactaatttatatattttttaataaaagtgtacatatattatattacataaattacat

SEQ ID NO: 239546 - DNA, 850 bp, Cannabis indica
ggtaaaatatatccaacacttcaaactcacacctgtcaagtttcttctctaaggacatcaaaagatcaaacattgacccttctcccagaatgtcacacttcttgtaccaaggaatgagtttccaaatctttttgactttgtcacaactccataatgcatgagtaagagtttcaggatggttttcacaaagataacatcaggggcttacatccatacctctatgaattaagtttgtctttgctggtagccaattgtgacaaactctccacccaaaaagcttcatctgaggaggcacctgcaggctccaaatcatttttcgccatttattaacttcttccatgtttgaacatctagtggggtgaagatttatctcccttccaactctatagccacttttaacaatgtattcaccatttggagtgtagggccaagttaaagtatcttctatgtataagtctattggaattccttgtatccatgggatgtcttccttatgaaaatgctttgtgatctcctccatattccaatttccatcccaagttatgaaattatgaagcttggtctgtggtggaaggccgggatgttgtgttagcattgccccatgaggccgtggtagccatttttcctcccaaacccggatctctctaccatttccaaccctccatctagcctcttccttcagaatcttcctaccccaacaaattcctttccacacacaagaagccccggtaggacagcccgcttccatgaaggaagtaagaggatagtaactattcttcaggacctgagaaagaagagattgtggattatggatgagtctccacccttgtttggccaaaagagcttggtt

SEQ ID NO: 239547 - DNA, 1461 bp, Cannabis indica
aaagcacaataatacataagtcaccataatacaaattttaaatagtcttgagataaaactaagtaacatattttattaagttttctctctctggagccttctagtaagcatgcagtccctcttctcgtcttcttcatgttcatgtttggttcctcttatggaggatttggtccaccctaactggtatagtggtgggttgactttgtgtaaatatccttttttgcctacttctccttcctccctatgtaataaatgctctaggtgttattatgtttccatttcacatctcattaaatttgatcagagcattaatttctctaaatctttctttctgctctctaaacccttctttttgccctccctaattaattttccccatcattccattttgtcttctcgccatttactctagattttccatatctctgttcagaaaaacccccttgattcttgcaatttggaggcggacgatcagtatcccagagtctttcaggctcttctcattattacagcttcaatggaagcgactttggacgtgactagggcggttctcaggtgtatcatccgagctttttggttctatatatataattccaaattcaggtattttgttcctcatcaccttctctttgccttgcttatttctgttcatactgttgtgttttctctctttcttgaaatggatgagttttaggtaatgtgtctaataccctggttcttacccctgatgagtccactgttttgacctatgatactggttcttccagttctgatcctgccccaattagtctccttcttaagttgcacactattcgtcctttcaatcggccttccctgatgaagaccctatctggtatctggtcatcacagtgtaggtttcttgttactgtttttaagcatgccgatggcatgtttcttgtatcatttggctgtgaaggggataagggtagaattctagagggtcaaccgtggcattttggccagtgtattaccatctttgctgctcctgatagttccttcccacttacttctgataaccttcattatgtccctttttggattcaagtgtatggtatcccatttatgtgtaagtcctatgaccttgctagatttatagctatggagattggggaccttattgaggttgataaggacactattagggaaggtactggtccttatttgtgtctgagagttcttttggatgtcaatttgcctattaggaggggtatgaatattaaattcattaggatggggcgtgagtttcttaaatggattgactttaagtatgaaagattgcctgacttctatttcttttgtgggaagctagatcatacaaagaaattttgtgtggctttcttacaaagatgtgatgaactcctcactaaacctttgtgcccctataatattcttcttagaggcaaagaaaagatcactgataagtctcagcctttttcaata

SEQ ID NO: 239548 - DNA, 2347 bp, Cannabis indica
tagatttacatggacttatttgcgaagtataaatatgatcctattaatgtgattctccaatttatttcctatgttaaaaatcaattttcttgttctgttaaaaggtttaagtctgataatgcccctgaattggcattcaaagatctgtttcaacagcaaggaattctacatgactatacttgtgtagaaacccctgagcagaatgtaattgctgaaaggaagcaccagcatttgctcaatgtggccagggctatctactttcaagccaatatacctattcgtttttggagtgagtgtgtaatgactgctgcattttttattaatcgaacacctactccaaacctgaaaaataaatctccatatgaactattattcaaaaagcaacctgattatgcatatttgagaactttcggttgccttgtttttgcatccaccctcactgcacatcgcatcaaatttgatgctagggccaaagcttgtgtttttcttggatatccccaaggtgtgaaaggatataaattgtatgacttgaattcaaaacaatttttcatttcaagaaatgttgtttttcacgaaaacatttctccttttcacaaattaaatgaaaacaacagtggcattgatccttttcttacacctgcattgccttcctctaatataactaacactcctgttggagattatcctacaatacaaactaacaatgcaggaacaaggcttgaatctcccatcagcaactcaacacctactgttgcagcagaacccgacaacagtactgctgcatcaccacaacctggcaacaatcccactgatgtttcacaaacacctcatgaagcccctcctgatgttccaagaagaaccacaagaccaactagaccaccgagttacctcaaagattttgaatgttgttcatacattcaagatcaatcatctacaccacattctatagataaattcatctcttatacttgattggctaattcatacaaggctttcattcttgcagttacttcacagaaggagccacaaacatacaaacaagcaatacagttcagacaatggctcgatgctatgaacaatgaactcattgctctcagaaataacaagacctggtctgttgttccccttcctcctagaaaaagagccattgattgtcgatgggtgtacaaaatcaaacttaacagcgatggctcaattgaaagacacaaagctcgccttgttgctcagggatatactcagcaagagggactcgatttctttgatacattctcccctgtggccaaaatggtcacatttaagcttttacttgccatctctactattaaacaatggcacacactacaaattgatattaataacgcatttttaaatggtgatcttaatgaagaggtatacatgcaattacctcctggtctaactctccctgattctctatctgcagaatctaatctagtctgcaaacttcacaagtcgatctatggtttaaagcaatcgttgaggcagtggtacaagaaattattcgaagctctcatccaagaaggattcaatcaatctcaggcagattacaccttattattcactagaggcaacgaggacaatttcatagcattactggtctacgtggatgatattgttctcactggacctaatcttgataccttgcatcaacttcaacagtctctccattctagattcaaactaaaagctcttggacctttacattactttcttggcttcgaaattgccaaaggaaaggatggcttatttttgtctcaatgcaagtatgccattgagcttcttgaagaaactggatatgcaggcagcaagcctgcaaaagctcccatggacccccggaccaaattagacgatcaacagggagaaccactcacaaatccctcttactacagactagtagttggcaaactactctacctcactctgcccaggctagacataatgtatgctgtcaattgccttagtcagttcatgagcaaccctcgcagcactcatttgcaggccttgcatcatctccttagatacatcaaaggacatccgggccaaggtctattgtactctccacattcctctctacagcttaggggtttttcagactctgattgagcttcttgtcccatcacacgacgatctactacaggcttctgcatcttccttggagattgcttagtttcatacaaaactaaaaaacaaccaaccatctcccgaagttcagcagaagcagaatacagagccttggcagccaccaccagtgaaataacatggcttcaatacctcctcacggatttaagaattccttaaactacatcagcttttatctactgtgataatc

SEQ ID NO: 239549 - DNA, 2731 bp, Cannabis indica
aataagaatatattaaatgatattaattaaaagaatttattataaaaaagcaattaacctaatcatcatcaatatcaatatcttctctatcagaatcaacttcactcaaatactcatacagtgtttcatcattaataaacattcttccattatcatcaaaatcaccatcctcttctcgattatcaatatgtccattgtcaatatgtaattcagcaatcaattcattagaaagagttgttggtgccacgtctcgtcgaactagtgaagacgtctcaatgacttcctcaattggttcaaaagttggtaactcacttgattcttcttcttgaaaaatcccatgattcacaatttctggatcactaacgaattcattgtcagttgaatcatttgtatgctcgggcacatcaaatatgtttcgatgattaactttttggacaatcatccaatttttacccctacttcgatcacttagataaaaaacttgttgagcctgatcagccaagataaatggatcttcaacataccaattagaagtaatatcaattgatgtcaaatcaattgccattgttttacttcttggatcagtattgtaccatttacatcgaaagacaaaaacttttcgatgataaataaagtccaactctaagatttcaagtaaaacaccgtaataagtaatatttccactctcttcagtgccccctgttgaaactccgctacattgtgtgttgaacttatcatcacgttttttacaacgaaatcgaacaccatttataatgcaactattccatgatgtgtaacgatcatcagcaccttgtgacaaagaatacaaatcatctgttgcttcttgactgccattaaccttaagcattgccatctgtaatatttatttctttaataaatgtatttgatgacttaataaacttaatatcaaacataatttaccttggtcttaaaccaagaaaagaattcctctttatgagcagcttcaagatcttcttctcttacatatcttgaacgcaataattctttgtgctcactatattgagtgaaaagtaattatttaaatactaaaaataaatgtcctattaaaagtaattaggaaagtgaaaagggctcacctcaggtatttatccagttgttctccacaattatttaggatgtaccaatgcactatctggctatatgccccaagccttgcaaatgtagaagcccccatcattcgaattttattgttaaatatttctaaagaataatttgaggtaggtacacccaattacgctctgggcgtgtgaaacttgtttcaatattatgtatatatcttgatagaaaagtcacagcctcatcaacaacatatgcttctgtaatagaaccatctggacgtgcaaagttacgaacatagttcttgtatgtacccattcgtcgttcgggaccaaacatccatcttccacatactggcccacctaatagagcttgctcaggcaaatgcacacaaaggtgaaccattattgtaaaaaatgatggaggaaatattttctctagtttacacaatatcataatgattcctgatctcattttctcaatctcgatggcatataatgtcttggcacatagcttttggaagaactgacagaactcaatcaatgtgccacgtatttttttgtccaagtaaggaagaatagccactggaaatatcttttgaagtagcacgtgacaatcatgagttttcattcctgcaagagtattagagtcggtagcacatcgactaatatttgaagcatacccatctggtagtctaacagatttgataaaatcacaaaagcttgcgcattcttctttagttaatgtataattggcatgtggcttctcgtacttaccgttgcgctttcttaaccaaagttcttctcgaattttaagatcttccaagtccattcgtgcttgcggcaaaatcattaaagggagtctatgttttgtttaagtcaattaatttgtacttgctaaaatttgactaatgaatcttattttgggcgtggtcccatggactagtagcaatatgcaacgattgctgataccacgcacaaaatattgtgtgtcattttagtttttgcaattttattttctgcagtatatatttcggatctaccagctttggtttttgatacaatagatttcaattctattcaaacaattttataacagttctgcatgaattaaattatttgttaatttcacttggtaatattaaaaaatagaatttcaaaagtcgtcactaaaaataaacatcaatgacaacataagctgtcactaatatatttcttttttgttttgtttaataccgaaaaaacaatgtcgttattgatacccctataaatgataacattgtcctcactcaaattatatgttttaaaataaataaattttaattagatttcattttttttatttttataaaaattatttattataatggcctttgatttgtcttcctaattggatgaacactttacccaatattataattttatacttagtatatattttactatattaagtttctttcaagtaatatgttagaatacttattttgtttaatatatttttttttctcacaaaactgagtaagctacattcatatatttgaaaagatgatgcaaaatgttttaataatttcactaaaggagaacattaaaatcacgttaacaatgaaacttcaaaaagaaataaaaaaaaaaaa

SEQ ID NO: 239550 - DNA, 688 bp, Cannabis indica
caattctgcgacacaaccccttttccaaatgagttctggccttcaggatggccttccaaagtatagagtctgtggttttgatctctatgtccaagaaattccagtttttcagatatttggcatccattagttgtcgccacaggcttacctttcctgttaaaattttccaagcccacttcattaggaaggccttgtttatagcttcacttgatttaaatctgagtcccccattgactttaggagggcatagagtctcccaagcaatcagatgcagctttctctattgcggagaatcaccgcaccagaaatcccttaggattttatcaattttgtttgccgttaaagatggtatgacatcggaggatgctacatagttagccaaagaggaaccaacattcttgataaggcacgcctttcccgcataggataagaacttggatttccaaccttgtactctagacaacacacggtcaactaggaattttgtatcttcggtacgcttcagagacctaaacaaaggtatgcccaggtatgtagcctttttggacattcgcttcatccccagcagatgagaaattgattgtgcagtccgtgctggaacctttttagagaagaagaccgaggatttatcaagatttacggtttgtccagagtacttacaatattcatttaaactgtccatgaattg

SEQ ID NO: 239551 - DNA, 1600 bp, Cannabis indica
ttttattattgactacatataacatcatcaagtatgaacagatttcaaaagctttgaatctgtaatttaacttcaccttgtctttgcaattcttcaacccatttcttggctctaacaaacgtatcctttaagccacaaaaaatcaaatctttctcactcaaccatagttaaatcaaatctttgaatgtagccaaaatgtgaaaatggtgatttaccttagttgaaatgtcatagacaacaactgcagtagctgccccacgatagtacattggagctaagctatgataacgttcttgtcctgctgtgtcccatatatcaaatttcactgtggcttcagtcaacgacaatatttgtgtaaaaaaagctgcccctatagttggttcctatcatatatacatatatagcagaggagaattaatgattttgattcataataaaagaaaagaaaggaaaaaaaatggaatatatattttcatttgaatttattacttgatgattaaagaactggcctttcacaaatcttaataccaaactggtttttccagttcccatgtccccaagaagaacctgcatatatgtagttgaagatataaaatttttactaaaatgaatttagattaagaattgttatacaaaaatataaataaagggtaagacatacccaccagtttggcttgtatgatcttgtttcctggctttgccatgagaaaaaccaaaaatctagaattaatgaaagaaagaaagagaaataaatatagagaattggagagcaataattggctttttgttctgaaatgaatattaatgatgttgaaaaattgtacgtatattataaagaagatagcaatggatagtggattcaactcaagtaggactagtagttttgttgaatgttagtggttatttatttatttatttatttagtttttgcaattaatagtttaatgaattctgcattcacaatcacaatacaattcctttttcaaatcgaaattaattatttagcattttgatacgatctagagtttctttttccatccaaaatacgtagctttctataaatttacacgtcttttgaagtgatttttagtgacttacaatcgagtggtttgagagtttcaagaaattttacaatgtattaaaattaataataataagggttttttttttaactatgttaaatactttcaaaatgattattttgaaagaataatgataagaatgtttgagaaaattattgcatgatttgatccaaattggtcttattatatttaatgaaaagatgattgcttttccatatttgtttgcttatgcttaaagtgaaatttaagcgatttaattagtccattcatttcatatcatataaaaatgatttctacttcatataagaactaaacattggtatggacaggttggctccgaggggcggacccacatataatcgaggcggggcaatcgccctccctgaaaaaaaaatcgagaaaaaaatatttatgcaatttaattagttacaacatatatttgtaataaaagatgatatttgtaactataatattaattttaatataatggttaagctacttagcatataggttagagg

SEQ ID NO: 239552 - DNA, 1694 bp, Cannabis indica
gcattgtagcagcaagacgccagtcaaaactcagactcgagttacgccaaacagctcgagcataccggcaatgaaaaagggcatgtccaaccgattcccaagcttgtttacagaccgagcatgtagagtcagtaatcactttccttttgaccagcaaaattgcaacaggaagagcatcatggacagctttccaagcaaaaattttaactttcggcgggagttgcaatgaccaaaagaatttccaccaagaagagtgaacacgagaactagaactttgatccactgcatcaagatcagaagcaagatgatagcccgaactaactgtgtacatacctgtgctatggtgatgccaaataagagtgtcacgactgctgaaataactcaatgggatagttaagattctttccatatccgcaggagaaaaaaactgatgtaatacaggaacattccactgccgttcatcagaaataagattagcaacaacaccatttgatggacccttgtagagaaaggcaagaaagtactatgctagaaatgtgttatttaatttatttaatttattaaataaatcaatcaaacccatgagaaaatctcaaattttttaccaaacgtacacatcattctgttttttttttttaaaaaaaacacacacacatcattaaatcattgtaatatatgccaaccaaaaaccaattagcctgcttttaattctacgtgccagtatataatataaccgttgtaatttgtaattcacattaagaaaaaaaaaatcgaattgaatattattgtttacatatccaaaagcaacgtacatttttttcaattattttttctttttttaaaaaaataaacattttaggcaaatgattttttcctaattgataatatgtgccttattattcttaattttatcaacattacaaacattttagccaaatttcttgttatcattagtacatatataaataaatgataatgatttgatataaagaaaagttaagagcataaagaacattattaaaagtttccacaaactaacgataattatatagtaaattactaggccggtgacgactcatcaccacactcatctctcaatgatataatacaaatatatatattgataaatataaattaacgcatacaaataataatacgctaagttccaccaaaataataaataaataaaacgctaaagcatctgattccatttagcatttcgaataatatattgctacaatttttggtatctacatatatactataaatacgatatataatgtaaagacaaaacacttaacttattactattattttatttttacaaactaaaacttacttatcataatcatatacaaataattatataagcaatcatacaaaatatatattattatattgtgtaattgaattaattatagcacttacaatatatacatgtatattaattaaagatttaaaagttatttgagtagtagttaaatgtttggagtgtgtaaacatcataaagttaatttatgatcattgttattaagcagtagtggtgcctagaaccttcttaatactcgtgttgcgataaactagcgatactctccctaaaagttattatattaaattatatgaaacccgatactaattagttagaccaataacgatactaattaacacatataagggtgctaagcaccactgat

SEQ ID NO: 239553 - DNA, 1492 bp, Cannabis indica
atattccactgtgatgacgacactataattatgaacaaatacatatgttctggacttaatagaatttaaacattaaacaatcatgaagtaaatcatgtgaaccatgcaacataaaatccagtttctgatctttattaattagtaaatctgattatatcgaaatgggttttatttagggcacaaaacccaacaattaataccacaatactagggtacagttgacaaccctaagcacctaggctttgctagaccaaccatcttacaacaaatcaacatcacatgctaaccgtcactaacacacccacgtgcttcatggtcaagccttcagactgaattgtttcccatgttcaccaatagatgtcttaagtccatgtgcatctctttagatagcccttggtaactgtcactcacgtgtccaccccttgcgcacaccatctgagataactgacatcatgcacatcatgcgcatgcgcgctaatcaatcgatatttgtcatataaatatgaccaattttatgtattaatattcttaaattgattctttaaattattgattagtgtaattttaaatttttaagttattttgaagactaatcatgcacatcacgtgcgtgcggacacccacacatcgtgtcaccaatggatcccacaccttgaaccattaagccaaccctcttttgttggctaggagcaatcctatcgcctacaaccgacatcttaggatcttcctcaagagttgtccttggggtgtcatgcaccaccccctaaagagcaatatgaacttttaatccacaaccaggaacatatatgatttttcttttgtagacatgtagcctatcaccttggccatagtttcatatttttccaaactaactattaattcaacattccttaatacttatttaaggaccatggaacattcatttctcgggacaatatgagttttactcatagcatgcccacacatcatgttcagctccctactgctacacgatgcccactggcaaatgcaaatcaccctgttgctgtcaccagatgtcttgcaatcctgagtgatattaaggtttccattgcagatcttagtgagggtctcacagtgcctaacaaacaaataaaatctgaaaaaattgcgtaattttgaactttttactgtattcaaagaaaattggaaagaaaaaatgttgataacttcaaacatggtttaggcataggataacttcaaatcgcttttcatgaaaagtattgttgagaatcatggggttccatctcaaaaccaattggcaatgagtggagtaacacatgttcttatatatggctcaattctctaccatttattctatgcgagacaatgtccacaacaagtatatctttaacagagtcttaagatcgtatttcaaatataagaactccaataaaattataacctaattaattgtccctattttttggcttatgtgcataaacgaatgtgcaaaaagtgaagaaaaactcaa

SEQ ID NO: 239554 - DNA, 1340 bp, Cannabis indica
agaggggatgtactggtggaaaaaatggacatagaggacaacctaactgatccattcaccaaagtcttggcaggaactgcatttgaaaagcaccgtcagaatttaggatttattgaaatgtatagattgttttatattagtgcaagtgggagtttgttgggttttatgccctaaataaactttatttcaatgtaatgtctattatttaaatatcaataaagaaacaaaagtatttttatcacttattgtgtcattcgtagggatgcacaaaagctccacggggatggggacccgcggggatccgcccctaatggggtggggattctccggcttggcggggatcggggcgagggcggggctaatattctttacccgatttggagacgtggcggagtcggggatagtactacccaccccatttagtccccgattatgtatatatatagtattaggaattatattaactctgtttctatacatataatatcaattataattatgctaattttttgataatatcaattaatggagtaaatttctggtttaaaaacattaacgtattaattcaaattacactatttcctatatatattaaatgttgtagctgttatagaatatggataggcactagcaccactaattatgctattgatattgctaattgctagctgtttcatatgaatatgaaaagtctttgaagagtattaagtattaagattaatcctaaataattgttccatatatatgtaatatatgcctttctaggtttctctactctcttcaatctctttagtttccagaccaatctcatattttttctataaaactgcaacatgttcataacttgtgaattgtgactgtgagccttcatcgtgagtctttaatatatactaggaagggttatattcctcaacaacttgtggctgcatcagtaaggaggagtagacaaagaagattattcattggttggaatggtaagcattaaactattactattattgtattataaggtactctgtttatgtatattatttaatgataaaaagagagtattttttttatcttttatggtcaatataggatgctcaataatcaatatagtcattgataaattatatacttaaaaaagaatttatttatttatttatttatatataattactatttatcttatatgtgtgtgcatgaactacatagtttcatacataagaagaatgaatttttatgtatattcatataggttttgtattttgtgaatgaaaataagtcaaagagagatatcttttgactaaatgagcctataaaattgcatacgtgtataaatacaaaacatgatatac

SEQ ID NO: 239555 - DNA, 1806 bp, Cannabis indica
tttaagtaggattataagcctactctaatacccacataatcacatatttaataaaatatggccaaataaatatcaatataattctcgggatattacatgggccttggaaccagacccagatcggaactcgggactcatgcccaaacgtggatctagattggaacctagatctggacccagtccgagattagaacttgaaccctaactcggacaaggacttgaaccccaacctggtcttggactcggaccgagacctaaggctcggatctagatggggaacctaaactcgggacacgggcatcagaactaggaccgagacctaggaccggaccccagaccaagaccttgatttagaacctagactgggacctgggacccaaactggtactagattgggacacgagactgttatctagatctagacccgaggcttggacctaacctgtgttcagtgtttggatctaagacccaaaaccggactcggacccagacccagacccgaacccagacccgtaccccaaacctgggtccaagtccgagtctaggtttgagtccgagaactggaatctgactaggacacagacctagacccagaccgagatgcggacccgaatcaaaactcagatcgggactcgggacacgtacccaaacccagacacggacttggacccatactcggacctaggatcgaaacagggattggagactcagagttggacccaggaccctgacctagattgaggacccaaactcaaaattagaagtagaatcgtgacccaatactaggactgggacccaagacccgacccggtctcaatcccaaacccgaacccgaacacgaacacggacagtgacccaagatccgaattgaaatgagatcgagacccatgattgggatgtagatcttgacccacgactcggggcttggacccaacctgtagtcggtgtctagatcttggaattgtaccaagacctggacttggaacaatttctagaccaggacccaaacccagacttggacccgagacccaaaatcagaacaagaaccgcaatcaagaccctggaagaagaattggacatggtcccaaaacaagatctagacgcgaaaccaaacacggacctggacctagactagtatcgatacccgcaccaagacccagaatttcgccaggacctgggaccaagaacccggaacccagacttggaccagaaccgagacccgtaccagaacccaaacccaaacccagaccaagacccggaaccagacacgggctaaaacccggacccagaccaagacctggacccgaactcgtagtagaactcggactccaacacaggactcgaacccggaccgagattaggattggaacctagtcctggactaggaccgagacctgaacttggattgggacgagaactcggactgggacagagaccaggacccgggactgggagtgagacccaggaccgggacctaagaaacaaagcgagacccagacccaaacaaggccaagacccgagacaagcatcagtaccgaacacagaccgagacctacactcagattgggaccctaacctagatcgggacctagggccctgacctgaatcagggactcggacccatgactcaggacccaagaccctaacttagacccaaacctggaccttagagctaaaccaagacccaagacatgagctaaaaatggaccaggatattgatttggacttggaaccaagactcgaggcttgcaccgacccatagtcagtgtctaaatcattgaatcagacctagacccagacctagac

SEQ ID NO: 239556 - DNA, 1500 bp, Cannabis indica
agtaaagtaaaatccaagcccttttcagatcaaagtgcagagtatattatccaaaatatgacaaaaaattataaaaatcgatttccacaagtagtttactcagccattcaatttatgataataactgagctatcattgggaaaaaaaaaaggtcgaattcgaacctgtcacctgagatgtgtgaaactttgccgacggtttgaaatgagagtgaggcaagatcctctgagtttttcaagcaaaaacccgaccaaagaataaaaaaaaaaaaaactgtgcgcgtgagatattggctgggagagtgtggagtgcataaaaattgctaaagagagtgagagatggaggcggttcagatatgttgggttaggggtaagatgtttattgataattacaccaccttcaaatttttaattttttttatttttatactgtacagtaaattttttaaaaaaataatgtgtatgttttatactgtgtactgcgttaaatttttactgttgttctactgttaattttttagttgttctactgttatttttagttgttctatttgtgttctaatgatgttttataaaaaaacagtatttttgaaaagatttccgtgtgatagtatttttgtaaaagttaacccaaattccagtatttttgtaagtttccatataattattattattaagtaacgagccgagttgggttgattgggctagaaataacctagaaatgggataaattgagaaataattttttttatttattaattaaaaatatttttatagtatattttattaaaggctaattaagatttttgtcctctgaactttgacatgtatgaaatcttgccccctgaacttttaagatcgttaaaaatgctctctaaactattgaaattgttagatttaatgactttttttttaaattttaataaaaaaatctaacatggatgaaagtccaggggtcgtaatttagtacatgtcaaggttcgaggggcatgatttgctagatataaaagtctaagaagcatgttttagtatataaacaatcactgaaatagtaaaattgaatgaaattagacaaaagtccttaaatccaacaatctcaatagttcagggggcatttttaacgaccttaaaagttcaagggcatgatttggtacatatcaaagttcaggggacaaaaatcctaattgacatttattaagatatatccaccatcatccttcacttaagtctagcactaatttacattaacttaaggggtttaataaagacatcacctataaaagtggatatatcttaaataatataaaaataaagatacaaattaaaacaaataaagtaaaatggatatataatgtaatttttttcatcttttttccaacccatatatacaatacgaattttggggttcactacaaaaaaatttacttttagtcacaacaaaaatttgtgactaaaaataaaaaaaattgtgactaattataaattatcattattgtgttat

SEQ ID NO: 239557 - DNA, 759 bp, Cannabis indica
aaaagtagacttttaattattaattttgataattatagagatatatttaaattttaggtgtatttttatgtccggtaacaatggaatacgatgtttggcctgtagagtcacttagacaaggtttagtaacttggttttagcagggcattatagatagacatttagaatgtcgggtatttatggagttatggcttaagactattttacccctaaataggttgtttatttaatggctaagctaagggtattttgatcatttccttagttaattatgaattttagttagtggagtttttagtatatccctaattgattttaagctgaatattatttagattaattatctttttcttaagaaaatcaatagaaatcataaaaatcaagcaaacatctttctctctctttggtgtgttcggctaaaactcaaacccaaaggaactaagtttactccatattttcagaccagattgggaggtgatctcaacctagaatctaagagtattggtaacctagccaaggttacctcttttcccttgttttcttcaataaaagtaagagttcatgcatgaattttagggttttagtttctattttgttgaggaatgagtttttagtttctgcagtttttatgttgttgtttgagtagttttgggtaggttttgatggttgtagttgtgttttaacttgagttgaattctcaagctctaagtggatcctttaatggtagtttttaaattttttagcttgatgatggatttt

SEQ ID NO: 239558 - DNA, 2965 bp, Cannabis indica
tgaaacgcactttggtcctaacacagtcacaagtgcagcaaaatatttgaactttacttttagtactgcaaactattcggaattttctgaaaatttacaagtgatcttaaataactatattatatatgatcatgaaaagaattagactaaaaagctatcctggataacgaaacagataaggggtgtacctaaacactcattttagaaagtgtactttagatttttcctacatatctatctaattccatgtgtaaaaggttaattagatgtctaaataatcttattgtttgtcaggctggacttcctcctggtgttgtgaatgtggtttctggttatggtcctactgctggagcagctcttgccagtcatatggatgttgataaggtgaaacatttgcattaatacttaccaccatttttcctgaaccaattttttttgtctaagaatgttgtaagcaaacagactgaaccattactttgattgtagcattttagtttgcttagcctttgtgctaaatctaccaattaatctctttgcagcttgcttttactggttcaactgtgacaggtaaaactgtacttgaacttgctgcaagaagcaatctcaaaccagtaactttggagcttggagggaaatccccatttattgtttttgatgatgctgatgtggatcatgctgttgagttggcacattttgccctcttctttaatcaagtatgtaataaaagatttctctttaaacttgattgattctgcaaaagaaaaaagaaaataaattcattggtaagaaccatttgcttcccttttgcagggacaatgctgttgtgctggttcaagaacttatgtccatgaaaatgtgtatgaagagtttgtagagaaagcgaaggcgcgtgcaatgaaacgtgttgttggtgatccattcaaggcaggcattgaacaaggccctcaggtaaatcagtggcttttagctctatgatatcactcatttgaacagtttaggaagccccaattggattttgattttggtttctgaactaatgttcaatttgttagaaatttataaaacatcaggaatccattcagatgatttagagaagcagatcatcagatgaaccaaaagcatacaattgtgatgagaaaatatgtattaataaagttaagaagggagcaagaaaaccctttgggccttctcatcaaagatttcagttatctagattaactcacacttctgcttttactagactccattagagctataaatcactaactatatgagaaacgataaaaaactattcatcaactcataaaattacaatgttataagcccaaaataaaattaaggtattatgttgtgttaatgattaatgctctattaatgtttcagattgacccagaacaatttaacaagatcctgaattacataagatctggaaaagaaagtggagctaagttggaaactggaggagacaaaattggctcaaagggttactatattcagcccacagttttctcagatgttaaggtattattatatttaccttttccataaccaaattagccattttttgacacttgaaagtatgattatgatcaatctaacattgctatcccttattttgtcaaggatgacatgttgatagcaaaggatgagatatttgggccagttcaatccatcttgaaattcaagtgagataattctctgccctttataacaccataaaagttttctcattctattaaaacttgtaacatttttgagtgattgcagggaccttgatgaggtgattaaaagggctaataacagtcagtatggtcttgctgctggagtctttacaaagaacatggacactgctaacaccttgactcgagcattgcgagttggcactgtttggatcaattgctttgatgtgtttgatgctgcaattccttttggtggatacaaaatgagtggaattggaagagaaaagggtatttacagtctaaataattacttgcaagtaaagtctgttgtcacacctttgaaaagcccagcttggctttagtttgatcataatataggcattgtcaaaataataaggcttgacacatcatgatgtaactacaactttgagcttgtgagatgttttttcttatataaatgttttcttttttaaattataaaaatcccatttagtgaacttttgtaccaacttgcaaagattaacgaggtctcccatattataataatgagagtataatatattaatacgaattatttattcaaattaaatcactattcattttgagtacgtacacaactaattcacgagtataaacactcaggaaaaaaaaataaactagcaattttctctatctagaaaaatattttttagaacacagacatcaaatcaaacagcacttgataaattatgaagcctaaagacaagagagtagaccggaaaaagattatgaagatcaagtactctattcctttcattattgggaaaaagtcgcctaactattggagtttgggccagaatagtttggtggtgtgtatatgttggtatataataaatacatgccagaaatcaatatagaaatgcagattgtaagaaccactattttttgtagtgacaaattatgtctagttgcattctagttgtgtttgggattcgtagtattttgtctggagttcgtactattagtgttagtccacgtcagcaaagatattttgggttttaattgttcagatggtaacaaatgtctttttcgggttttttggtttagctgggtttaaatacaacttctgggtattatgttgaggaacctttttgattggagattacggattacatttctttcttcttgtttcgtctatatgttccatggcaggtgatctttgagcttggaggtattaatccaaagttgcagatcagattttgagttcagaatgaagggattttagtattatcttttttttttttttt

SEQ ID NO: 239559 - DNA, 600 bp, Cannabis indica
tgagtttatgttagatttagggttgaatttggtcaaatttgtattttgaatgaaaaattagttcttacgcatgtctttctattgttgaaataagtaaatattgaagatgtagatccgatagtggcccgaatctaccaatttttttacacaaaaaagaggtagcatcggaccactatcgaacgtatattttaaacctttattcagtttaacaacaaaaaagaaaatatcaggcctgcatcagactaccatcggaccactcttgcggccgtgaccatgatctaccatattcttattcatacaaattttagttttgttacgaactggatgtaggtagtataccataacagggcgtatagcaatgaaaaaccttattgaatgtttgagcttcctctaacataataaatatatttcatttcattgttgatgatatctatttttttacaggttcctgttattgtagaagagtttgataacagtgttgtaaaaacatgagatcattctatgttctctgatgttaaaatgattataatttaattagagcacgaagaaaatgattatataaattaatgaatattctaatatttttcacaaccaaaagag

SEQ ID NO: 239560 - DNA, 1113 bp, Cannabis indica
ttctatcttatgagcttctaccattgtttcatattttgcaagtcaaatacagtctgttggaatttattttaccaggatcttagatctactcacaagtatatttattaacaccctaaatatgaactttctaaaacgatgaaataaacacatataaagtttaggaaaccttaagattttctctctcttcgtgcgctctgcaactcgacttgagttggtgccatggcgaaattgagggcacggaatgtggggaaatcgaaaggttcagggaagaaggttaagaagaaaggggcgacgtcgatggcggatgtcaagaagacgaaatccatggaagagatccttggtgttgaacccttggaactcacggaggaagaaggagatgacgaaccagatgtgttttagcctctatctccgaagtcatcttggaaagaggttcttcaacaagagattgctgaggattttggtcattttctatctgcgaatcgagcgtgccaggactcgttagcttctggcaaaagggctgctccaccaattctcagatctggaggggtcatcagaaacctggaaggagcattttcagggcattaaacagagcagaaggtgcgaatttcagatgaggacattgctgaagaaatttcgtactggcagtctgctattgtttgctatgtacttggtgcaaatccccctctctcggttctagatggctttgctagaaggatttggaaaggaaaggtggataaaataggtatgatctcttatggtatcttcattatcagatttgatagttgtgaatttagagatgaagttttatcagggggatatattttctttaataagaggccagttataatgaaagcttgggatcctaatgttaatcttaagaaagaggatgttcgatctgttcctgtatgggttcaacttgaggatttagaacttaagtattggggagagaggtctctctttaagattagggcaagtaggaaagcctatcatggtggataatgttaccaaggatagagataagcttgcatatccgagagtattaattgaagtgactatggatcaagaatttcacgagaggatttactttgagaatgaaatgggctatgaggtttc

SEQ ID NO: 239561 - DNA, 1347 bp, Cannabis indica
tctcaaaatttaaatattaaaatagaaggacaaattataagtatattgagagaagagtagaagacaatggcaatggaaatgggaatgggagatgaagggtttcgcaagtggggatggccaattaagtgagaaagccatcaaaatgggacccaagttttggtgaagataggctggctgatgttgctatttctatttctatatttgtatgtatatgttatgtgtatatgtataaataatgtatgggccaaattcctacatatgtctaatctaaatacaatacatcacctcagcccttagcttagggtcccaactctcaaccatatggttaattaaattgattaaccattccaataccacttctttaattaaatttatttggttaatgaaataaaaacaaattattttaaccattatcatattatattagatttattttacattattaatatggtattttgttatttggttgacacaaatggccataccattttcttatttttatcaagtgaacacgatctaaaaccaattatcatccaaatgattttactttacctcaattcaatgtacatgtcagcaagttggtagtgattagtttctcaatgtcatcatgacacgtcattatatcttagctataatatacagagatataaaatgcttggcgaaagaaaaagagagaaagaaattcgttcacattgttgaaatatagttcacatttttttttcttttttgagaaaaaaataataatttcattaaaaggttaaaatttaaagagattcaataatcattataagcatgataaattaaataagcagtaaacccaaccaacaaatacgggaagatggcgtttggttggaagtaatgaaatggaatagaatggaaaggaaacaattttcattccattcttttgtttggttgcattttaaaatattggaatagcattccaatggaatgctctttccaccattttggtagaatgactattccattttaaaaagaaatgaatggccattccaatgtaataagaaaaaaaatttaatgatttttttatcaatttttttatgcattttaaattttatttcattccattcctattcctattcccattcctattcctattcctatattttcattcctcccaaccaaacgcctggattttattttttatatccaatccattccgcataatagctcaaatccaatcaaatccacaaaaactgcggattaaatcagttattttagattggttactttttaatattaaattatttaatatttatgaaaaaaaatatttttacttctacataactagtaacaaaataaataaattattgttatttatgtcacaaa

SEQ ID NO: 239562 - DNA, 1501 bp, Cannabis indica
actctatttaattaaatatataaatcgagaatgttaatgggtagatgtgaagcttaatttaatatataaatggagaatgttatataattaattaaataatttttttaaaagaaataataaagagaaattttgagaactgtgagtgtgtgtgaagtggtgtaattattagagatgttggtctcttttttgagaagtatttttaattataaatgtttgattgctttgtttacaagttgggagatgggagttggaagctgtgcttgacactgattttgttctcaaatgatctttctttcacgttctcttccctaccataataatactctaaagggtcattttagtatattttttaatttaattttttttttcataattatatatattgtaaatatttaagaattaattatgtaaatttttaaaaaattttaaaatgtttatcatcatataaaaataagatttaaacaattatttatcacaagtataatttctctcatattacaattattttaatattgttataattttttaataaccaactcttttttaatattatgattttttttatcatacttattttaataatattttgaaaaagtaattatataatttttaattacgttatattttaagaattattacacaatattattataattttttaacaaaaactatttattaatgttacaattttttaataataacactttgagtttgttaacataaacattaaccaaaataatacttattatttgtcacaaataaaatctaaatgtaattataaattcataaaatctaataatacaattcttacattaaccaaaatattaatacatgtgtgacaaatgaaattggtgtgaagaatctgtagcttgcatgattaacatcattgatggactcagggccggccctaggcataggcgggctaggcccgtgcctagggcccacactttccgggggcccaaaataaaaaaataaaaaaaattattaagcttttctttaagtaaaatttaagtgtaatataagcaacaaatatttatagctaagttggttgaggtggaggacataatgcccaaggtcatgggttcaaatcccataaattttcagggccggccctgatggactcactattgactatactaactctgcaacttttaaccaaaactaaatttaaccgaataactcatggagaatgtctcgtccggagatggccatggccacatctccgacctcaagttgtattcaatctaacagggaagacattttcttcatcttcatggacattttctttattatgataaaattgaccgtttacaacttgacaaaaattgtcaaaaaatttgtaaagtgcggcatttagtaatccataagtaactttaagaaaatagaggatccaaaataagagagagagccagccgaaaagaggaattaaaatacagagtagcaaagctgaagcgagagcaccaaacaagaagctgaactttgttgcattattattctgctg

SEQ ID NO: 239563 - DNA, 1786 bp, Cannabis indica
aatgaaagctcctcttacgagtgctttggtctgtgattccgaaagctcttatacacactacgtggaagcaactatacttaagttgacgtggagatctctctcataacagagtttgttaagtttgttaaatcttaactaacttaacaacttaagttcttataggcaccaatttttaagatcttgatcctaaacttataaataccactaacatttatcatttcaaacacgacgatcaaattgagtttcgaggagggggagagatatattgagaggtagagagagaaatttacaaagcaaaaataaagattgagattggttttgtatgaagaattttttgtaaattaaaaagatttttgaataaagtgtgagagttaaaacactttaaaaattgttaaccttattttaattatttaaaatttagttaatttaattctccctcagtaatttcttacaccatttttttattgattttttttgtaaaacagatgttgattgagttttatgttagtaaaacattgaaattgtattttgttttaattattttacataaatatgagtacttatttaattgtcttgttttggcagctgggtagcaccttattccattgcaaaaatctattagtcacgttacttcaccatttttcatgaaattcttcttcaaacgccattgcagcgctctcccttacttcaatactcaaaataccataaacccattagccaaagaatcccaaatttgccaactttgtaggataggttctcttccggaagcatttcagattctgaactccattgatcccggcgaaatcacagtcaagccgattctatatgcttcccttctacaaactagcgtaaaagttcgttctttcaggcccggcctacaaatccatgctcatgtggttaagtctggcctcgagaccgatcggtttgtgggaaatagcttacttgctctgtatttcaagctgggttccagtattttggacactcggagtgtttttgataatcttgtagtcaaagatgtcatttcttggtcctcaatggttactgggtatcttcgggtgggaaaacccggcaaagcaattgcattgttttgggatatggtggggttcggggttgagccaaatgggttcactttatctgccgtgattaaagcttgttctgagcttcgtgacttgagacttggtcaatcttttcacgcaatggtgtcgagacgtgggttcgactcgaataatgtcattgttagttctttgattgatatgtatgggaggaattacgtattggaagatgcaaaacaagtgttcgatgaaatgcttgaaccagatgctatatgctggacatcaattatttcggccatgacaaggaacgattcgtttgaaaatgctttgacgttcttttacttgatgcagagaaatgctgggttgttgcctgatggctttacatttggaacggtgttgactgcttgtggtaatatggggaggctaaagcaaggtagagaagtgcattctaaggtcattacttgcgggctttgcggaaacgtggtcgttgagagtagcctagttgacatgtatgggaaatgtgggtcagttaacgcagctcaagctgtttttgatcggatgatggtgaagaactcagtttcgtggtctgcattgttgggagtatacagtcaaaatgggcaatttgaatctgttgtcaagctattcaggacgatggaaaaatttgacctttacagtttcggaactgttattcgggcttgtgctgctttagcagctgtaagacaaggcaaagaggt

SEQ ID NO: 239564 - DNA, 3289 bp, Cannabis indica
aaatatgtaacagtaccttccatgattgttcatcaacattgggcgggacatcatcaagaacaaggagaaatcgctttcgccttatttctgaaaaaacaagagcttgcagttccttaaaatcagagatagttgggtaattatgtgttataaatgaaataatttgtttcataatggcttttacatcaaaggcaacaccaagagacacccaaattgtaagatcaaaatgtgattttaccctttggtcatcacaaatgagcatagcaattattgttttgcctactcctccaatacccacaattggaatcaccattaaattcttgtcttcaacatcatcatcatccttcttcaacaacttttctgtgatttgtgctaggtgatgatcccttcccacaactataatttctccaccaacatttcctctctgctcttcctctgcctctgcctctggaaccgatgaattttgtagctgtttcacgatttgcatggcgttgtccattttggaagagattgagttgaagaaagcagtggtggtattcatcatcatcttcatcatcatgattagctttttgggtgctgacacgtggcgtgttctccaagtgagtgccaacatttttgtgagtaagtcatcaacatcagcaagtgaatcttttaatagtaacttatcactataaagcttcttcttcaactctgcatcatcaaatgaacctcgtagcattgaaaaatctttcttaatctcatcaagtctctgtttttctgtaatatccttcaaatctaaacactccaacaatcgttgaatccgatcaacaacgcccacaaggtttccttccgccatcagagtgattggtactttttttctctttagtaaaactttggttttttttagttaagcacaataatccatgcaaactgaacgaattattactaaaatagacccaaaaaaaaaactaataaaaacatattattttgagaataaatacacatgaatcatgcaaatacgacgaaaacaaacagagtttccctatattatatatgtaatttatgaaaaggataagtcaacaataattaataaagacattaaaatatggtgtttggtaattgaattagattggttaactgtagttagactgattgaagtctattaaattgttgagtttacactaacataatattaatttaaaagcaatcaaactaaatttaatattaaaattaatagcaaacaattaaaattgttcggtttggaaatgttgttagtggctgaaattttcatacaaatatttcattatttacttattgttaaagaaatttgtaatatagtataaaagaaatttaaaagaacttggagaacgttttaaacaagtgaaagcttaaatgattaataatattcattcaaaacataagaaaacaatacacatctaattgatagaatacaagagcagtaattaaaactagcaaattttgagtaacatgccttccttaaccatgtggtacctggtcagaaaattgtgttcctaaacccaaatgatacatgagtaaccaagtaaaactcaaaagttccccgcctttactaggctgctgcgcatgtgtggccgggctgcaattaatggctgcataagacatcaactcaacccacacttgagccatcaactcccactgctgctcctccagatttcgaagctctttcgagagaatgcaggcgtcaaacaacagagatttgctcttggttcccttcacaacagccgctctgtatggcgtttttactaacctcaacttttcacaagcttccttatgatttgaaatcgagtgtttcttaaaaaacttccttgtctctgcctgagtgtcttgtagtactatgcagaaatttcccatttcttgggatagcaaagtaggttggacaacaagttgataaaacatgtaatttgaaagaagctgagaaataccaacatactcatttctcttctgctcttcctcactaagattatgatagcaaagctcagtagctaagtgccatagaagaaggctctccaaatattggaattctctaatactccattcaagtttagaatagcttctactatgctgcaaaagggccaaaaggcctctttgtgaacaagcttctttagcaacttttaaatcctttacttctgaagataacatcttaagcttgttgaaaatgaagtcttccttttctttggtgacagtcactaaggaggaagacatcattgctctcattttttcaacgaatcctgttaatgtcaacaaaaatctagaaactttatagaccagttgtgtaaaccagttagatgagctgtagttgagcatgttgtattggaaaactgaccttgaccatctctttcttttccaaatacatgatggagtaagatacctaaccaatgagattctaaggatgccccattcagaaaataggagcataattatagagatgacatcaaagagaatggttcccaagagcaaagcttcagtaagtccaacatcaaacccagtatatccgcgtttatctgttaagagaaacaacacagatgcaaccgaaacagaggagaaacaaacaatcctaagaatgtatccaaacatgttctgtaacacagacattttggtgtgcataagatcatgcaagaagctgagttcatactcaatcaatctaaaagcaacagttgaatttctacaccgaagaaaataatcgcggcttgtttctcgagtttggtagctcaaaaatgaaccagtaaagagtatcttaaacttctcaaagaaataatgtgcagattttagtactttcaactcatctattttctcatcacagcctaacaaaatttcttgctcattgttataatgtgaggctatctttttatctggttccatttcaacttgtacaccccttgttgctgagtaagttgaaacagcttcttcatagtcacaacctggatctggttttggtaaaagagtttctccaaattgatcaaaccctgcattgagcagagctataaccctttcccatgacttgataagtccaaccccaaacactaggattgttgggaaccatagcttatcctttctagaaattgcaacgagaatgaagctataaatagttgccaaaacttgagaaatgagtccagtgagtgactttaaccagactccactatccccagttgaaaaagttgtaatactatcaggaccagcaagatgcaacaaaagaaactgtgcccaaaacatgtaaaggtctccacttttgtttggatcaaggagatttctagttggctttctgacagtttgacca

SEQ ID NO: 239565 - DNA, 1291 bp, Cannabis indica
aaaaactgaattctggtattttatatagaagaaaactgaaccaacgaccgatactcagccctaaacatagtctaagcatacattcctgaaaccctagaaaattagaccaaaactaaccttaaacttaagtaattcaaaggaaaagtctcaagatacataccttgatgcttaaaacaccttttaccccttgccaaaattagtccaatagctgaagattaagcaaaagaatccttggtttgtagctctttaggggttcgggtaggaagaagaaaggagaaaggcatgtggtgacttatttctatttaatttctaatctttatcttagtttataaaaataaactttaattaaaattagtttcagctaccaatcaaaaaagccaaaacccacaccactcaaatgaccattttacccctcctaaacccttaaattaaaatcaaaccctaggggtattttggtaattctagctaattcgccaaaccgacaacctaacacactacactagcccaatataatttccaattcaatccatactttataatcgtgacatttctgaccactccgtcaagtttccatggtcgtcgggctcgaaaatattttatttgaaatatggtatccacgatactcgcatattccaataaaatctccgtaattaataaattacgctttaattaactatttattaaattcaaactaattaacctaagtaagatcataatcttactttattagcaaaataattacatatttaataaaatatgtccaatcaattaccatattattttctgggatattataactaccctctccttatcgaatttttgtcctcaaaatttacctgaatagctcaggatactgctcccgcatctgtaactctaactcccaagtcgcctcttcaatcttgttgttccgccacaacacttttactagcagaatagtcttgttccgcaataccttttctttcctgtccagaatctgaactagttgttcttcatatgacaagtaagtttgaagctcaatatcctcgtaacttaaaacatgagttatatcagacacatactttcgaagcatcgagacgtgaaatacgttatgaggcccagatagagcaagaggtaaagctaaccgataagctacctgacctactttctcaagaatctcaaacgggccaataaatctgggactcaatttttccctctttccaaacctccaaattcccttcattggggacacccgaaggaaaacaaaatccccgacttggaattcaatgtctctacgctttagatcagcgtagct

SEQ ID NO: 239566 - DNA, 2569 bp, Cannabis indica
ccaaaaaaacaacaagattattactacgcatagtaatttacggcataaaggcttaagtttaattttaagttataaataaatatataaatttaatttttgacggtaataatatttaagttatgattcttgaacttctgtaggtatctggctgttaagtgttaagtaaattattaggcggtaatctttaatttttggtctaggtcattaaatttttatttttttaaaaaaaataatttgaatatatcaataaaaaataacacgtagataatgacttgacatttaacaatgcctgcggaagtttcagaaatacaagttagatattattactgtcgaaatttaaacttgtgtatttatttacaaataaaaattacacttaaatatttatgctgcaaattacttatctactttttccaaaaacaagattgaaattgtaactaaattagtgtctttgaattgaagaaaaaaaatggattgttgatcacaaaaaacagccaaggcgcccattgtattatttctcttttttccttagatttaaaagtactagtaagctagtaactactaagtactcaacatgtaaatattgcgtgttaagaagaaaaaacatgcaaatatattacaagtgggattggactattgcatattcttagaaattagttcaccataattttacttctatatatatgaaatggtgcttacttaattactagacaatcttcaatgcataatttaaacgatatcaacacatacaaatttgtttgcttctagtatatgtggcactagtagtaaataagtcaatgaatggatattagaagaaaaaatatgaacaaatgttacatttaacacaatatttgtaattttgttggaaaaatattaaaaactacattgcaaataaatatcaaatcctatatattttcatttaattaaactaatttttgtgaaatcctcctactaaattgtacccataacaataaatatcaacaacaatatataatatacttcttcataaaaaaataaaagaataatatacctttgtgaagatacatgataatatttttttaaaagaaaatatttttgtggtatagtttctccacatgaaaaggtcttaaaaagttatttgtttcccggaagtatgttcccgaacagctaacatgtccatctagaataagtctcgtggaatgattattgccatccggaaaggagttcccagatgactatcatgtccactccgggtgtagtcctcaagaaagctagccttcctccgaaaagaagttccaaatgactagttgtttctcctaaaaaggagttacggatagtcggctccagatgactctttcctaccagggaagttcctccagcgagtgccatggttcgtgattccgaaagccctcatattcgctcctgaatgcacttatacttatactggcatggagatctctcttaaaagagagttggttaagttatttattgcctaactaacttaacaatcttgcttcttgcagccatcgactttaggatcttgatcctaagcctataaataccaccaacacttatcatttcagacacaatgatcagattgagtttcaagatagagagagaaaagattgagagatagagagagagaaaggtacagagaaaagagagagattggatttgggtttttgtataaagaatcttctgtagatgaagattcttgggtaaaaatgtgagagttgaaacagtttgagaaaactcatcaaagaggatcgatctcgactgtattgtacctgttcttgctcaatcaataaagagaatttagtggtgttccggatctaaagtatagccatatcagacttaaccaatatatacattggcgttgattttattattttactgctttaattgtttctggttgttcatactctctcattcttattttttctatgattactatttgtgttttgttaatcttgtcatcactaatcttttgattatttaaaatttagttattttgattttgtatcattagttataattttctcacaattttattaattaattgttatataataatttaatacacttaaaataagattcaaagagtctgttgtatgcgtacttcttttattttatatgtgtgaaataaactgtttgaaccttttgtattataaataattctaaatttctctcaatagatgtcttagattattacaatatatatacactgtcatatacaaaaattaattaaattaaaattattttgatatcaaaaacacaaaagattacatcggtacaccttttttaggaaataataatatgttgataacttcaccaaattgtcaccttattaatttgtaagtaaccattaaaaaaattccatatatatatatatatatgaaatttgttatacctaaatataaatataaaatttgtagtgataacataaacattgataatgttttttgaatggacataaacattgataattctttttagaatactacatgtttttttttttttaatttttactaacatgcttacttcattagaaataagaattatctttctagtggttgtttgagacgttgaatac

SEQ ID NO: 239567 - DNA, 1443 bp, Cannabis indica
ctctgccctttatatatatctctatcccgcatgttataaggcatgtcattatttaaccacctttgctgaatcaaaagtaagaacaaaataatgacaataaaactctactttattttttatggtattgtggggagtaaaatcaattcccaaacaggcaaataatcatcaagtttcattgaaattgaaacatataggacacacaaaaactatatatatatattacaaatattaaaaaaaacaaagtaattaattggttattataaattcactgcacccagaataatttggtttctatttttacagggaaagtactacacattgctagttctatgtaattatttgggaaagctaattttgtagttgttggcatattttttggggtaatatggaaatagttacaaacttatatgaaaaataaatgaaagacttatttgtttgtgaaataagacacaaaaattaataatgaataatgatatgatatccttctcaaaattataaatgagtatatattataaagacatgtatgtaagaagagaaaaagatcatcacaaatttggcttagtgagcatcactagatggttttattaatacttgccttctttcccttcaaagaaagtgtcctttggcctttagaagtgcacgaagtctctccacagtaagcccttggaaatccttaattgatgcctgattgcttgatccctcttcaagaaatccattttaaactcgtaagagaataatgacagcgtagtcatttagactaaaggaaatttaacgatcaaaagcataagataggtccaaccgaaataagtagctacacttagaactttttttgtgtgtgtatgcacagacacaagtctatgaatatgtgagtataccattctcaacataaacaaaccagaatatatattattttttataaaaactagaatatatatgtatattattctcataccgtgatattgtggtggtgcgaaggttggactccgaaccgacgaagagaagagaaagggggctggctcgtgtcgtgcgacagagaacggagaggggggctgggtgccgtcgtcgtcgacagagaagagaaggggctgggtcacgtcgtcgtcgacaaagaagagaagagagaagggggttgtgctagagagagagggggctgcgaagagagagtggcgggctgagttagattttgctgaaaaatagaattggggaggagggaaatataattaagtatattaaaaaaaaaaataggggcatatccgacggtttaaaaccgtcgggtatactcctatttttttgtactgatttattaattaataataaccgtcgcctattgttgtagctactgtttaaaaccgtcgggaatactcatttttcctgacggtttcaaacagttacttaatttttttagcgacggtcccccaaaaaaatcgttttcaaaaccgtcgc

SEQ ID NO: 239568 - DNA, 409 bp, Cannabis indica
ctcaaggatgatggtgatgaaaatcagaacaaacaattatcgaagcgtatcaccataaatgatttggcgggtaaggttgttcgatatggaagtcatgaagaagaaggcaaggacatgagaattgctggtctctgatgatgatgacagcacagacgttgatgataaagttagtgattttttcattcgcattatattgtttactgctaatatcaggaaaactgtttattatatcggtgtgtaattgtacaaatatctcctggttaaatttttttagggaaacagctggaactctaactttttgaaatgggcttctggtattattggtggagctgaacaatcaaagaagagtaaaagcacatcagtggtgagggattttatagttcatttgcttaaagcccttttcaaattt

SEQ ID NO: 239569 - DNA, 1681 bp, Cannabis indica
tgttgggatttttgcatcttcttccagcatttctaaaataaaaacatgtgcatgcaaatcatctgaagaattttctaatgtaaaaaagataagtgtaaaaatgacctctaccctgaacgcccaaaagcattttctcagacaaggatggaaagaacgtcatcatttgaagaatcttccacaatctcttcaactatggccttcctccttcccaaaaacatgctaaatgtttggatgggtaggctcctcctcaacgtccctgatacggatcggcttctcgaccatcgaagcgttgtctttagtttctccatcttgatagagcccatacttaatacaatttttttattgttgtcaatagatatatattcttattaaatattgacagctccataattccttaggctctatcccggtgtctgagaataaaacttggttggccgtaagtctttgcatactggaaggcaagacggttaacctccatctcatggatgatatagtagtcacgaagaaagccaccaatctttaagacagaggagtggtttttgttgatcagccacatgcaatcaagttgagaaaaataaaaatagctcgaacgatgatggcctagacaagtcttcaaatcaaagaaccaatttatgttgtagggtgaaggctccctccatctatagtgcatgtagaagatgtacatcacgactagatacttaatccctttttgtgtaaattgcctcgagaaaattttgtaatagttagccaacttcacgaagtatggatgaattagcaggagggcaccctgctgagcgtgcaggctggaccacacccacaaaccttcttcggtgtaatttttcaatttcctgtcgaatagaaagatgaccaccacattttcgagcagtcccttcttgtctaaattcctcaacctcttctcggtcagttttgaggggggagaagtccgcatcaaaccacactcctcctaatagtatgatggttgagcctcctcaagttccttgttcgtatagtggagacccctttctaggactatgcccacacattgataggatgtctatccttagtatacttttgtagccatggaacaacatgaaggcaaacctattgtccaaccctggtccttgacctcttccacttcaacatcggtgtctgaaagaatgtcttctacgctgatcctgaaagaagtttacttagtccgagccatatttcttgagctaggcaaatgtttggacaaaggatgatcaacagctataactactattgttgctttgactataggtctcctagaaggctctaggtcagcctctggaagagtgttcaagaaatttgtacagcctacgtacatccatttagaaggcaggtactgccttaaccctttgttttattcccaaatgaattgactgtacaagctcccaccgatgtgatccaaatagtaatggttttgcacagatggtacgaaaggtttagcttcgttgattaaaacctcccaatcgtcaaaactgaaatagtgcttatactggatgaaaaagactctgcatggagtttaggttgatctttaaggagaagttgtagtcaatctttgtctatgcagttcttaccttcccagaatctgcacagatacatctacaaaagaaggaaggggaggtaagtattgagccaggagaaaagaatattcagggag

SEQ ID NO: 239570 - DNA, 1791 bp, Cannabis indica
taatggttaggcattgctataatgaagtcgtagcattaatggttaatatcaacttaaaaaaaatgtgactaaatataaattattttttctatgttgcgactaaaagttttagtcacaaaaattataatttattgtaactaaatttatttttagtcataatacttgttgtggttaaagctaaatcagtgacaatttataactaaatactatattttagtcaaaagtatttttttgttatgactaaaatttacatttagtcacaaaaaatttatattataattaaaaaattgtcactaaacgtagttgtttttgtagtgtatatgagaattactaaaatgtattatttgtgctagtactatttttaatgttatactatattattagtataattaagtatctgatttatatattaaaaaaaatttaggaaatatctctagtctatcagaaagtgctaattacaaaaaatgtttagcaacactaaactaacaatatatactcttacatatataatagtatatgtggcactattgatgaccaattaacgatttttcataattaaattaaaatatataaaatataatacttaattacattatcaattgtgtcataaatcatgtaatgatataaaatacatgggtaatgatatgtgcacaccaaggagaggttttggcatcgacttcttagttcttagtgggaggtttttatctgaaatcacggaagctctgacttttcgaaagtgtgcttaatgttagttacatggttttaataatgttagttttaagttattgtctaattaagtttggtctccgaacttaaaaattatatgttaaattagagtcttctttaggatttgttccagataattttagtttgtcttttagtttggggagtttagtgagtgctagtctgagagctctcaatatatggcggctcacacattgtttaagtatgttttattaattactattagcaggtatggtgatccatctatccctttgtatatactcgtattgcacgagacaattaaggaatgaatgtaggttctgtgtccgtttctcttttttttataggttctctctataggtgaagtttgggaccgtttaaagaaaatataatatgtacacacaaattgtatatacttatatgacgtgtcattttaactatgtatgtgaattatgggtgcacaaatcactattttaagatgagtaatgatttacatataaagttgacatacacttatacagtaaataattttaactaatcatcccaccatgtttggtgtaattactgatttgttctcatatataattagtcacattaatgatctgtatattaaataatcttgtacacattatagctctttactatatgtatatagtaccttttatttaatattaagaaaatgttagatgtacatatttgaccttcttaattaattaatatgtaggcagtaatttggctgattgtaccgaaattactgagagaagagagaatcacagtgataatgatggtacttttgttgagcttcttgtttcaattccttccgaaggtgcaccacgtcatctacctaatgagacaactacaaaaggtcacaggttatgtctttggcagcgtttggtggcgttttaatctaaatgccattgcttacttgattgcctctcacgtaagcctacactacatacatatattattcaagcctcatatcatcatcacattatatgtatatgcacagtaacacacatacatacacccctattgtatctgtgtcatatatataacaggtggcaggag

SEQ ID NO: 239571 - DNA, 1109 bp, Cannabis indica
ccgatagcatatctgattgatgtagaacatggttagaatttgagattaaaacaataaattgccaattatgtagggaggctcttaaatatgttctacttaaatttccaagaagaaatagaacggaacatagctttcaagcaccaaaacatgtagaagagactataaaacattgcagctagactgaaaaagaaagaattaatattaatgacattctttttattttccttaacatgtaactatattgttttattggtaaatttagctgtgtattcgttttggaaaaaatccttatttgtgtagttatgcttttgatattggttcaattctcttttcccctccttttattcatctacttgtttgttttgtcttttctttctagttgaggcataggtggtaagaatatcctctctggataaatatttttacaattggtgatagtatcatatattatggttgagaaaagtggtatattaataatattttcaattagtttgcttgaattatatcttgtaaatgttgtaagttctggggccaacttgtgtactttaagatggaaatactatatgacaaagtatgtacttcaccttgcttttcatttctctccatgttttgtttaatttatgttattttttattattttaattttttgttgttgatagatctaatatgtatgcattatagattttttgcagttatataatgaaaagaatgggggatgctacagatagggagacatcctttatttatagtcgatgctcgccaggtagagttgtgtcaattatagtcagcttaacagtgtgcaaaaaactttagttaacgaaattggatttggtagcttattgggtttaaagaaatgtaatttgaaaaggtaattgatccagtggttggtagatatcttcaatgtagacgatggttgtttaaaactcaatggaaaagtgttcgaaatgaatagtcaattattttcatatattactggtattcatgatggcggggaacatgttgggttttatgccctaaataaaactctatttcaatgtaatccagattattcaatatcaataaaataacagaagtatttttcattcatttgtgtatgttttggttcatct

SEQ ID NO: 239572 - DNA, 906 bp, Cannabis indica
ttataataaaatataattatttgaaaaaaaatgtagtgtctacaattttttagtttgttttctagtttccaataaatcaaaacaagtatataaatatcatcaaattttatgtcaaatataacaaatacattaaataactaaataaaaaaaatttatttttatgaggtgccttacaaatatttagcgatatttcataatcatttgaaaagatatcttgttagactcacaatctatttcggtatccaatagagttgtttaatctatttgtttttatgattgtgtacgttgtatatacttaggactatctgtaaattttcaaaaaaatttgagtagtttatcatgccgaaaataagatttaaatatattattgcacgcacgattattcgttcttacagacatattaactaactatttgatctttatttttgacattgtaaattatttagaattttctaataatttacaggtaatcctacatagatataacatacacgatcatgataaaaaatttgactaaaaatcttttctggatgtcaaaacagatatatgttctaccagaatacccttttgggagtgtactacaaaagatttcaatagaattcatcataacaaattaatgtagaaaaagaaaaatattttgaaaataattgtaccccttaaagggttgtttcgataggccctcttctatgttttgacatttatgagagtttttagatgatttttttttcttgattgtgtacattgtagttacttaagattacctgtaaattttcataaaattctgattagtttacaatctcgaaaataaattttaaatagttgattaccacgtctataagaaaaaatagtcgcgcgtgcaataaaatatttaaatcttattttcaacattgtaaattatttagaatt

SEQ ID NO: 239573 - DNA, 1417 bp, Cannabis indica
taattattttttgcatttttttttcaaaaagagaaatgcttctatgttgaaccgtactttactaatagtaatgcctgattaaaatactttattagttaataaagacattattattcccattggatacgagtggctttaatttcttgtcgactagcggctgctacagctatatgttccagaacaccacgactctttctcattttcacatttctttctcatttatagaataactaatattgttgtacaatagtccatttcattgatctctatataaactcttctcaaggcttaacatgatgcctctctacataacccattttcgatcttttttgaaacttaatgtgaaaatggtaacacccaaatattttaagatttgtagtgttaatttagtactgatgatgataatgatgttgaacgtttttttcactacattttctccaagtgtagtagaaggtagaacattaaaaatcaggcataataaacaaggtaaattaattattcagcgtttatttttcatcacaactttccattataacttttatatcccttcgatcttatatattgataataattattggttaattaataacaggctatgataagtataattacttgaagaattttgatgaaacacttggagctgtgtgcaagtgctgcgatggtgaaggaggttcatgcacaagcaactggaatgcgccatgctccaaactacaatgccttccttggaagtttcatcattattaagtcttatattatataatacttaaattctttattatatataatgaggttgtttaataacaataatatgtgttactttacatatatatatatatatacatatatcatatataataaggtcgttatttatatatatttatttagcaaagtacatgtgtttctaaatttcgtaatttaactagttataagataatataatatagagaagggaatagaagagacattaaaagatagagtgaataagataatttctctgttcattaatatttaatagagtaatctcttatttatataaatatgtgaatcatatattaaaaaatcaaaaaaataaatagtaatcataatcaatggtaattaatagaaacgtttcgacatccacatgtacttattctttataacacactcttttgcatgtttataataactatacatttattccttctcgttttgacatgttctcggagattttttaattgacgcattctaatcttgtatatcatatattgatgtcgatattgataatagttttataaataaatatacaagattcagggcggccccagcaatttgggggtctcgtgcgaaattttaaaattgagcccttaaaaaaaagaaccatatatattaaaactacaattttattagtgttttttttttaaattgcttcataaatttt

SEQ ID NO: 239574 - DNA, 790 bp, Cannabis indica
acccagtcttgtacgatgcaattggtatggcacatacccttgggtatgattggctagaattttatctgtaccttgttgctttgatagtttgctcacatgcccttgtctcttctatgtaggtgacttctagtatcggctttgggaggtgacaattgtgttgccataggttcagtcagtcttgtctttgtggactggcatccaatccgttctcaatcagcttttttagtgatctcgaggtttatactgatacattatggccagaaccaagaaaatcttattgtaaagtgtcaccttttgaccctcacattgccaagctagctaccatgggcacggtagctatagtagaggaggccacgcaccctctagacggtagagatccagaggttggccaggcagaggtccctatgggctaccatggtgtggagagctccatagggagtccaaagttgaggacgttgtacctgttaggaggaggcagtacaggacctgttctattttctccaatagccctctgggctcttacgatggtgacaggcaacccttgaataggcttggccagccttcagtagttggggtagaccatgttctggtacaggctaacgagcctcaggctctcgattaggggcatagggagaccgttaggtcctcaggcactctctgagagcaacaaagaccaaggaggctgagcttctggcgaggggtgaggcccttaccaattcagaggctcttatcaaacagaagcaggacatgatttttggtttagagcacattctcaacaccatgacccaag

SEQ ID NO: 239575 - DNA, 3197 bp, Cannabis indica
aataagagccaagtcactttccaaccaaagttattttcctctctaaaatctaaaatggtatcagatgtcatcttcttcaaccaccaaaatccctagccatctctttccaattctaagcctaacatcaaagtctctgccccatggcatctagaaccagaaactcaaccatactcgctgcctctgttagtgagtctccctctcttctgttgccatctctgactgtcgcccatggccaagcttcatcttccatcgctgctaccacttctgacatcattgctctatttagttccttgcagcttgaaaactctatctcatacacaattggtgcacatcactccatgtttgatccttccactaccggtgtgcttggctccgattttgttacaaatatccccatttctagatcgattgaacaacactacacaacaccattcgtctcttgcttcgctttgacgtcggtatccatagcatcacagactcaattaaaccacactgcttccgcctttctcttcttcaaccccggcattggtttagacggttccctcgctaacttccatctttttcagcaccaccaccgctttgactccaacatacatcgttccacctgtccaaaactcctcttcgttctttactggtaataatccctttcttggacattaaggccatatggctttcaatgatagctctagttttcttgcaaatcaacgcctatctcgtgcctttttgatcgaccttctcaagatgatcgttatcacttgggaattaggatcaaccaaacatcatttcttcatttctcttgactggtcaagataacttgcagtcttggaagcgagtggcatcaatcaatatcgctacaaaaaataaaacttcgttcattgatggcactttaccccatccatcattgaatgatccctctcaatccgcttaggatcaatgcaacaacaccgtgatgtcatggattcttcagtctgtgtctcgtgaaattggtgctaccatcatgttcaaaactactgcccgtgaaatgtggaccaacctccatgatcgcttcaatcaaagtaatggccatcgtattctccaacttaagacctctattaataatgttaaacaaggtgataattcagtcactacttatttcacccagttataagccctctaggatgaactcaacgagtataaaccaaacactccttgcacttgtggtgctatgcaaaaagttcaagattactacagcggagaccagatccttcagttcttgactggtctcaataaatcttactggggcattcgggctcagatcatcctccttgatcctcttctgccattatccaaggttttctctgtattcgttcaacaagagtgccaacgttgtcttggtaacattattattgttgctcctgctcctgctcctgctaaaccaaaaccaaaccatccttctcaaagcaagaagcctcacctaacaactatcttaaaccaggtcacctggttgagaagtgctatttcatccatggttttccaccaggatatggtgacaaaaagaagaatccttctaccgctcgggtgaatcaagttttcgctagtctagaggcttttgtcattggctcttctcagctacaaccaaccaataactgattttccttctcagtcaacaaatccaaggcgctccatccactagtgaaagtctacctgtggtttctaacgtctttggtatggataaactttttccactttttctatggatttcatatagtggagccactcaccatatatgtcattctcattctctcattgctttatatctctaaataaaaatcatgttgctaatatagttactttacctaatggccatcagatacacatcaaaaaatctagcattgtgaaaatatctaataaactaatattaaccgatgtattatatattctcgaatttaagttcaatttattttctattaatgctaatcttgaacattgtcctaataaactcacattcacttctaatcaatgtttgattcaggatccctccctgacttctacgattgggacagttaagaaagttggacaactgtttttttacaggagcgacactttctcacatcaaatatttctattttgcaaacacctcttgtactttggtggaccccttgcatctttgccttggtcatccttccatgaacattactactatattaaataaatttttgtaattttgtgcgaaacctctggattatatgtgctctatatgtcattttgctaaacaaaagcggtctccctttatttctaacaataattttgctactactgctttcgatttaatacaccttgatatatgggaacatttttgtattattagtattgaaggttatcgatattttttaactattgttgatgatttttcttgatactcctaggtttacatgctaacctctaaatccaatgtttcttttattattccccttttttttgcttattgcaacacaatttttagtttccattaaagctgagcgttttgacaatgctaaagaactgagtttaatgactttttacactacaaaaggaatcacaaagcacaattcttgtgttggtcgccctcaaaaaaaaaatttttgttgagcgaaagcatcaacacatcataaattttagtagagctttattattcaggtctcatttatctttaccttattggagttatgccataaatattgttgtttatcttataaatttcactccatttatgttacttaacgaaaatacttcctttgaagtcttctatcagaaaactcctaaagctcctacttatgaccaccttaaattttttagttgtccttcttttgcttccactttgaaaccaaattacataaactttctccaagatctcgtccttatatctttattggtatcctcctggtatggtagcttacactgtcttaaacattgaaactcaagagattattcactctagagatgtttactttcatgagggtatgtttttggtttcacatacttactctcctacttcaataaaataaattacgctcaccttctttactgccctctacaggaccatctcataattcacctgaggagaatgcactagttcccgaccatgatggaacttcatctcatcaaaagggcattcctcaaaatgtgattgacaccaacacacatgccccagatctttatgaagtaccatccacacccaa

SEQ ID NO: 239576 - DNA, 1344 bp, Cannabis indica
tttcttttatttttttatttggggagggaggatttgaacttgtgacttttctctttgtgaagagaagtgtagaatcattagaatatgcatatgaccatagagttaaggtaattttagagataatgtagtttagaatatttataataatttaaatatttagtttaaaattaatatttggagaaactgagaaaaaatgtgaataggtgattgatattttgttagttattaattattaatattttgggcattcctctaagccaatatgctacttgtgatacttggacttgggtgagttttcataaaaaatgcctataaacttgttcaagatcaaaaacaaaaaaaaaataggtggacaaaattgtttcgaaattctagtctcatttttggggtttgagtattccacctaaggtcaataattttttgtggagagttgtctcaaattgccttcccacttgtgttaatcttgtcataaaacatgttgaggtttctactccttgccctatgtgtaattctcagcctcaaacgactagtcatgtcttaattttctgctcctttgctcttgcttgctggagaaagattggagcctcatttgttttcgaccctggtagccattttggtagctggttggagcttctatttgccacggctccagctgaacaggtaagcatgattgccatgcttgacaatgtgaaagtctaacaaagcagtttggaaggaaaaaaaaagacctccgttatgaaagttattgcattggccaccatagcacttgatctattggaagaaagctcaggataaaatctcactaacatctttgtgtcttagtaacaggatgatggtgttgagcattggtccaaaccagatatgaataaaatcaaagttaaacgtggatgttgtgccttttcgaaagggaggaaaaatatagttttggcattgttgcacgagatcattctggcagtcttattgcacacgggcaggttgttatggtggtacttactctgctgtagttatcgaagccttgggtataaaggaggctcttagtctaggatcaaaaccaaacattgggagcttgttgagatcaaaatagatagtttggtcacggtgcaagtaatctgaagtcactcactcaatgggctttacatttggtttagattattcatgattatcaagtacttttatcttctttacccaatattcatttacattttattaaacaatcagcaaatcgagtagtacactatgttgctaggcactttcgattttatactggttgtagcatttctgactatcctatttcagctgaactccaaaatattttgtccttagaatgctaagttattttaattc

SEQ ID NO: 239577 - DNA, 1904 bp, Cannabis indica
ctccttgctcgtgtcctcactaggaaaccagtttatctatcaaccctgcaaaaacaaatgaaaatccattgggatggacagttccctgcaaaaatcactgaaaaggagactgaattgttcatggtctccttcggctgtgaaggagatatggaaagagtccttacccaagagccttggcacttccaaaatcaccatattgtacttcaaaaacgttatgcattgcaaaatttgactccaactgatctcaaattttcacccttttgggtacaagtatataggttgccctttcttagtaaatcaagagggttagcaaaagcattgggtaacattattggggaattcctgaaagtttatactgactctctgaatgagggatgggggccattcttacgaattagagtgaaacttgatgttactaaaccattgagaaggggtcaacacatccgtttgcagcaaatccgagacaagttttgggtggactttcgctatgaacgacttcccgaatggtgtatggaatgtggttgtttaggccatccttaccagaaatgttctacattccttgaacttattgataatggtatagtaccagaactcgcttatggacctgctattaagggggctgccttgccaacgtcgggttatgatcggcatagaacggacttatccaaaggcaatgcttggcctttagttacccgattagcaagaaaaaccatcatgaatacaatccctgctctctctcttcatggtcagccacaaccgaaaacactgctttatggggaatcatcgaaccaacagaacgcatactctcatgacatatcaaatcagaattttgttggtggcaatcaatcactctcggacaattttcaacaccataacaatgctcttttttcctttgcaccagcaaccttgaacactgcatctctggttcataatgatgttacaatggctgtgacaccaactgttaatgatgctgcaggaaaaaataaggcaacagtaggcacggatcagcctactactgggaagaattctgatgttactcgttcaaaaaatcaacacaacattgctattggaattcagggaagttctcaaagtgttgaattgcctattctggcaccatctgccaccacttttgaagcctcaccatcactaattcaaggaaacaataaggttggcaccattccaccatctcccactaccttatcagcatctccaaatgagagtgacctgtctgaaatgttcatgccaaacattggacaaccactgggatatattgctacatatccgcctgatgcaaacacaactaaccttttcaacattgcttccaacatggctagtcaaccaacttatgctccaatcatgtctgattccaccatttgcatgactactgctgctctgtatggtaaagaaaaccagtcacctaatcgagtttcaaagaggcttcatgaaaatatgtcaatgcgaaaggctctaaagcgttgtaggggtcacaaacttacttcctcaatttcagatttgtctactgatgctgagatgaaccagaatgcttctgatactgttgcagatccatctgattcctttgacaaccttgcggaggctgtttaacagccccacaaccagccatgaaaatactaagctagaatgcgtgtggcttggggaatcctagagcattcagacaacttcgttttcttgtcaatgagcaaactcctcatgttttatttattatggaaactaaattagattgtaatgtagttactcgttatcgtcaagctttacgttttactaatggtttagaagtacctagggtcgggttaagtggggttttacttttgttatggaaagacaatgttgatgtaactcttcttaattataatctaaatatttttgactgttgcttgaagtgtgat

SEQ ID NO: 239578 - DNA, 2652 bp, Cannabis indica
taggtcataaatgtaaattttttccattttcagtttattatagaaaaaatcccaatagaaaattatactcttgacttttaataattgtgtttacttagtttggagctctcgaaataggtgcctttggtatcaagaggttcctattgttatgagtttcatcaattgtataatgaatctaactataaacaggatacatattgatattgagaagatttgggataaagataagattgggtttaggagatttgtagagggaagtgatgagagttaattcagagaaatatagatgactaatttactaaaaaattcataaaatagcataatattttaataattaacacaaaaaatatttatatgtatatatataatatccagtccaatttacattatttaaactcatacacttttataacactttagatggtgattaataaaagtttgacaatattgaaaaatcatgcttgttttttgatgatgtcctcaacaattaaagattctaatggaagaattatcttgattcgaacaataataattagtttatgttagttgaagttttttaattaaattaagaatattttaatttttaagtgtattattggataattaattatgtttttttgtattgtgttggataagtaattatgtttatttaaaatattattttcataaattattatatattatatatttttaaataaatttaaaaattaaatatatatatatatattttattttaaaaatataataccaacgaattaattgagacacgattccacaattattgattcagattaaaatttgatgaaaataccaatggagcctgtccctaataatttgttgatactatttctttttattagtggtttgtgtgtgagtccggtgctaataccacataatagtaatcgattattatcgccaaagcaatagcagtagaatcccgctagtaataatattagttccagtttttactggtattagaagtggagacctacacctctaattgagtcccacattgctaatgtgtgaaaaaataaataatagaatgtatagataagtgggctactcttcccatttccaattgattttgggatgggaccttatttatcttatctcaaattctaacatagtatcagagcaatacaaaacctctggcgactatccgatcccaaaaaaagaaaaaaatcgatcgaagtagagccaaaaagtaaaggagccaccaaaaatatataaaaaaaattgatccaagagccaaaagtcgaaaaagccacttgtgatttggaaatagtgagtgaggccaccgaaaattcaaaaagagtcgcttatgattatgatcgagttgtctaagatggtaaacaaataaaatagctacaatcttattagtggagatgttagagagttccatattgctaatgtgtggaaagataatagaatatataagataaataggctactcctcccattaccaattagttttgagatggaacctcattcatcttatcttaagtagtgtttggttgggaggaatgaaaaatataggaatagaaatgagaatgagaataggaataggaatggaatgaaataaaatttaagatgcataaaaaaaattgatcaaaaaatcattaaattttttctcttgttacattagaatggtctttccttcctttttaaaatggaatagtcattctactattttggtgtaaagtgcattctattgtaatgtcattccaatactttattgaaatgcaaccaaataaagaaatagaataaaaattatttcttttttattccattccatttcattactatgagtgaaaagagatgaaagtgaagagaaaaacagagaaaatactctgtattgaactcttttattattactgaactgaattaatacaatttacatgagaaggactctttatatagagagctgagttagttgggaataactaactcggctgaaatataacagcaagagtcaagaattagttaacctaattaggtaacagagtatgaaggagggtaatctcgtaatagccccccctcaagctgtagtgtagatattcgaaacgttcagcttggagacaatgttgttgaaaggtgctggtagcagagcctcggtaaaaatgtcagccaggttgttttgagatggaacatgaagcaacttgaggacgccttgttgaactttctctcgaactgaaataggcaatcgaatctcaacatgttgtgcgatcgatggtagaaggggtttcactgatgtgaatggcagcagtgttgtcgcaatagagagagacaggtttgtgagtgagatgccgaagtctttcagtaatgaaaggatccaagttacttcagaagtggcattggccatgactctatattcggctcggctgaagagcgagagacaacctgttatttttttttaatttccaagatactaaggcttgtccaagaaagacacaataacctgaaatggaacgtcgtgtgtcttgacaagcgccccaatgcatcggaaaagaatgacagttgaacattcgtggaggataaacttgtctaagaaaatgcagaaagttggggagaagaaatggcagggaaaaaaataccttgtccaggggttccctttagatactgaaggatcctatgagcagcttgaagatgtgg

SEQ ID NO: 239579 - DNA, 940 bp, Cannabis indica
ttttttttggtttcaaagtcaaagtcaataaaaattaaaaatattagattccataaaaacacaacacaatatatatgactttgaaactaacaattaagtatataactttatattattatatatttaaccatttatgttatatataataaaaactaaaaagtaaaaaaaaaatccaaagtcgggttggtcgggttattcagtttaattgggcgggttggacctattttcaacccgcccaattaatagattgggcggtttgtaaattttttgggttatttcggtttgtaatttttatcgattttttcggtttggtttgggtgggttattcagtttgggcgatttacaaatttttttgtacagctctactctttaacaatcggcttagatgagatgatgggttatcaaatagacgccaagactgttttgctagcaaaacttgattgaaatgcatgaagtagtggaaactcatatcagcatcagactttgttttgcataaaagcttccaattgtggcaatgaattttagatcatgtttcattagatccctaccaaaagtttgaaatcatagtctctagctggttgcaaaccgtattggtaaccgaaaacaactcatcgtgtatgtaggtattgattgcacaacaactttcagaaggatttcttttccacctatcgagaagattttatcattccaagtgcgcatgagtctccaaattttctctttaacatcactgaacatttgcttatctcgatctgaaaatgatggcagaccaagatatttctcatggaatttacagatgggcatagatagttgtacgtctatggaagaaaactcgggctgccaaagtaatgtttggtgaagaagacaatactaatttatctgggtttaggaactatcctaaggcatggtggtaaatatccaaagcacgcttgatagcaaggca

SEQ ID NO: 239580 - DNA, 877 bp, Cannabis indica
aaaaaaaaaaaaaagaagtgtggagtctaattttctcctcatatttaccatctatctcttttgggcccaacccactaaattttattgttagattctgtttaaaattgatatgtataaactgaaattgatttttttatttttaaaaaaaataatatatttcaaaaccaataatataatagatatgtgtacatataaattaagaaaatagtattttttgcatataacagtttatttctttaattactgtaactaaatcgtaactgtaaagacttgtagaatgcgaaatcacaataacaagacagttacagaaataaatattgcaaaatttaaagcttaacacgagaaaattatatgtgtatcagtgtttttttaaatactactagtccatgaggtgatgctcagagaataaaatcaattagtaaagtatcaaagattacaaaagcaaattgacttaataatgatttgtcacaactctttataatccaccttgctaatctaatctctgaatagaccaaaagtagtgaactccctttagctaatgatgtatgctcacttcttcccaaaatgagtttgacaaatcgtttcccgaagatatatgctcacttcctcttgaaatgagactaagaaaagtcttctcccgaataccaacaattgttcaaagcttctcttcacctattttatgaacaacaagagtactttacacaaagatagaaaaacctaacagaacactctaagtttttacaaaagacactcttttctcacaaacactacaaaaaacaattacttttagtgacaattttttaattacaacataaattttttgtaacaataggtctaaatcctatgctcctaaaataatttccttttaaatatacac

SEQ ID NO: 239581 - DNA, 2970 bp, Cannabis indica
gtttttactgagaattctaagatattgtatcatttgccttgaaatctgctcatattttcatccgttaaaaatgggctatttggtgaggctctatctgcttacaaacaaatggtaaatagagggactagaccagataatttcacttgcccgattatgctaaagggttgtttgtgcacaatgcattgattgctatgtatgggaagttttcagaagagaggtacacatgtccattgagcatcgctctttgaagtggagcttgtttgtgcacaatgcatttgctatgtatgggaagtttgggcttatagacattgctcgtcatttgtttgataaaatgcccgagagggatgcagtatcttggaatgcaatgaactctgtgtatgcctctaggggaatgtggtttgaagcattttaatttcttgaaagcatgtagatggagagtaatgaagtaaatgtcatcacttggaacaccgttgttggagggtgtgtgcatacaggaaatttcatgggagcactcaggtttctttctcaagtgagatctagtggtaattttttggacttagtggggttgattattggcttgaatgcttgttcccacatgggtgtcgttatgttggggaaggaagttcgtagttttgcagtttacaatggtatttatgagtttgaaaattttaaaaatgcactaattatgctatgtattccagctgtgaagaccttgggcatgcatatactatatttcaactgatagaagataaacatataattacttggaattctttgatttatggttatactcatatggatcgagctgaggaagcctcattcttatttagagaaatgatgctgtcgagatttgaaccaaattatatcacaattgccagcatccttccactttgtgctcgagtaggaaatctccaacatggaaaggagttccattgttacattattaagcagaaagaatttgagcattatttgttgttagtggaatgtaattgtggagatgtatgcaaggttaggcaagattttcaatgctaaaaaagtatttgattcattgacctagagagacaaagtaacctatactattatgatgtctgcttatgggatccagggagagtgctaagatgctttgaagatatgtgaagagatggccagatgtgtgatcaaaccagatcatgtaactatggttgctattctatcagcatgtagccatgctattcttgtgatacaaggtaaactgctatttgagaagatgtctagtgttttttttatatttatgtccccatttggagcactatgcttgcatggttgatctttatgggagggctagtctaataaagcaagcaaaggaggccatcatatggattccacacaactacaggccaactgctaccatgtgggccactttaattaaagattatcgaatccatgggaatgtaaaaataggagaatgggcagctgagaagctactggaaatgagaactgaaaatttaggctactatattaattgtaaatatatatgttgttgctgagaatcggaacaagcttgcagaggtgagggtgttcatgaaagacttgggtgtgaggaaatcccctgaatgtgcttgggttgatgcgggcaatagattctctccctttggttagggacatgtcaaaacctgacatttaccttgtatcagatggattgacctaatgaaagatgctggttatactgcaacttaggatttcagtgcagctgaagatgtctgttgtgaggagtagaaaggacaacttgaatggatgcataaatatttatcttttatgaactgatttcattcatttatttttaatatactatttttcactctctttgtaatttaaaccaacattcatgtatgcataacccttcaacatgtatcagctgttgaggacttcctaggagttttgagggaatcagttaaaatggtaagtgattttttaactagaccaaaacaattgagttgctttttctcagtgaaagagcaatatcaaatattttagaggaagatgcgattagttatcgggcttacttggtgccatttgtctgagtttacattgacttcatgtgtttcttctacaatatttttaggtgaaagtcaataaacaatgggctagctcacttatattgctgctgcctgggaagatgccagacacacactgtgatggtaaactgcatgaagttccatgatgatgcattcgtttagacttttgattgtttttccaaatgtgtttactccattttttagcctaaattatttgagctgaaggctatacaagaaatacacaccaccacttatttagattcatacatataggtggatataatatttgttttaaatataaaaagttgtatctaccagacatttacaaggtaatattattatttatacgcggagcagagctcgttaaagctttcggccaaaaaaatttattgcacttattacgtaaaccaaatgaagcaataaagaaagtgtatcaaattaataaatataagagtgggaaaatccaataaatataagtgatccataaatgtccatagatgactttgaaagttcatatccaaattatgctcggataatttgagtgcatctcgactaaaagaagggatatataaataatatacccaacactattacatgaccactcttagcagcagtatctatctttaataagaggactagaggagcagcactacctctatttattaatctctttcactcaacctcacacatactcataatagggacagcaaaatattctaaacaatatacatatacttttacacgcatgattttttttttcatcaatcaagctctcacgatgtagtggttaacttttcttgcactgcaccatgttagagctccaggaccagatctgtaatagaatgaagacaaaaatatatgaatcaatcagtacagttatattgcttacacacatatatatatatatactagaaga

SEQ ID NO: 239582 - DNA, 1416 bp, Cannabis indica
gagcgtctagtcgtacgtggactccttagcttcttccttgcacgtcctaatgacacatatctttgcccatgtgatccaacctttagggttttgtgctagcctgatgtgaatctcctcaagtcttttcaaatcttttagcaatcatcatgacttgtatagaaaatcgtgtgtggggaagcgtgactgacgcttacacaattttcaaggaggtttctttaaattaaaagaggaggcttttgggtttttagagggaaacaacttccttttaagtttcttagcatcatctcaggatttttgtgctaatgcttctaggagaccgtctagcttttgcaatttgggacttcgccttgaacagtgagtaagtctttttttcttattatttataaatcctttttaagttttgaattttataccatattgtttctatcttctaggacattcatgtgagggtattatgttgattttctttgaatgaaaatttcctatggtaaacacttttgagatgatctagctattcgctaggaattaggttgattgtgttagagtttatgccctgaaaagcctgtaaagacaattctgtttataaataagagttgaacactttcatatatgcttaaatgctaaattattaatatttaatatttaataattatatacaaatatcgaaaaaatttgtattcatacatgatgttgtgacttgtattgtgcgaagaattaagatcacttagtcatggataaaacaaccagtaatatattaaagttgtaaaatcttaaataaacttttgctaatgtagttcactaatgcccattattcggtgcaagtaatctcgatttagattgctaatttagtatgacatctaagtgaaggtattatatttaatagagattataaatgacatggaccaatatgtaattaaattttctttatcaaacatgccatttactataaagacctaatctatatcataaaaatgatcaatagtagatcagcctaaatcctgagtcatgaactcgtattcatgtaattagtttttttgattcactcgttaaagtttcttagagaagatgatttttacagtttctattttaggaatctaataatatgaacggctaggacgtgatctaaaattattgaatcctgactttcctaatggatcgaatgttggttccctttaagtgttagttctagttttaagaagttgtgcacaaatttagattggatctaaattatactttcactattgaattaacggtactaaaagataaaaaaaaagtaattagaagggtaaaacagtaatttgaccaaaataaattacgaaccgacataaggagggctaatcatttatatttatcgagtttttcgagaaaccaattattaaatataaaagctaaagaaaatataatttagagagaaat

SEQ ID NO: 239583 - DNA, 1700 bp, Cannabis indica
caacatataaaaaatgcttatgtgagacgtgggaggcaagaacatagaagaagaaccagaccaactaactaattggtaatatactagaacatatttcatttgcattagcttttattgctagttcttgtgaattttgaaagagtattaatatattagaagacttatttcacattgacttattgtattaattttgttcaaatttttttaaatactttctaagccactatcactgtctcacaaactaacatgtcatttgcacagcaggagatgggtcattcattaccaaaacaaggtctctgcaatttacataagtagctcttggatcggttgacacatgtggtgtttttttttcttttgacttaccatctttccaataccatttgacaaagactgaatattgagtcataccaattccctcctctatatggaaaaggactttcagattctaaaatctcttccatctttcctcccaaatggttccatcatgaagattggtttcccttcttccaatcaccatttcaaaacatcttccaatgcattttctaatattggttctttgataaagtctgattagcctttaaagaagctcacagattgtgatgctctattaactagtattttctaaagatgattcttctgtgtactcaaaaaagtatagtatagattcagtccaactcatttcactactctcctaaacatctatacccaactcaagaaatttgtatctattatcccaacttgttcgtcaactttcccaagaaacaaacaatggaataccagactttgagccaagacatgtactttcctactctgttcactttatcttctaattactcaacaatgactctaacaaacaaatttttatcaaacattggactaatgtcctgccatttataaatgagcaacgctgcagtatagccataagatgattattttgcctccttctgagtaactcccttttcaatcctcttcagcatcttattcttcacatccaagtagtctatattacaagtttccatcaacttggtgtacgaaatctttccccacgggtactcgtagaagaatggaaggttgtcaaccattcttatgacaaaaggaggaacgacagtcttctcctccttaccagtgaggacgcccataacaaacaaggccatccccaacttgtagatatcatcaacttctgtgcagctctcaaaaactctacgtagttggctaaagctgatggaaggattaccgttgaaatattccataatcaaccggtctgaacttcctttctatttgatgtcttccccagtaagtctgggcaacaagtttaacccactcaccaagccaaactccaccctaccaaatctacatctcttccttcccacataaaaatgtacctcgtccggcttgtcagatttgattttgtgcaacatcaactgatgaatcaatgctcctgaaaattgtaaaggctctctctcgaaaaactgtttgaaaggggattccctcaccctatcccatagtctgaattcttcaaatttagccttaatcttcgggtagtaataactaccaccgcgccatgtgacacggcctgtgtaatgctccgacactggaattattagatgtggaggtctctataaaaaccaagaattaaatcaataaaaaataaataattattaataaaataataaaaaataaaacaataattaataaatcaa

SEQ ID NO: 239584 - DNA, 1027 bp, Cannabis indica
agataaggaaaagtgtttaaacaacagggttcccgggctctctgtatggatcggcctggtctgtaagggctagaggttcaacaatcagagcagtaggggtgtcgttgctctggtcggttgaaactgtagaagtggtcgcctcgaggttttctttggccgtctgacccgcacaaaaatcaagatacatctcattggattcatcgaggtaatcaaactttccttcgggattggcctttcgagatttgtagaaaacctgaagggcgactgtctccaagctttccacctccttaacgagctcttcttctctggtcttcttaacccgaacgtccccctctagctttatgagaagagtacgaagactctccctctcgtctttaagctcattgacatccttgtacaaagcgtcgttatctgcctccagctgctcgattgaaggcatctcttgcatttccttggtcagctcgtcaaccctagtgttagcagcaaaaagctttttgttcacctccccgagcttattcctcacgtcttgagcttccgttttggccacatccacctccctctgcagtgtggtggtggtggcaagggtcttggcagtagttgatttggctcgggagtaagcataagcctcttcacattgacctgcacggaaaaagtgttaaggtccgagctacacaaaagagaataagataaagaaggaaatagttacccgtgtatcttcttccaagattcctcctaagaccagctccaaagacagctcattgtccgccctagacagttgatcactcacttcaggaagtgatcagttcaaataatactggagcatatccttacccctcttggcctccgtgctcagtgccacgaccgttgaaggggtcctagtctaatcagacctgttcgagctcccccctctggaaatttttgacttcgagaccttctggactggaaggtccataacaggccgctccttagaaaggtcaatgacctcttcgactggcgccttctctttggacggagtctcgtcgccttt

SEQ ID NO: 239585 - DNA, 2531 bp, Cannabis indica
ataaagttagcaatgtcattaataattaaacacactatgttaagggtagtctttcggccatgctacacaatgatttatagcttgacctactgttgtgaatacatcttgggttatgggagatggaagtagtgaattctccacattaacttcttcgatgaatacccgacgataatctttgtataggtattcatcattgtgaatcaagaactttccatctttcaaatatttcttcttcataatgtgccccgaagcaaccttcagtaccatcccacaaggctccaacaaacagtgcatccaacatggtaaggactacaaatttaaatcaaataagcaacaattcattttgtaaattgaccatatttataattttgcattagatcatttcataaaataacattaagattacctcttctaaactaccaccagtaggtggcggtggtgctgctggagtagaaacctttataaaatgcaatggtgatggagtagagatattagcagcacccaatatggttgtgctatgggatctagtggagtatagacatcggcaggactcgatgattgtgctactggatcaaaggcaaggtcaggatgagcttattcattcgatcctcctccaacactggaatcaaacacatgggatgtgcccgcaacgcaactatgttaggaactaactaggcgaatgagtgcatccacattgtcctgcagctttttgttgatttcttctgtctcacggacacatctctccaaatctgatgatgcatagtttgacccaaccatgttttttcttttagttcatgttgtgttcaattatttggtctgggtaacgccgaaatccatggctcgaacccgtccaccatgcccatctatccccagtgccgtggtgaacacgtccacatgcacaactccttattccacttatttaagaaagtcgtcctacaaacattacaaatagagttaaaaataaattataaaacctaaaaatataaatgaaattatactttaaacttaccatccgtttaacgattcctgcagctgggtcctctacctcgcctttcatgttcatgtaaagtcttttctatattttagagctattaaatttgataatttggtaacttgcctctttctccatttgttcttgaaccatccttacaccacctcattcggtacgataattgtaaatatttttttcctgctctgttgggcctttttcctcctcacatcaaactctggacttaatctcgtagccacaaactctctctattgttgcaaattaattatgctttcatacaattttggtggcttctcgagaagttggggagccacatcattgaatttaaaaataccatccgttagggtatttttccaatccttccacctctctccacctttagaaatagctgattacttggttatctgcggtgtatcgaacgtggcctaaaaaattgacaatcgtagttataagtaaaaattaccattaatagtacataactcaaataataaaattaattttacctttatgtcattccagaattagttttaaatgtccagactcactttaggccacgaaatgtctcgaagtggaacattaattctcacccatgttccaattcgggtaacttttgccatcactctctttccccagttttgtccgtggttgttgtactcaacctctaaaattttccccttgctaactacttttgttatatcgctccgtttgtttctcccgtgagtatttttctttgttggttccatggataactgttcacgatcaacactacattctcttggcacggatggaccatcataaccatcataatcaaaccaagcattccacttatcgtccccgcctggtttcatgatggacaaatttagaaacatacaatagaatatacaaagatatgtaaattgatagctaaaagtaaatatatcaaaatgactaaatacaaatacgtattctatgactcatgtattaatagattcgttcacccataatctttcaccatcatcacgagatgatatgatatcattcccaatggtgacatcaattggcgattcgatgaatttagtcattaagtatgagatcatcgctattagactcttgattatcataatcttttagttgcatcgttaagacaactgaccagcatgcatctaatggatcgctcatgtaaaatacttgactggcttgggacaccattataaatctatcagatttgtgtccaattcgattcaactccacaaacttgaatccaaattcatcatctgtaacccaattatcactcctaacccaataacaaaggaaaacagggatccgaaaaactactctaagctaatcaaatttcataaaattacattgttagaagacatgtcacattcaatgggatttttttcttttgatctagatactttgaaagtcttggcaactatcataactttactattttgtatttttctagatttatcacggcttgggtgaaaatttgagtactatttatatagtaagattggtacttgagtacatcacacgaagg

SEQ ID NO: 239586 - DNA, 2188 bp, Cannabis indica
agagagagagagagagaaggagcaagacgaatgaagagtctagaaaagttttgtatatgtattgagaatccccttcgtgtgtcttaacttccttttttcattgttaccttaaaattcttagtaaattttgagatcaacaatatatattttaataataataataataataataataataataataaactaacaaaatctcatcaatgcttaaataaataaaagttgttagaaggtgtattatataaactaccttaatatttaaaaattataaatattattttgactcaaaagataaataaatatgatcataaatagtattttttttttagaaaataaaaatgttagtcaaagaaaaagaatattcagtttttatgtttgtaaaattaggtagctaggtaaatggattgttttaaacaatttacaaattgattaatagataaattatatgctggattttttaatgcttattaaaggaaaatatttaatgaagacatttatgttaattagttaaaataatatatttagtaataataaatatatcaaaaggtggttgaaaaaaaaaaaaaagtccacctaccctaaaatattaacccaagtaacaaagactacaatttcattccccttaaaaatcaaatagtatgaatctaatggtccatattatctaaatatatgaggcaataataataataataataatagactttgataataacaatagagagcaactacagtaaaattaaagcataccatatcttcatcaatgggagtattatacttttgtcatttggtgaaattataatttaattaaattgtgtatgatgatctatattattactatattatatatcttactaattttaaaaaaattataaataatttactatactgaaaatatattttaaaatgataaattaggcatagtataaagaaagataaagaaactcaactcatgtaatttaatatttaaactataatttagttttgatacaataaattatattaaatttttcaaaagtaaataaatgtctttataatgttccaataacaataatctataattatagcaataaatcctagataaaagtgtaagaaaaaaataatataaatggaagagtgtagcgtagagagagatgattggtgaatgagaaagtggaccatattatcattttgcttatcttggcagtgaaagaaagtaaacgtggtggactccattttatttggttatatatacttttactcttttctttccaccgacaccctattaataattctttttggcatctattcattttatcaaactaaatataaatttagttatttaaaaaaaaaaaataaaccacaagataattaagaacaaatgtagtagtattagtgaaaagataattactaattaaaaaatgaagaattgatctacaaggatctattgttatgaagttttttaatctacctcagcaaccagttgttatgtatggagcttcacgtgcatcaaaacaaattattaatttattttaaaaatatttaaataggaccccacctcttgtcttgtctctttccattttgttttttccaccaaaattcacttccttgcaaatttagtagagtgaaaaataaactcatgttagtatgtatttagatatattattattaattcatgtaagtatgattggaaatttctttagtacacatattattcatatttgttagaagttggttactcttaatcatatactatcaaaagcgagtgtttaaaaataatagacatgaatgaaactcaaaccccacaccaaaatctgtgaacaaagatgctcatctaaaattctctgcaatccagtccagtttactttatatataaataaatgagtattcatgttcacacacatgataggaatataaggatgagttttctgattacagggcttataataatatttgcatgtcattgttttaaccgaggaatatatttaattatacagctcaaacatctcttaatcagattttaaaataaaacttggtcgaattttgtacaataaataacaaaaaaagtcaaaactcaactcgggtctccaaaaaaaagagacaacctccgtcgatcattcttttattatagtatcaatttggtctttaaaagacaaaatcagcctttggagctagtagctatatttttattgttattattttaaaacctttt

SEQ ID NO: 239587 - DNA, 1195 bp, Cannabis indica
aaagagttttatttagggcataaaacctaacagatatcagggccagaaaacttgagctctgagaagagagaagccaataaattataaagagaaaaagagagagggttcgtgaggagggtgggacgtttcgattttccttgggttcttatgtttggcttcgcctgatctgatggtgatggtggcggcaccatgataacgaaagggagaatgggacagtgagcaggagggagggagtttgggcttcgagattagagattttcgcagttcagggttacgagggaaggaactcgaggtcttcctgaggtaagagagcatgtcgaagatggtggctccgaaactagaaagagagagggtgtatcaggatagggagagagagagagaaagagattagagtattttcaattataaatatttatttttgtaattttattatttattttttatattttaaaatgatatggaccacttaaattcagacatgtgtaagtagtacacgttggcatttatcaacatcattttaagagaagtgtaaataacataataaagagtgaggttttagttgttttgtggtcaaaaaattagtttatggggttaggtgtcaaaagctctatagttcaagtagttttgccaccaataatatttcatcaatattatactatacaatacaataagatataatacaatataccaaacaaaaatatttctaacatacatatgatttgtcaagaagcatttatgcatttctattcgttaaaatttttgtttctagaaaagtagttcttaattcagcatgttgaattaattaattataaattacagtaataaaatgtatatttttagtgtccatcattaattatttatctctacacatatcgtacatactgttacactatgaaatagtgtaggggcttattagtaatttttaaagagtgtgatttactataaatatgtaattgtaaggcttgtgagatatggattgagaaaatagaacttttagttcaattggagtttggcactgactcgaagagtgcattttaggagattttttcctgtctcgaagaggactatatctatcaattggtgctttcattgagagaatctcagcgagtaaatttcattgagagctccacaatatgacagacgagagcctcgtgagttcgtaagatccatgattagatctgtagagttgtgtctg

SEQ ID NO: 239588 - DNA, 1332 bp, Cannabis indica
tattatctctttaaacataattatgaatttaaccatgatttttttataataaaaaaaatattacatatataaaaatatatacttaaatataatctgaatttgtttaaatattatcctacaataataatcaaatatctttttctttaaaagaaaaataaatatctttttttcaaataatctatacatcttttaaaaaatatatataagtttaaacctaatttattattatctttgatttttaattctaattcaattacgattataattttaaatactttatatatataataagtggaatgaataagcaagcaacctaaattttatttgattattaattgtgaggaaaataataataatagtaataatactatgtcgtttggtagttggagaggttgggcttcttcaatgaaggaaaagctttgggattcttggaagtgggactcagtcaaagaaactatttatcaagattttaagaggagcaccgagcataatatgacgaaaaatgtcacgtgtaatccagatcacgctatgtattggctgagtttgcaccttctaatacaacgaattgaaagaaaccgttcccttgactcaggaaaatcttccgactggagatgatcattctcaagacactacaacagtgtagtgacgttcgacaccttaaaatatcaaatatcaattttcttataaactaattagttgatatgtaatgatgttttacttggtgagaagattattggtgttggttttgattttgttttcctagctttgtaacttttggaatattttgattcaattcatttttaacttagttaaccaattttgagactagctgaaaaaaaaaaatagaagctaaattgttttttaaattttaattgtgtttttatttgaggttagtaatttttatgtgaaaaaggagattattaaatcaaaatttgagcatattgatgcactcaaaatgtggcaattaaaattttactataggattttagtaattaaaatttgattgaattttataaaatatatatatggcaattaatgcaagtttactttggaaaaaataaatttacggtaaaaatattaattactaatatacaatacttgttttccatatataatcatgtgaaatgtgtttacaaacttccttaaaaaaatatagtttacaaaattgtaataaatatttttaaggatattgggagctaaactatttaaactttacggtttgtaacacttaaccacaaacaccgaatttttggcggctaaactacctaaactctagttccgttttgctctccacacctcgtcccaaaaatcacagttaagtgtcacggtgga

SEQ ID NO: 239589 - DNA, 1945 bp, Cannabis indica
atcgggtctcatatactttaatgtaataacttttaaagagcatctctagctaattacaagacaacacatctagaaggtactaagcaccactgatactcaatagcaatactctttaatcttacaccttgcagtgcctaatttgttaaaaattttgtccattaatacaaaagtctttcattattgtggtctttttttttattaaaagaaaatatttacctattcatgataattcttaaatttgacttatttaggaattaaactagattttatattaaaaatttatttatactgtaggtctattgcaagttattctccaaactttattttttagtatattaatctcaaaactatataaattttggcaagctaatcctcaaattttatgttttgacaaatcggtctctaaacttttattttcttacaaatataaagtcatcactcttgaataatagtattttatttatttatttatttattttgtattaattttaaatatatttatattgatatacgttatcaaattaaaaaaaaaggtacatatttgtttattcatatgtattttttttttttaaatatgtcaaaataagatagtgcattctgaatatttgataataatttatatttgtttattgagatttttaaaaaataaatattcacaatctcaaaagttaataaaacagtaaataataaacagataattttacgtggttcatgcgttaattatgctagccacgagtcagttgtattagcctcacaaaagtgtttgattaatacaatatatgtgtacaataaaaccctagctttgttttgtattcctaatatttctcttgaaaaagaagaaagcttataggaattttggtagagcttcagctagatcaaatttgcttcaccccttcatcctaaaaaatggtggtatttataggcacatatgtgggtaagggccttccttttacccacctagggttttgtactagagcatgctataaaggcaggtacaacagcgtgaagatctgactgtctgttggtaagacactttcccatcgtgtggtgtacgactgcagtgaaggattccacgttgatgaggacatgcatcattcaaaagtttcaccttgaaaagttattgcctagacaagccatatcagacaaaaaaggagttttagaggcacgtatgtgcactaccatgctctgacggaggggacatgatctgatctgtatcagagggtggataatcattgctttgggttttagatatgatgcttctgaataaactcagacatcaaaaagccaaagccttcccaaatcacacttgtccagtacctttttggaatactttaagcattgagtattttttattccttccagtcccgaaaggatagtaagactcctagatctctatccttactctctaacattaggaacttttgatcggcttttggaatataatagtctcttttgcattcttaagtggtaactatgtatgttatcctatttcttgcactgtgatgtggcattgagttggatgacacgttgttatacccaaaattcgactagcacttcagaggatgacacgtgtccaccttggagaatacaaatcaatgaatataatggtaattatattaaaagatattaaatggaataactaatttcatgcgaagttaatagagcatatctataactcactgactgtatagtcttaagcgagacaaggatgtatgaactattaattcacatattgacgagaaactatttcgcatcagaagacatgatcgaaaggatggcatcgataatgcataagcgaggcatcaacctcgctatgtgtaaaaaggtgttaacaagacgtgttgactgttaggacacttagcatataatatacattatactaactaagtataacagcttgaatgacatagataaagcataaagagacatccatctcgctatagga

SEQ ID NO: 239590 - DNA, 2295 bp, Cannabis indica
aagaaatgccgttagataggcacttttaatatataaagatatatggtttattataatatattttgttaatggtgcaggcaagagtatcatgtgaagtaattgtaaatacaataaatcagacaatatttcgtcaaaattgttaccctgagccttaaggttagcagcttcatcagttttattatacactttttatctttgctttggttaaaaaagtagaataaatatgattttttttatctcagtacttttatttgaatttagaaataattgcaaatgtgctaattcagttgtattttttgttttttttaaacacttgctgatgtcatattcttatgaagctaatttgatgcaaattaggaatttaggcaaaatgtacatatatatagtgtctaataataaattatgggatatatttgtatttttgtgtctaataataaattatgggatatatttgtatttttagaactaatattataattatcatatggctcgtggccatattagcaaattatttaaaaaaatgatgaaatgcaatcgaatgaaacatatttattatagtttgtgagacagagataaatcatatagtcgaaaataaaacttttattatatatgcaaaaatatgaatgtatagatagatggtgattgatgaataagaaccctaattaataatactttaattgtgatttttgatgatacagggcagctgagctagctagtaaactctgaaaatggaggcttcatctgttggggctgcctaaaataggaatgtgcatatgctgttaaaaacaaaaatggtcacaaattgaattctttattgcatgtattcttctttatctatgtacatacatttatgagtttatttatcatcatttatcagcctattaaatatatattttttttgttgacgcgagcctattaaatattaattgctaccatgtaaatatattccattagagcattgctataagacaccagtggtgcttagcactttttcaacatgttgcgttgcgattggctagcgatactccttaaaaactattatattaaattatataagacccgatatttaattagctcaataacgatattgacacataggaggatggtagacactactggtgtcctttagcatttcgcattccattattatgctatttaaaaaaactgtcagctatcatgtaaggcatacttagcaaattcatgaacagtaacatattaagattacgactaacaaaagataaaaataacccaaaaaagtagaaagaagactttaattagaaccatttttgactaagtatagtttgatatataaattttatgtcgtttttattatatatttttataatagatagattggtatcatttatagcgtgttatctcttaaattttgttttaagaaatatacattgtttactatagtgatcacatgttaaaatttaacccacttgtttgatcatataaattgagaattacagaatccaaacaagttattaaaaaaataaaaatcaactattgggtcataaaaaaatttcatatgaggaaggcttaaatagataaaagaaaaattgggtgatttctcattttttgatcaatttagaattagtaagatttttatgttgggattttatacaaatctacacccctttctcaagaataaaaagcacaattgggtgctttagagaagaaatcagcacttcgttttcacccaaccttcaatttaatttttccattgcccaagtttgtggcacatacataaattgggaaaggaaatatcattttgttaataacgaattctcttcgagaggacaaatctctaaatggactttttaaaacaatatcaatcttccaattaaattgaattttttttttcatttcatatctaatagtacagagtaatatatttataagtttttgcactatttgtaaattactaataaatccttacactataaaatagtgtaacatcatttaggtaaaattagaatatgagtaatggtaataaattatgcactaaaatagtatatggtggtgatacaatgctgtttcaaaacaataaatcttatctaacataaataaataattggttgaaatagttttttttttttttgaaagagattgaaataaattatcaaatggataatatttagtgtgcatattattattggtacacttaagcaaattttttaatttaaatataaatatataagtgttgggcagtgctctttcccttctttaagaaatgggtccgtccactaccaaccaaaataatgttctgtggaagaaacttcttaacaa

SEQ ID NO: 239591 - DNA, 1640 bp, Cannabis indica
taaactggttgaaccaatactcgttgccacagtcagtgaggtggggaataaatacagcataaattatttgagacattgctgactcgcattatggtattgaaatccttgaggtgagcaactggatctgaggtcccatcgtatggcgagacgtggggttttttgaacccttggggaaatttgaatttcataatctctggatggaaaggctcaggttcctcgtccgagtcataaccttgcagtttcacatattccccatcttagtatctcttgaacttatcttccaactcattgattcacaattggattggatcctcttgctttcgattagcattgagttattggcgtaaatcaggtgcattttgctttaagcgctcgcgtaaattgggttgtctccgattcaatcgttcacgaagatctggctatctttgatcatagttgctgtggaccttgtacctaagtaactctcatattgatggctcctagttgtgctcatactttctcgatcatcaccacggcaaggtctatcccctccgcgcatgtttctttctgatagactatgttctcgagatcttgaatgtcccgaactagaatttgcctcgtcactcacaggtcttcttctttgggaaaggttagatacacacccccgctggggtatccatatgcctcctccctatcagtgcgagaaggtcgttgacggtgtctcagtggtaacccacttgtcgtaggttgagtcccattatttctcttgttaccatgagagatctcatattccctaaatctgggttgccttatgttctcgtttctacgagaagactccggtaagtcattgttatcattcccctaatctgtaaatccctggggtcttcgagacacttctcgacgaggggcctgatcgctctgttgctcgctttcaggaacatccctagtttcccaggttactcctcctgggcgttttggggattttctcaatttttctccagtctactggttctcaaacctcgaggtctaccttgttgccttcttactccaggttcaggttggttctgtgtgttgttttcttgagtcgccctagtagcggccgcctctctttccaactcagtgtttatttggttagactcagccagacgttgctagagttggcaattttccagttccactaatggtacgtacctagtgggatcataggcatcctcacttctaggcacataatcggtgtcggcattggtttcctcattcccagtttttgggttttgatcatgatcacattggcttcttcttgaacgtgttggtcgtgttgaaaatgttgttcttgaagtgggtggcctccgtgaacccattggttcttttccaagacaacgattagtctctcaggacgactattatcattttgatcgcgatcagccatggaggaaattcttggttggttaggagggattttttttttgagtctttatcacgtaggctctcattgaaagcaccaaactattaacgtagattttcgttaataatttatgagcctattttgtaatcaatcaaacacagatataaggaaattaataggtaaaataataacaatgacaccaaattttttacgtagttttgaagttaactctgcaaagtccacgagtctatcttattca

SEQ ID NO: 239592 - DNA, 981 bp, Cannabis indica
gatggtgttagccaggcgggccaaggcatgaggatcatgagtgcaccacatacaaaccagggtctacgggccaggacgttcatgacgtcctctcttctcgcgaatgtgaacaggaggagtccgtcatcaatctctttccatttccagcccttgactgctttccatgagagattcaatgatccttgtatagcagctttgccaaacttgtatctatggattatttttcctaacagtactttatttgcttcttgtggttcatctacctcgcccgggttaagggagaaggtaatgtcatctggggaaatttgaatagagtcttcaaacaggttgctaattcctgaagtatccattttggagtacgaggggaaacactggtagagattgtttagagcaattctctatgcacttcaaagaagtaagctcctagagagcaaacactggtattgtagggaagttagattaactggtattatcattagaaatgtgtttccagtatcatccttttccattacattagtttagttagtagcctaaatgtgatacagtttgcacattagtttagtatcatccttttccattacattagtttagttagtatcattggaaatgtgtttccagtatcatccttttcaaatttatttttgagatgacttaatataatttatttacttatattgtttcgttatttatattgagtaattttttagcaccaataaaactttttcttttttaaatttctaataattctaattttaaacatatattgatcataccttaaaattaaatttgtaaattaaaacgacacttttcatatattattaaaattacatagagatactctctcaacaaaaaaaaatgacataaagacaaatgaggagacaaaaataacataaaagtgaaataatacttcttttcttttaataacattaataatgttatctttttattttttttctagtgctcaacattttcatttaaacg

SEQ ID NO: 239593 - DNA, 2292 bp, Cannabis indica
agtttctaaagtggttgcagcgctagttgcaatagggattcctatacaattttttattgcaatttaggttgcaataaaaattgcaatatgagtttctaaaaaaattccgtaaaatacaaacaaaaatgtttagaggtgtaaaataaaaaaaacccttaaaaatattatacactattttctatttttttttaaattaataatataaaaataatttatattataatataaacaatgataaagatatatttagtgaatttaaatttaaagcggcaatgtttttaaaagaaaaataatatgttatatagctacaatttatataatataaatgtacaaatatttatataatttatattggagaaacgtcacatattgtagagattaataaattattatttagttccctttaacactttttttttcctccgagagttccctttcacacttgaaaagtctacttttatatttcatgatgaaaaagcatcgtagtcatcgttcaaactttgcaaatcatgcatagaaaaaagctctataatagttttattaataaacgtttttgtataagaaagaaataatattggttaagttattttgttcttaatttataaatagccataagtctaaggtattaggtatgaggcatgactcactcccaactcagttagtatacatgattataatactccttgcaaaaaataaataagagattataatacgaaattaagcagcaataacaatctatatataaacattatatatttggaagtttctaggaagaggataataactaataactaatttaatgtcatgtcaacgactgaggtcaagtcagacaaagctcagagtcccattttgttagttctctaagcgtcggcgaaccgtttaataagccatcccattccccactctattatgttttttattttgattttttcttattgacttgagtcaaagtcgtcggaatgtggtttcttggaataaacatcatgctatcatccatttttgaaagtttgggaattgaaaatgtgagccacttacttttcattgggttccaaaaccactcatttttattaaatgatcataataaattttgaaacaaaataaataaatttttttcctttactctttattcttagagaaatgctaaagggcactagtggtgctagcagcttagcaccctcctatgtattaatatagctattggtctaactaaatatcgcgtccatataatttaatataataacttttagggagtatcgctagccaatacgcaacgcgacatgtcaaaaaggtactagacactattaatgtctaatagcaatactcatatttttaagtggttttattcttttatttagtttaacgaaaatctttcctcgggttggccttgagaatacatggatttaaggcactatttaaattttggagtcttcacaaaaaattcatctttacctatataaaaaaaattaaacatacaatcaagattatttttaagattttaactaaagtttttgaatcaaatcatatttacagaaaataaaatacattattcttgaacatatttgatgatttgattaataatctttttttctcataatgttaaatatgtgtggttgtagactttagaaaaaaaatggaccaaaagagagcttattttataacgggaagaaaaaaaaaagttgttaaaaaatagagttttaaatataaaaagagaaacatttccaaaaaagaaaagaatttgaaagaaaaattaatttaaataaaatttttcagcatataattgagttaggtcataatggatgcttcaatatgtgtactttcagaaatgtataaaaataatatttaaaagagtgtcatggactcaaactcaacccacatatcatacacttcaaccaaccaatatgtgaatagttgttgttaacaatggacttagttttagtaaaaatcccatcgtaatgaggccttttatttttattttgggccaggatcggccctgagttgaattgggttataagtaaaataaaaaattgagtttttattataaagataaatggtatttttaaaaattattaaaaaaatatgtatatttttaaaagatatttttttatttgagcccctaaaatgatttgaccctaggcgcatgcttagccagccttagcctagggctggctctgttttgggcccccaaaaagtgtaggccctaggcacgggcctagcccgcctatacctagagccgactctgctcacaagactttcttttggtggtaaaagagcatttccttaccaaataaacaa

SEQ ID NO: 239594 - DNA, 3003 bp, Cannabis indica
ttcaggcgatgatgttggtttggacaatttagttcacacgaaatcaactcttgtggaagggtaggaaaatttatgtggagttcgttgtcaatttggctcgtctcactcttgatcagtggataaaagctcaagaaagaagtttgtttcctgcgtttgatacttggtatctttcggatgagattgagctatggtctaaaccaggttatgaaaaactcaaggtgtatattgatgttgcattgttggacgaagaaggaaggcatggttttggtggggttgtttaggatcacaagggtccggtcgtggttgggattacgggactgcagattgagcaagttcttctagagtttgctgaagccatggctctcaaagaagtgttgtcatagttgaagcgcaattttttagatgtttgtattatcgaatctgattgtcttgtattgatactagttattagaaatttgaatatcttgtcatccacctttggtggtatcattgaagattgtaaacaacttttattttcttttagggatgtttctttacattttgtcaaacggtctactaatcagactgctcatcttatgactagaacatcttgttcatatgctggtcgtatttttttgaagtataatctcccctttaatgttgctaatattattaaggttgaattaatctagttgaataaaaatttacagttacaaaaaaataataatttgtgggggggttttttgagtgtacaattattaagttaaaagaatatatttaattttttaaagtaatttttttttttccattgattcatttttttagtatacacatatagctgggttcgtacctactgacttctctaatcaaacttcttgacacgttgctgtgttgaactctcttcaaagtaacaatgaattcctcccgatgagagactttaaacaagatttctcccaaaactttatcacccgcccaatgaagaaaacaacctataaacaatcaaatagagtgcaaaatacaatgagcattgagcacgaaaacaaggtttggaagccttaatcttcacacaaagaactcttaaaataacaaagaataatctaagaaaatgaaagtaagagataggttttccaagagcttgaggtcgtatttaccacacaataataatacacaagtacaaaaccatttatggaaacatttagagggagtcaagaatagattaaaaacagaattcttaacagcctctagccaatgacagcaccattataatttcataaacactttcatgttttccacgtcttctttggatgctggtttgctttgtggtttcaaaatcttccataatccaactggttgttggcttttgacttcaacatcttctgaatacctcccgaaaaacttcagacactccggataaggcttcacataaaggttgtagaacttcagtctactaggcttgatcagtgctcgtaaaccaattggagaaccaagcccgtcttttgatcttaaatactcaattacattgaaccgaggaactatctgcttatcgaaattcacaccaacatactctggaacttcaagcaagcaacgaatgttgaatttcatcatattcactaaaaaatcgactttcttttcgacatcttccatcttgtaaacaattgatctcggctctttccataacacttcaaaggcctctctgcgagtcaaaccttgcttgcaaaagtagtcaactctcaacttcacttcaaagcctgctctaaattcaccctcactatagatcttctccaggattgccactctacatttcaaactcctcaataattcaaaacaccgcgaaagttcgcctaattccatactgagaattcttgggtctctgctaatttctctgcttatcaaatcattatcaaaccccagcgctttaaactcagaaatcaatggcttcaacctatcttccaccccgaaccctaacacctccgggaaggaatgcagaatccaatcaactccttctgctgacatgggaatcccagccatcaagaattcaactctccttcgaatttcactctcgttcatcaaagtcacctcgggaaaaccttctaaaaccctactcaaagtagcattgttaaaccccatacccctcaaaacaacaagggttttgaaaaaaccattagggtctaagtgatactttctagaatgttctaaaacactcctaaccatcgatggagaaaccgtcgaaagccccaattgtgaaaaactcatttcccaattattaagaaaatggcaatccaaaacaccaggacattcacagaccaaagatacaagttcattttggggaattttgaagctgaaaagaataccaagggacttttccatgtcctttaggttcatctgcagtaaaaaacgattgttctttgagagaaaactgtggagcaaagaagacgggaagccatacctttgaagcagattagcaatggagatttgattcctgtaatgggattgttgagggagcctggaattgctcttgattgggattgttgagaatgattgagaatcttggttcgggaaaattggcaactgattccgaagaagattaaaagagactcctctcattacacttgctttggccattgtaagattagtataacaatttctgagtcaatttcgtagacattttcctatccaaatctctgacagcacaatatatctctatctcaactcgtaaagctacccttacaaaaaaaaccttgaaaagctgcatttagaagaaatgcaatagatcaaagtaagtcaagatgttctagcaataattgtaatcacctattatttttaacaagagattctaagataagcagaaacaaagctgtgaaaataaatcaccctgatgctaaaattgagcatatgtggtcatcaaaccattggaatttttacaactacgggaacaaaaacaatgatgatggcacaacaaacaaccaaatgagtaaaattgagagaagaagagaagagagaagagaagagagaagagagagagag

SEQ ID NO: 239595 - DNA, 1334 bp, Cannabis indica
attatgtgagtgtatgataaggtgtatagagttctatacttaaattaaaattaattagtaataagaaagtagttcattagtttttacatattaccatgtgagacactactaaaaaaaaaatgtaaaactccttctttgtatagtaatccatttttctcaagtatatatttgcatctttagcattatcccttttttgtttgaatggaatctatgctttatgtattataaaagttcagatttattatactatatatgatcgttttctatcgatgtttatattaaattattaatatatatacatatacgtacgacgtcgtaggagcaccttgaatttactttgacttttaataattagttttaacaattaattaacaaaggttatatgatgcaatggttatggaaccacataatttcactatcagttgttaactaaccaccctcatatatatatataattaatccaccatcgattggattgtgggacccaattaagttgaccgccgaaataaaatgttacatgatctcatctctgaccaagtagcgtagaatacgtgtccaaccactattatactttgataataatgataagagcattgctattaagcaccagtggtgcctagcacctttgcgacatgtcgcgttgcgattggctagcgatactccctaaaaactattatattaaattatatgggacccgatacttagttgtaccaatagcgatattgacacataggaaggtgctaggcaccactggtgccctttagcatttctctaatgataatggttaaaaaatttgctaaactatatatttaaattgttaaatttaataattttggtgtaattttaataaaaaaagtgtaacatagataaaaatttagaaacataatttaatacatattaaaatttgagtaacatgatttggtagatattaaaatttgagagtataatttaatatataaacaatcactaaattacgtaaaattaaatgcaattggacaaaaatctcttcaaatgtaacagttttaatggttcaggaaaaaattttaacggctagaaaaattctgagagcatgattaatatttgatacatgtcaaaatttaataaacaaaaatcctaattattattccttcacaaaaacctaccaataaaatgatatgtaggttattatattatagttttcagatgaatatgtgatcatattttaaaaagaaaatatgtaaataatgtatatatatttggaaagaaaaataaattcttataacactcaatttatttgtatactacttttgctgataaaaaaaaaaacaatatgcatgtttaaaaaaaaaaaaagt

SEQ ID NO: 239596 - DNA, 574 bp, Cannabis indica
ttacacaatcacgatttaatctcaaactttcaataggctgatccactcattgattacaaaaggtgatagttatacatatagatttttatagttgctaaaattagcttcgattctatcatggctaattaatgatgttttaaattctctaagtcagccccaacaacatattccacgctagcttcacaaatgcactttttgtacggacaattcgaaagataatcacatgttctggatacgcgttcaaggttgactcaagctatctagaaggacgtctccaaatataagacaagctatccggaagactttagttacggaagacaagctatccgaaagaaccatctagactggtcatagctttacgaacaaagttttccagaatttcttttcggaataacaactagcttttcggaagataaaatttgtaaccataatcaacagttggcgtttcactgaattgactttctctgacttcagtggcaggatgagaatcgtggttggaagaccaaaaccaaagctagagttagaactagaactagatccagaaccagaaacgtatatttgtttgagttcatgg

SEQ ID NO: 239597 - DNA, 961 bp, Cannabis indica
tttttagtgacatgtcattgccatgtgggcaaaattaggacttaatgagactgaatagacgtcaccttaaaaatgtaaacgaaacagtactttggagagttttcccgccaaaatataagattgtatggttttttacaaataaattgatagttgaaggggttttgctgcaaattactctaatttttatatgtctttttaaattatttattaaaattcaataattatctcgtcaatttagagaagtcatatggaccaattttcaaccttaacatttttttttttaagtaaaatttaaaacaatgataataccattctaaattactccgaaagataagcaatggtcatcacatacatttcacaccacacacataaatagcaaaatttgattagaaaaagacagaacatgaagctgtcaacttttctaatgctcatttaattgttaattaattatacatctttcttgtgactaccaattagtagtgactcatgactagtttcctaatctacattttaaaaaatatatatatattttataccttgattagcatgtggttaaacttaaacaatattcatagtgttatgtctattgtattttattttattaatgggtacaaaacaaaccacgttccaaaattttaataatctaattaagacaaaaatacatatttgtgcagaatttagaaaggtgtttggttgaaggagtcactttaatttttattttttttttttttttcaattgagggacaaaatgtctctcttatctaactgaagtgatggggacttttcttattttatttattcattattatgtcaaatcaatggaccaaacgttccaccattttgttcctttaattaagccaagagtgattggtgtcaatagtttcaattaatatgtcgccaaacacgtccttatccaaagattacttgtagtagcagggaaatgataattgcaaattgttta

SEQ ID NO: 239598 - DNA, 3141 bp, Cannabis indica
gtaaaataatttccaacagtaatctccctctcttctccactttttatgagtttctctctcaaaaatgaattctaaaagtcctaaaaatgaaccctaaaagtctaccaaaatttagcttaaaaatttattttttgcaaactgtatggatgtatttatgcctttggtcgccctagcagtgcttaagtgccgccggggcggcggttgttggaaagtttttgttgcacacttagaacagtattttggccatgacttctttgatacaatttaaaattggacaattcaagatatttttgaaagatgagaacgagacctacaactttcatgtatgagcttaaagtcttgttttacctttaaagtcgtcaagaataacaacgttcaattttgtcaaaccgccgacttctactatttttcactaaaatatgctaaaatctccccaaatgactacaattgcatgattagtcttcaaaatagcctaaaaagttaaaatcacacaaatcaataatttaaagaatcaatttaagaatatttatacataaattgaccacatttataagacaaaatatcaacttatcaaattcttccacacttgactcttgcttaataataaaatgaatgatgcttaaacatattggtctttataaaaataactttagtttcaaaaattgtacatccacttatagttccaagaaaaattctaattcttcaatcattaaaacttcaactcaagataattactttttaaactcaattcttgtgtatgtgtggtcaattaactcatcatattactaacatttaaatcatttcatgcatgccaacaataaatattcatctcaaaataaatgtgtattttaataaaaatccactccataagcttgattatcaaaccattctccactaatataatcaaacacaatctcaaaatcaataggactttataggcttgtaatgtaagactagagtgaaatgtagatgagaaggtaaatttagactttaatcacatcatagcatacatatacaatattatctcaaataattctcatttgtattctccaatcaattccgtcaataattcaatcttgtatcttttcttatttattttcataagtcttattattcccccacacttagattgttgcaaatattcctatatttttcatatatttcttcttcttcttcttatttttactttcaaaaatacttgcaacttacaaagatttattctaaaggaataggagcctttttttttttttttttttttatttttttttttatcataactcatacataaccatcaatatttttccctaaacaaaaactttcacacttttttaatagtctggtgtgaaaaaggatgaaaatcataactatttttggggcttaaaacgctcatgtataaggttaaaaagaaaagaaaagaaaatgataagatttcaatatttaggctaaaataaagtaactaggaaattcacaaatatggtagacttgaaaggttcaatcgatccaaagaaattacctatatcatatctcaaaattatgtgaatttatcaatttctcctaaaaaagttatcaaataagttctagagtagttgagatcaaatattaatagtcacacatgcattcataccctaaacattagcaaatatgataattcaactttcgtgcaaaaaaaatttaaaaatcaagccaaagcagtaactagtcttgcgttatggacacaaatgatgtagagtctatcttttttctagaatcataattatcacataatcaagaattttatcattaacacaattattttttaaaagaccatgcataagacatcaaagtaaagacacttatcaaacatgagcagtcattgtccacaaaattttactaaaaccatgctcattcattttttgtttattttttaaactaatataaactagaaaacagtaataaaataaataactaaacatcttaagaaaaatagattggatagacacgataatttttctctcccacacttaatataagtattgtcatcaaggttcaatcaaataacatcaatgcaaaataaaaagaaaaatgtaaggaaaaactacggtaagtttgctttgtttaatatcgttagcttgactgcatgttgcgctcatatggtcttcacgttggatcttctaataaaaactcattccttatatatttttcaatgaaatctaacacattgaatttgagttcttaactatcaaattctattataaatatccatactttcatatcaaacttcttactcatagtaagtaagaagggtctcccaaatagagttgatttaggattaggatcaccatcatcttctatcttaattgtgtatgaatcacttggagtgataagtccattagtctgcacaaaaacaacttcaactatccttaaggataagcattagtctgattagtcaattgaataaaaacttgagtttcttttaataaactaagatttaaagaagcaaaattagattaagacatcatattaataattgctcataaaatgtacttgtcttaggcaacaacatgttagggtttatgccctaaaacgcctgtaaagatatttctgattgtttaaataaagagttgagcatttaatatatatatatatgtgaatgttaaattgttaataattattattaaatatcaaaaaatttcttattcatatatgaggttgtgggttgtagctgtatagagaactaagagcacttagctatgaataaaacagtttgcaacatattaaagttatggaatctttaatcaatagttgctagtacaattcactgatgtttgttctttggtgcaagtaatcttggttcgaattacggatgtagtgagacatcaaggtgaatgcattgtatataatagagattatatatgacaaggacttatatgaataaagctgtctttattaacatgtcgtttatcataatgacctaattcatatcataatgatgatcaatagtagatcggcctaaatcctgagttatcgtgaacttctgttcatgtcattagtttctttgattcactttctaaagtctctaagagaagatgattcttacaacttctattttgggagtctaataatatggattgggaaaatgatgtacaattatgaaatcttgac

SEQ ID NO: 239599 - DNA, 2688 bp, Cannabis indica
gattgaagtggagcttgagagggctttgaaagatccaggtatatatttgatttaaagggccagttctcagaagcttttgaaaagattggcatttctgccttttctgtgattgtcttgggtgcgctctttcttctccaaatacggggtgaagacagggactggttcgggcgtgttgcggttgtcgaaaattttcctagccctaggccgtcgacggttgctatgttgggcagtactaggatgacctcggcgactcgcggctcgaggcggttggagacagggacatctcgacctcgacttgggtacccgaggaacggccaggtgaggagattcgaggaagttctagtttgggtaataagggtaagtctcttttgaatttggaaagaaagacaactgattatactcccagtttagagttgttaaaggtggattccaggagtgaaccgttggtctctgtagacccttgtccttgcaaggaaacagtggggattgtgccaaatctttgtgtaaagtttcctataactattgggccgaatgttgggccgaatattgggctggatagtggtattgtacatggattaattagtgagaaggtgttcatgtcttgtgatattggatgtatggcccgattggataatgggcttcctctaatggactctggagtcaatgttgatagggccgaaagctctatagatgtagtcgggccgttggtttcctgtggtacgtcattatactctactgatgtgggagttaataagaatggcattaataatagtctttgtttgggggatcaggcgggcccatcccagaaaattaatagctcgacccctagtgtttatgatggttcttctatgggtctggttggtgcagtggaggccgagcccatctttggtgaagatagggatttgtctcttttcgttaaggcccaagatcatttgctgtatgatctaaaactttttgggaagatggatttgtttgagattaagaacaaaggaggggattttggtgttttgccaacctcagaaaccaatgagagaacaacgccatttaagaagaggaagtttgaaggttttgcttcgctgtgctctagacctcataagattattagaacacatcctgtcgttatttgggacttcccctgggacaagaaggatcacaacaagaatctaacatggcttttaaagaaccttatgagaatagctccagctccctgaattgcaatgatggaattatgaagtaccctctggttgggtcttttgtgatggaagattctgattcgagattgtcggtacactcccatacccctgtggaggagaatgtcaaatctcctccacaggagccatgagaggcgtggcctagaactgtagagggttggggcagacctctacagttcgtgaactgaagtccctgatcagatctcgctctcctgattttgtctttatttctgaactgaaagttgatgctactaccctggtacgcactctaaaatccctccatttttactttaatatcattatgtcgcctgtaggtacagccgggggaattattttggcttggaaaattgggtttagctttcaatgtatatcttgctctggcaatcaaatttctggtctggtatattcggatccccccactcacccctggctcctctcgtgtgtgtatggtcctccatatttcatgctaagaaaaagttctggactgagctcatgtcgataggagaaagatttgggggcccgtggttgatctttggcgatactaattttgtgcttagtcattctgaacgtgaagggtcgtctggaagggaccccttcgtctcttttatttccaatctagtgtattctcgtggcctaattaatatgcatatccaaggtgagaaaatgacttgggataaccaccgttctggtagtagacatgtgaaatctgctcttgataaaggaattgtcaatggagagtggatccatctgtttcccaaagctattctctgctctcttcctacgagcaattcagaccatagaccgttatgccttgacacggggggagttgcccctaaatttagaaggtgctttaagtttgaagaggggtggacgagggacgaaagaagtaagctagtggtggccaatgcttgggactcggttgagcattcatgggctcctgatcgagtgttcaagaaacttggggcgactcgtgttgctctcctcaaatggaacagaactcagtttgggaagttggatgaggtgattaaagaattggaacaaaaacttgatagattacagagcttaccagcaggtgcccgggattggaatgaagaatataatacacgtcgatcacttaatgaacacctgactagaaaagcaatttactggaaacagagggcaagaattgattggctaaaggatggagataaatgctctaaattcttcttcctctcagcagctattagaggaagaagaaatgccattgagagccttctgagtaaagacaatttatgaataactgaccgtgagttaattgggcgtgaattcattgagttcttttcaaacatttactcggggtcagagattaatcaagctacaggatgtagagagttattccagactaagctgtcgctggaggaacaagaggggaccaccttttgtccctctcgagacgaaatcaaacgaacactgtatgccatgagcaaccataaggctc

SEQ ID NO: 239600 - DNA, 1858 bp, Cannabis indica
gggtatttgccagtttcacattttgcgaagggtaattgggccttaagccccgaaacgtagatggtcaattgggcctgagcccaaaatcacagctttcgttttcccttaatcgagtttatcttctcaagcctccacccatcgtacagccttgcaatgaaagtgtcggccttgatgtcaacgtctgggctaggacagaacactgacccaaacccatctccaccgttaatcatgttgactgactctgattcttctttagttgacgatgaatcagcgtcgtccatttgctcaggggagccacaacgagagctttgagcgcttctaattttaacgtagtctccactaaccaggtacttgaactccggcattttgaacggcggaggaggtggtggaggcatcggaatcagcgggctctgacaaccgctattcatattatcgtcgcagtaagagctcgacttcgctggcaatggaggtcggccggaggttcttctgcgtgaatgttcggactgaggaggtggtggagaagcgggcggagctactgatcgattttttgttctataggaccgcgatgttgacgctaacgacgacaaaattggtctcggcggcggaggcggaggcggaggaactgagtgaattctcttgcttttgattccctttcggaacagattatggaaaacggagtacggcggtggaggtggaggtggtggcggaggcggagaaggcggcggtacttttgtgtgatgagactgtagctgttcagttggagaagactgagtggcaaaatcgtaattattgttcgcaattctcagcttcttcttcctctttctctgattatacagcgaagttatagccatggttatttctcttttcacattgctcttttttctttctagtttcttctgattcagctgaattctcgccggtgacggcgaaggtctgggaggaggaggtggcggcgtaggtggtggagatcgagttttagtgaattctatatcagcgtcaccattttcgtctcgcttctccaccttctctctccgctcaactgatcgatacgttcttctcgatttcagatgattctttggtgctgcaggcggaggcggcggaggaggaggagccggcgacttagggggcgtagaaggacgaacaacaaaagtgtcaactggaacttctttaatttcatcttcttcaactttgcttcgttgccttgatcgatgtcgatgatcaaacgacaccgtttggcggtacttcttgatatcgaaatcatcaaagaatcggaactgagacttctgatcgtctctgttatcatcccaaaccgattcttgcctcagatctggatacgagctactgctcctcctcaaccgaagtgtggcagagccaggcggcgtccgattaatttgatcgtcatacatattattaatactatttttgttatcattccgatcagaaaatccaaaccattcttgggaaacggattccgatacactaattggaggaccaatcctcgcattcctaacgtggtccgaaacattcggagtcggaggagtcaaaacgacatcgttttcggtagtagtagcagtaacaccacttgaatcatcgtcgtttttcctagcgaaaattccgcaaagaatcgcaaaaagaacaaggaatatgtttaaagaatcccaactcttctttacggtgaatggacgaaatatgtgagaagtaaaagtaacaacgggaggaatagcaaagaagagaaacacaaaggttaaaatgggtaagaaaatgatgagaaccggaggggagagaaccggagagaaataagaacgatcacgacggtgaggcatggcggagaatgaagaagatttagggtggtggggtt

SEQ ID NO: 239601 - DNA, 1547 bp, Cannabis indica
aattttttagcacgccacaaggtaagattttcgttgtaaataaactatattatgtataataattaggctaattagactaactagatttttggtcctgaacttatatgtattaaattatgtctctaacttttcaagtggttacaaatattctgccaaaactattaaaattgttgaatttaaaaatttttgtccaattaattttactaacaaaaacctaacgtgaatgaaaatacacggttttgtacatgttaaagttccaagagtacgattttttagatattaaatgtttgaggaatatgatttagtacatagacaatcgtcatgttagtaaaattgaatggaattggacacattatttttgctccaaattttgccaaggattattgattgaagccaaacatatatatttatattgattatatgtctgcatcaccttttaatacgaggaggataagaaaagcaatgtttttttttttttttaattccttcacctttttaatttcaaaaaggtgtttttattttaaaaaagaaaaaagacaggaaatttcgtggtcaagttttatatatatgtatgcaccgtcctaacaagttgaagaaagaaagcgatttttctatttctttttttaatatttaattatataatagatttttttttatttatttgtctaattaaatatgtaaaataaaatatatggaccataattaacagtttttttaagagaaaaaagaaaaaaaaaataaagaaaagctggcaaggcagccgacacgcatggttttttttattaatgtgattataatttagtcatttttgctaattaacttataaattaaatcaacaaataatttaagataatttgctcaaggtaaattcttcttcttcttattattattattattttaaaaaatcatgcatttattatttctgtaaaatcgaccaccaacgaattaggtcaaaattatcgattataataaagtaccatcatgttaattatatataatgatgtaataaccattttttttgtgtaattaagattattaagtttaattacaaattttttttttttctaagtttgagtttcatattgtcatcaattattattctttaatattaattataaattaaatttctcaaaaaaaaatattaattatatattttcttttataaaaattataattataatatttaataaaaattagctagagttgttatacgtacgtaaaaagctagctagtatatacaaattaattaattaagaagtagaaaagtcttgtaattatgtggctaatcgctagattgacgtaatatacttttttttttattatttataatatatatattattatggaagaggtttcaatggttacatttttattgtaaccatcatggttacatttttttaagccattggattattattaaatggttgtgattaatttagaaattaaataaaaataaataataaataacttgtaacctgaaagtgacctaatcatttatttccttataaaactttaattaagattaattatattttaaaaattaaatt

SEQ ID NO: 239602 - DNA, 2398 bp, Cannabis indica
acatgtataacatgagtggtttcgtttctaaccttctctccacccctcccatccctggtctagtgagactctatgtgaattttataaaatcaaaactttcttttctttctcctaaattttataactttgcaactaaatctatttaaatatttatgccctccactttaacttttctttcatcatcttctttataaaaaagatagtttgatttcatttcatggtaggtgataagaagcagaaatatttcatcattaactgtagaaagtttaacttacagtatatgttattcagatccctaatgaagaaatttatctctttcttttcttcttttttcagttaaggttgtttgattaatggtggtgtataataagaaaaataacttattttcctcttgttcaccagccatagaatttataaccaataatattattgattattaaaaattaaataaaactgatctgtattagcttatgatcttccagtttgtatgttgtaacaggcatgctattgcatagaggtttcccaaatcatgagtaattggaatgggtctacagtcaattgagtacatgacaagttcacaagagatcaaagagaataaaatattatgaggcaatgaagttgtcaaaataacaaaaacttgtacaaaactattgaacagtaagaacatctctgagggaaaagaaacaaacctggctcagctggagacgagtctttctttctgcagctttaaatgctttctcatgtgctgtgacagtcttttcctgtttgctctcctgctttttctttagttcataccaccgtcgtgcattggcgtgagctgagagagccaaatcgacttctacctaaaatagttaagagatagtcgtgaagagtaaatatggatactgacatacaacgattcagatatcacatactccacgcatgctcaataacatattcccctctttatgtaaaaacagtacatgtattatagttaaggggacattccaacaacataaagagagcctctatgttattgagcatgaagagattatgaaaacgataatcattccaaataggaattcttttacattaattcattgataaagccagagatagtacaggctaaacagctgattattcatttacatcaataaaatcatctaatagtgtgtgtggatcgttatatacttagaactagtcctatatcttgaagacacaattctaacatttacatgcataaagaagagaagagaaaaggaaaataaattaaaagttcttcattatacaaatatacagaaaataatcacaaagcctgatcagtaccttatctgccgggagcgttttttcatcgtcatccatttcatcaaggttgttgcttaaaagcaatgtcatacaatttctctctagataaagcttgtcaatgaggcaagcaactggattaccagatttcttctcttctttcaccatacgagcaagatcctcccaactcataccatttgcaagagccacacgaacagctaatatagcagcatctacatcttctaaattgtattctatcagttctgccattttaacactacggtcaacttcttgtctaagagtaagcactcgattttcctgcatcgtggaattgaaacaaattaattctgttgttgaatatttagatagtaattaaatgaaaattaatttaattccagaggtcaaagaatttggctgactgaatttactaatggcgtcaatatgcagtactctttccaaatacaacactgtcccatagtaattattttcagagtagaaagcatgccatcaatttcacatgtgtttatgtacttcaatcaagattggggactgatgcacataataatgagttcctaaacatttccacttgcactagaatagccttctagtttcccctcatctaacaactcaaacaatacttaaaacacaatgcaggaagcatagtaattgctggaagtggatctttagaggccatgaaaacataacaccgattaaagaattcaaaaaataagtacctgatctgtccgtatcttggtaagtttctggatggcagagaactcttttgatttctgctgttggtcagctctctgactctcaattttgctgtagaactcatctaaagctgcatcaaatgtctcaaactgagtgtgctcccgagacttgaattggtttagtaaaatggggcaaaattcatcatacatctgcaaaagcgaaaaaacaaaaagcacacattaagaatactgcacaaacaaaggaatggaaaaagcatagcagtataatgatggataacctggcttctacttcctgtttctggttcaaacagagggacatcctcctaaaacttctctgcatcaaaatatatccttcaggaattcgatcacctgatatgatatcatgc

SEQ ID NO: 239603 - DNA, 1234 bp, Cannabis indica
tataacaaattagaggttattcttcaatagagtattcttaaatagaagttctactgtaatcatatatttgaatataataattggtatatttttaagatcttttattattttagttatatatgtttttttttttattttaaataaactttatttggtgaagatctcaattacaatttggtatatacgcaaaaaaaaaaaaaaccttattattagattacaatattttttataagatgtttatgcaactaagtatatattgtcgtaaaaaaaaaatacatattgttatataattgtgttacatcccctttattttcattttgttgcccctccactattcaaacgatccattatgtacattaattgcgattcaataaataaaaaggatgtaaactggttctattgccacaggcctaggaaaatttggaaagactcctctttctcacttgacaatatactccttagcagtatgtctataaaggaatgttttcttcatttttctactctctggtctgattcttcacttgaacaatttatcacaatcttgtagtatatttggaatgaaaggaatagagaaaagcatggaaataaaaccaagccatatgatatggttctctattttgcactgtcatatataaaggagtatcaatgtgcccagaagtctaaggctcctccttccttgtcttctccctctcggtcgacgacagcttctgatgcaccgtggctcaatcctccttcgggcaagctcaagttaaatacggatgcggcagtcgacaagtctaaccaacgtactggttgtggagctgtgttaagggactctaatggagatattgtggctgctttttcaaagtcaattccgggtgtttttcggcctgaaataatggaagctttggctctattgaatgctttaaaatggctgatagacaatcaattgactgctcacatcttagaaacagactctcttttagtggtcaaaggtttacacacatctactactactgtttctgatttccattgtctgttatcagacattacacatctagtgtccaatttcccaggagtgcagatttctcatgtttatagatctgcgaatacggctgctcatttgttagcgaagtatgctctttcggtggactctgtttgtttttggttggaggaaatacctcccccgttaaatgcttattgtattatggatgattaatttaatataattggcatttttatctcaaaaaaaaaa

SEQ ID NO: 239604 - DNA, 723 bp, Cannabis indica
aaatgccgttagatagacacttttaatatataaagatatatatatatatatacctgcataactctctccagcaatatagaattctctatatttatattctggaaatcttgacatccatctgagtaggaaaactagagcatcctcagctgcataaatgtcacaaaatttgtccctagctacagttagttgataaattgacaaatagaaataagtagtttctatatataaccactaattattatattaatataaaaaaagtactagtttctagaattaatccacacagtccattcaggttgtcaaattaatggtagtactagctatatagtaatgcttgagcatcactacttacttacttgatattgttatggctgatttagtttaaatgaatattattaagttagagaaatactaaaacacacttgtgatatgattattattattattattatttgtgtaattaatacataatttaataagtaatggcaattatattaagttattaattattacctgttgttttgtccccggagttttcaaggtcagagcttgtatttgtataggagaatccaacaccggcaggtgattcaagaaatagaagatttgcttctacaataataaaaatatatattattatttaattaatttaaactatatgtatatatatttaaacaataaggatatataaatcaattattagttacgtacctctattccaagaat

SEQ ID NO: 239605 - DNA, 1129 bp, Cannabis indica
ttctcatagattttcgaatttgaatgattcattcattaatgaaagccgcttgaagcggagttgtattggctgccgcctggctggactgttgaagttaaagtacgggcctcgggtgcgtctgctggtacgactgatagggtgagtttccgtagcttttattgttgttgttaagtaagaccacacacacacaaatgaagatagaactctgtgtattatttgaatgtaagaatagaaaatggaagggaaaggtttgttagttgatattaggtagctctgttttgaacaatgattatttaaagtttctgttgttaaaatggctctagagcacaatcaaccaactcggaaattcagaaaccaaatgtcaagaacacaatcaaacatactaattcattattccagattccacaactaaagctatggtttttattttattttttaggctgattgttggtcttgatctttcttggttttgtgaatttgtcgtatgcttttcttaatgaaatgtcctcaaaagtgcgtttgtgctgatggttgttttgggtaccacaagttttaatatgatacttgagataaatggtacttctatatgtttaaagtcaattacattagttatagggatagactagtgtagtacacctctcctctcacaaagacaggttccaagttcgattccccagtgtttgttttttgtgtttgtaattgtattttcaagtttgaattagaagttaatagagtttatataatttgtactcttttcttatcaatgaaattattgcttaaaaaaatggtgtaaatccttttgaggcagtaactacagaattgatatttaggtttttccactttgtgcagactgatagggaagttgaggtacaagatctgcttgataatcttggacttagagataagcaacaatttgtaagttttcttagaattattaaaggaatacactataacctttcttatagaagagtttgaatatcttatatattcatccatagtgaagtaacttctgagaaaatttgtgtgctgcggtgatgtaaggatgagaacttgtgtattgttttattgattatagttgaaattaacaaatggttatggttgataaaataggggaaatgctgtccaattt

SEQ ID NO: 239606 - DNA, 1388 bp, Cannabis indica
acggggtcgtgaaggcaactctggtgaggcctccaaaatgaactctggatcgtctcgggatgacctgttgtgggaatgttcattcagagcattgtaatggctacttccctcaaagtagtctttaacaagatcacaagtgtggacaaaattgaattggtttctcaggtttaattcttctaagtgaacactcgagggaagtactcgtactattggccattagggccacgggaaaagtaacgacacaattcactcctttcatctagaaagtactttctagtatgaagtggctcatttgtccttacctactgacctccagtctggaagtagcgtctcctactacttcctttaggttgagtaacaggtcccattttcccttgtagggtctcgagccctggtttcttgagaatgatgaggagaacttggtggaggattcctcttggttctatcgttgttgcaaggtcattcaacatcaggtggatgacccattggttggcttcaggctcttgatcgaaggtaccttccctctgggaggtctccacgcctagtgtttgcctagttcctgctcggttagcaagtgtagtagtggtgttccgtttttcattggacactagttcccgtgtgactagttggttaatggggtgtctttctcactaactcagaaaaacctcttcgggaagtagttccacaattataacgataagcttctctaatccgttgagacaggttagcccactgttgttcctaatcaacacattgactttagatgctcttccagttttccactaaccagtgttgaaactgttcatgtttcttatcgagagagtctcgcagtcgcagcagtcgttgtaggtcagccacagtttggttgagctgagctacctgaggatcggtctcctcagggtcttctatctccgtgtgtggacatgagaaatgaaaaattgtgaattggattcctatgactttatagatcattgtattttttaaaaactagctggacggtcaaaatggcattagtttcggataagcagaacccagcacaccaagccatttgttaacttgggcactctgccctttcaaccgagctctcgggattctatttttttatacttccaaggcttctaaacttaaggacgagttctcctcccccattttgaccagtcggattcaatggttgcattggatttaggttgattgtcaatttgggcgctgggcccagtcctaggtcagcctaggtgctaggccctatttccagggacttgggtttgtagttttctccccgagtttacttgaatcttcatttttttatgacaaaaaaagtgtctggaacattttttgttgaacatgatcggaaatagcctaagttgtcaaaatgttaacttgggcgctgg

SEQ ID NO: 239607 - DNA, 1703 bp, Cannabis indica
taatatttaaaatataattctagaatttttgtatgtacctagctgttaagtcttaaacaaattatcacgtggcaatttctgattagtctatgttattaaattttttattaaaaaaatagtttaatatactaataagaaaatgacacgtggataatgaattaatatttaaaagttaggtacctacggagtttcaaaaatataaattaagtattattactgataaaaattaaacttaaatatttatttgtaatcggaagttaaattaagtatttttaccgtaaattactttaaaaataatatatatctaaaataataagacaataaagttaaaataaaaaaatttataaaattttattaaaaaattaacattatatatgatttttcagataaatgtaaaaataattattaatattaagagtaaacaatatgaaaaggaaaactaaaaaaacagttaaagtgattttaaaaattagtttaagttgatttttttaatatttgagtgtatttataattttatagagtgtaaataaaattatgtattttggtccgtggagaaaaatgataactttttcatatatttattttatttttaaggaaaaaaaaaggttatttttcaatagtgtttgttcaaattcctcttttttcttggttatgcttaataattttgttgaaaaaggtttttttctatttttaatattctagaaaatataaactttctcatgtggtatttatgcaaaattaaattccaaccaagaaaaagcaataaacttatctcaaaattcttatctatcttgctattttcttacttttgttaaaagggtttctttttcttgtaaaaaaatataatatttctcatgtgatttatgcaaaattccaactataaaggtcatactttggaataaaattaaaaagcaatcacctttatatacttttaattataccgagggatgaggccaagcattttaaaaaaatattattctcatgttttcaaataaaaggagaattttttaaaaaaacaaatatagaatttttattaatttattaaattagctaaaagataaaattgtatctcaataggaatatcacttctattgaacactcaatttagaaaagattaagatgctctaacaagactataaacaactatattaacatatcatttaataaaaaaacaacgaaatattatttaaagatgtaaaaagaattttgtattcacaatgaaaaaataatagaatatttctatgtttaatattaaaatatttttaatgtagtgcaaacaatttaaattgattttgtattgactgtatataatcacaaattaaaatgtgataagaatgaatagtttaaatgtggttaaattacgatttcatttcccaatttatttttttgaattaattgttaaaatattttgacaattaatatagcgcataaatattaattgagtatctcaactataaatataggataccggtcttcgagctcctcatttattttgtgaaaatctccatttaaagagagtagagaaaacttaaaaacctgtaaaattaaagttcaaaaattaataactaaaggtatttcgattttttctttatattctatagagtaatttgcggcataaatacctaagtttaactctcagttgtaaataaatatctaagtttaattttttggcggtaaataatacctaagttataattctagaa

SEQ ID NO: 239608 - DNA, 1062 bp, Cannabis indica
ttagagataacaaaactgaaaaaatatcacaacaccaaataaaaaaaaacagttatattagaatgataatctttaaaataaaaataaatatacaaacttagaatttaatatacaacccatatcattagctcaaaaattactaaaaaactaaaaaagcaacaaaatttctaagtataactagttaatgatattacccaatagcagcatattagcactctaatttaaaacggttaaaaataatatcaaacagattatatttaaattaaacttattagtaaattttctgtaattgtagatcctccacaaaacaacctacaaaataacaaaaataaaactctattattatcacacaatataataaaaaagatacataatgtgataaaaacgatggtaaaccaaatcatattaaagataaagacttaaaaaagtttgaaatacttatctgttaaaagtaaaaaagtcattgaagtagaaatcatgaacaataaaaaaaaaaaacataaaatgaatcagttctcttacttattgaccatactacaaaattacccttaacaagtaaggacataccataataaatgacaaaaaattaaaaagcacaaaagccaaaactataaaaaaaaattatatatgagcttgttgtttagtcatctaacttttgaataatatatcaattagtatctaattaataattagcaatgtaagcaagatgacttattttttattttaatcacaccctataacctcttacctatttttatcatgcattgtttggtaaaatattcgaatccatagacagagagattcgtgctctttttttaaaaaataaaataaaaccttttcacacattagtagtggaagattctaaggtcatattggtcgacttttatttttatattcataattatgataaagtaattaaagtgattaacaaaaaaaatgttgtcttcatatttatagttttgatttgatttgacttggggttcttctttctttgatacatataggtgtaacacaaaacaaacctattataaactccattacttcataataataataataata

SEQ ID NO: 239609 - DNA, 3359 bp, Cannabis indica
caaatctgccaagcaatcatcaacacttcagcagccgaactgctacttcttgcagcagtaaccataacaaaccagcttctgaaatcactcacagcaaaggagctcgagttaatagctgatctattccagcaagatcgagcaaaatgacactcgatcaacacatggataatggtctctctctcgacattgcagaaaggacatgacagaggaacattaacatgttttgtctgccattgaactttagttggaaggcagccagtgatggctctccagccaaagtgaagaaccttttgagggactttaatttgccagaagtctttccaaaaattgtcactgttttgaacctcactcccctcattctgaagcattctgtaagagctctttactgaataaaaaccagcagcttctctactccaacaccagcagtcgggtacattatgttgggatagaggaatacctaaaattagagctttatctctgtcattgaacaggtcagaaatcacctccacatcccagcttttatgttgaatttgcatcagacttgccacagttttcccttccaaaccagggtgagtagaactgacataaggttgctacagattaggtatccaagggtctgtcaaaatgcttgtgttcaaaccagagccaatgcgaactctagcaccagttttgatgacatccttcgtttcaactatacttttccaaataaagcttggattgtttccaacattggcattgagaaaagtatctttgggaaagtatcgagccttataaatcttagtaaccaacgaggattgatctgttaagagtctccaagcttgcttccctaataaagcaaggttataatttctgatgtctctgaatcctatccccccagagttcttatgtttacacaacttcttccaactaacccaacttactccttgcttatcttttgaagattgccaccaaaatttgctcataatactttcaaggccatgacaagtttctaggggcaaaagaaagacagacatagcatagctaggaaaagcttgtgctacagtctttaaaagaatttcttttccagcctttgaaagaaaccgactctcccactggtttattctcttctgcactttggttttcaagaagcccaaaattgcatttttgttcctaccaactaagcaaggcaagccaaggtatgtactggactcattagctgccttgattcccattatctggcagaccaaagtacgaacagcaggcagcgtgttactactaaagaacagagaagatttatcaaagttgacaatttgtccagatgcaagctcgaaaattctcagaagttggatgacattggaggcttctctctcattagctctgcagtatacataactgtcatcagcgaacaacatgtgggaaataactggtgctccatttgccactttacaacctctaattcttttgctagcttcaaattgtttaatcaacgatgaaaaaccttcagcacaaatcaagaataaataggaggacaatggatcgccttgtcgaatgccccttttgggaataataggacccatctctctaccactattgagaatggtataacgaaccgaattcacacaattcagaaccaaccgaacccagtgagcatcgaatcccatcttaagcatcaattccttaagaaaaatccactcaactctgtcatatgctttactgaaatccaaactaacagccatgtaaccttccttcccgcgtctcttacgctttaagtagtgcattatttcataggagatcatgatgttgtccgttatcagtcttccgggaacaaatgcactctaattatcagagatcaactgaggcagaacatctttaaggcgattagcaaggaccttagaaaatattttatacaagacattgcacagtgaaattggtctaagatcactcatcgaagtaggatttcgcaccttgggaatgagaaccatatgagtatccttcagcccttgtggtagctcgccattagagaagaaattccgtaccatttgagtagtatcaggtccaacagtactccagcaacgttggtaaaagccaggtgtcatgccatcggggcctggagatttgtcggggtgcatttggaacaaagccttacggacctcctcattcgaaaccggagctagcagatttgcattttgcatgacagttatggtggtggggatattgtttataacccccgaagtatccacaccagaagagcaaaataaattctcaaaataagaggttataacatcagttagaccatcttgccaaccaatccaatcaccattagaattcttaagtttggtaattgaattatgttttttccgagaagaagcaagggagtggaaatacttactgttgtgatcaccatcccgcaaccatagttgtttcgacctctgtctccaaaaaaattctcgcttagcgtaggtctcgaacagctcattttgagcatcttgaaacttggctatggagatagcatctcttcctttcttccacagctggacttccttcttacattgctgaattttacttttaaaattgcccatgtaacactgcccctaatccacaagagcttttccgcacaaatcaattttttcagtgattgaattagagttgctaaattcccagctgtccttgactatttgagtgcacaaagactctctcaaccaggcattttttaatctaaacctcttcttggcaagggtgaaatcaggtgcacaaagggaaagaagaataggtgtatggtcactgctagagatttctaaattaaataatttagcagaggtgaacatatctagccacttttgattaactacagccctatcaagccttacttcaacccaattagatgtgcctcttcccttctcccacgtgtaagggtgcccaataagatcaagatcacacaagttactctcagaaagagcagtattaaaaccttctataagccaactaggatattgattacctccctttttgtcttcttgactcaccacattgttcatgtcacctattacacaccaaggataatcatattgtgcagcaagagttttcagcaaaatccaagtcttgtgacggagacttctattaggctcgccataacatccagtaagacgccaagaaccctttgtttcatcttgaatcgtgacatctatataattgttagagtatccaagtaattgaacttcatcctgaactttccaaaggagggcaataccaccacttctaccacaagcatcgacagtcaggagaccctcaaagcctatagcacttttaactttctccagagtatcttttctactaagagtttcacacaaaaatacatacttgggcctcttttggattataat

SEQ ID NO: 239610 - DNA, 2520 bp, Cannabis indica
ttttttatattaaaaaattaaaaggcctacatacagcttctaattatttatgaatttagttttatattttcatgatttaattttaaaataaaaaaataaaaaaaatattttctatgaaatgtaatttagtccatttaagttatttccattactttttctaattatataaacaaaataaaataattttgattatctttctagtcaatttaataaatgacataataaaatattgatcccgtttatttaatattttattccttttcattccactgattctgtttttaaaatttcgactacaatttagtaaatatgtcttagtaatttaaccgtagttaattgtattaagattaatcatgctgttaaggaatatgaaattaaccacgtgattaagatttttacttaaccgcactttgggggttggttaaattttcatcaattcaccgcctaatccatacaacgctcacccctaattacatcccataataaagttttaattattaggtaaatatagttattccttttcaatgtaatcaagtaaaacaatttgtccattcaaaaaaaaagtaaaacaatttgtaccttcttaaaaaaatttatatagtttaggatgtcaaaataagtttcctaactcttctaatctaatcctaaaaaggtttaggatataccaaaattaagtgtaggataaaatacaagtttttgcaaaacagaaagatacacaataagcaacttccaagattaaaaaaaaaaagtaacttccaaaaaaggacttaggacgcgtttagaaagttaagatagaattgaaattgagtgtaaatgaaagtaattatacagtattgtgtttgtctcatcatataattattatgtaattgtgtaattagaagtaattgagagactttagttatactctccaatttttataacacactgataagaatttagtgtaattactaaaaaaaatttctatcataaatattatggactaaaaattaattattaaatattttatcaatcaagaataagcgttcctcaactatttttgcttctggacatagcttgaagaagcttcatctgctttgtctattgatttctgtactccatattctttctatttctgaagtacaagtatcaatgttggatgagataggaaaaagagtcactaatgtaattaagaaaaatgtatttcttctgaactcgtaggagtctgagttttttcttttctttcgtttcttcttcattcaaacaaaagattttatgcagtttttatagtttcatttcttcatatcatataaacaacgtaaattcctaagccaaatgtttttgctttgaattggatggtttttgcttttaatggaagatataaagaaatgttaagaaaacggctttttggaagcccagaatggatcacaagtggctttaatatagaatcatggattccatttcaaaatcaattgactctggaaagagtaattcattcatcttatatatcacaatttatttgcacacatgagcagtgtgggactaactctaataagaaacaattgggtatttttctttgatgcaagaattgcaaattactggtaataaattctctttttcgatcgtgcttaaagcttgtgttggtttgatggaattgaataatggaagagaagttcattctatggtttacaaaatgggttttgaaaatgattgatatgtattgtaaatgtgggaaaaatattgaaacacatcccaaatattacaaattttattccaaatgaacaaacagatagtggtgattggcagtggcaaacacatcctcaaaaatgttgatatcagattctcccacttagattcatatatagccaacctcaaaatctgcattcattgatagtaaataagtaaataaatatttaatcatagacaaaaatggaatggaacttaagaaaagaagatagatggttgattagatatgtaccttcatcacagttggtaaatacacgtgatggcacgtggttgattttgtagaaatcgtctcctccttgctccatcctttctttgaatttcttaggcatattctctatgaccatctcattgagtgtactaatgtttcttagtccatttggaatacttgtcagtctacaacaacaaccaattcgcaaatagccaagtctacacaatgcattctcttccactttccactcttttaagtttttcaaaatagtaagctgaagagattcaagtcgagggaaacctcctcttgagcacaccatctcttctcccataaagctatcatagtcaattctaaggactcttaattttggtagcttttctaatgttggcattggatcatccttaagttggagattactcaactgtaacttgatgagatttggggagaactggttgtcttgtggtaatcttactataggtgaccgcactctaagcttataaatacgaggacaggttagtaagaaaggaacaatatctattatgttgatgtaataagatggattatatacttgtaaagagaaaagacgagtg

SEQ ID NO: 239611 - DNA, 4448 bp, Cannabis indica
ttggtatcagagccaagtgaaaagcctggactatgtcgtcccattctcagactcctcaggccaccaccacggcagcagcaggtgctgctagcccttccgtacatgtctctcaacaaaactacactcaaccgttcaatacattgaaccaaccatttcctttgaagctcgataggaagaactatgtactctggaaaacaatggtgtccacagtgatacgtggtcatcgtcttgacggctttgtgcatggaactcgaccctgcccaccagagttcattccaactcctactaccactgaaggagaactcggttttggtgttacagtcaacccagattacgaacactggattgttagtgaccagcttctaatgggctggctatacagctcaatgactgaaggaatcgctacagaagttatgggatgtgcaactgctgcaacattgtggaaagctcttgaaaatttgtatggggctcactcaaaatccaggatggacgatactcgcactctgattcagactacacgcaaaggctcaacctccatggaagactatctgaagcaaaagaaagcttgggccgactctttggctctagcaggggagccatatcctgagaatcaattaatatctaatgtcacgtctggcttggacattgagtatctaccaattgtgctacagatcgaagctcgccaaacaacaacgtggcaggaattgcagggaatacttctcgctttcgataacaagatggaaaggctgcagaacttgagtcttaacagcagcaacaagtcgtctcattctccttcaacacctaatgcaaactttgcaaatcgtcctaacagcaacaacaggggtcgtggaaattaccagaatcaaagtagtggcagaggaaactacaatcgtggtggtggaaatggttctggcagaggtcgtggaggcagatctaatggacccaagcccacttgccaagtctgtggtcgctatggtcattcagcagccatatgttacaatcgatacgatgaagcctatatgggttcagatccaaaaacagggggccaaaccagtcagaaaaataatcaaggaggagctgctgcctacacagctgcaccagaagtcattgacagtgaagcttggttcgtggatagtggagctagcaatcatgttactgcagatgaaaacaacatgatgcagaagaatgagtatagtggtaaggaaaaactcattataggtgatggtaatagccttaacatctcacattttggttatggcaacttgcaaaccaacaatgaatcaaagtcactgttgctgaataacatgctattagttcctgatattgcaaaaaatctgttaagtgtgtcaagtctaaccaatgataatgacatatttgttgaatttcatcctaactgttgttttgtgaaggacaaacacacaaggaaggtactgctggaaggagcacttagagatggtctctaccaattcaacaacaaatccactcacaaacaaaaacagccacagtatttttctggtgtctctaatgtgtctaagtctaaagttgttcaaacagctagtgttaagctttccaagaaggatatatggcataggcgtttaggccatccatccactagagttcttaaactcatttgtgattccaacaatgtaaaaattcccaaaaatgaaatagaaaatttttgtgaagcttgtcagcttggaaaatcacatgccctgccatttaaattatcatcttttaaagcttccaaagttcttcagttaatccataatgatctgtggggtcctgccccaattgcatctaatacaaattttaagttttatatacatttcattgatgatttcagcagatacacttggctttatcctttaaagaacaaatctgatgctctaaatgctttcattgaattcaaagcttttgctgaaaatcagtttgaaactaaaattaaaagtattaaatgtgattggggtggagagtatcaagatttttgaaaatttagttaagaccaatggcattcattttcaagattcatgtcctcacacttcagctcaaaatggaagagcagaaagaaagcacagacacattgttgaaatgggtctgactttacttgctcaagccaaattgcctctaaagtactgggttgatgcttttcaaacttctgtgtatctaatcaataggcttccaactcctattctacatgacaaaaccccttttgaaaccttgttctgtaagagacctgattacaaacaaataaagacctttggtgctgcttgctatccgtgtatacgaccctaccaaaatcacaaatttcagtttcattcactgaagtgtgtgaacttaggatacaatgaatcctacaggggttacaaatgtttaagcaccacaggccgagtctacatttctcggaatgtagtcttcaatgaaagggaatttcctttccacacaggtttcttgaacacatatgcaccagaaaaacatcttgttatccaaaatgagtcatggtctcaacttcctaatgttcatttcgaacaacacagtcaaacagctcagaccacaaataatcaagaactgtctcgaagtgcttcaactccaacagcagcagtgccttcaccacaacaggttagtgaaacaaattcaccaaataccagtcttgacacacttgatcatggtttattgttccagctactgattccgagatgcccagcagctctgagtacaatgtcttcaggaaccagaaaacaatgtacaggatgttgcaccagaaaatgaaaatactgttgcaccagcagcaataaaccagttacctgatgtgcatccctctcatctggtctcttcacatcccatgacaacaaggtcaaaggcaggaattttcaagccaaaaacttacatcagccaagccaaatgggaaccaacttgtactgaacccaacactgttgcagaagctcttcaacacaaaggttggaatagagcaatggatgatgaagtaattgcacttaaaaggaacaagacttggaccttggtaccctggtcaaaagattacaacttaattggttgtaaatgggtttacagagaaaagagaaatgcagatggatcccttcaaagactcaaggctcggttggttgcaaagggatttcatcaaagggcaggcctagactatggtgaaactttcagtccagttgtgaaagcttccactgtaagaatcatcttaactattgctgtctctaaaggttggaaaatcaagcaattggacattaacaatgccttcttgaatggcaatctagaagaggatgtgtacatgtgtcaacctgaaggttatgttgatcctgaaaaacctgactatgtgtgcaagttgcacaaatccttatacggtctcaaacaagctccaagagcctggtttgacaggctcaagagtactcttgttgcttggaagtttcaaaattccaaagctgatacatcactatttttctacatcagcaacaatgttatcattcttgttttaatatatgtggatgatatcattgtcacaggaaacaacaatactcatctcgacagatttgttcagcaactcaacaaatgctttactctcaaagatcttggggaccttcactacttccttggtattgaagtgttcagagatgagacaggcatgtttctcacccaaaccaaatatgttgaagatctgttgaaaaagcataacatgattcatctgaagcctagtccaactcccatcacaactggaaagtctctatccgtttctgatggcaaagaaatggaaaatccaacaacttacaggagcctcattggagccttacaatacctgtgccacactcgaccagatatcagctatggtaaattctcttagccaattccttaagtcaccatcaattactcactggaatgctgctaagagaattctaaggtatttaaagggaacaagcacacaaggccttcacatctgctgcagcaacagtttgaacattactggcttttctgatgcagattgggctagtaatgtagatgatagaagatctgttggaggctactgtgtgtatttaggtgatactttggtgtcctggtcatctaaaaagcaaggagttgtctctagatccagcacagaatcggagtatagagcacttgctcaagtaagtgctgaaataacttggatcgaatctctactcaaagaaattaaatttccactgcctgctgttcctattacttggtgcgataacttaagtgcaagtgctcttgcctcaaacccagtgtaccatgctcgaacaaaacatatcgaattggacattcactatgtgagagataaggttctaaacaaagctctggagatcagatatgttccctcagcagatcaaattgctgattgcatgacaaagggtctgtcacattctcgttttcagtatctggtgtgcaaactcggagtgaagattacaccctctcgt

SEQ ID NO: 239612 - DNA, 2069 bp, Cannabis indica
aacaatgtcccttcatcagatttagagactttactatgttgcatttcttgcactaattgtacaagcctatctgttccatccgtaccaagtccacaagcactatagctataatgacactacacaaaaatatgaacaaaacaaaatggtcaacaaatgttttaattctttcacggtttgtttcttaatcttacatctaaaatgtctgctaaaatacctgatataataattctccaagagctgtaagttgctcgtccgatgttgctgatgtcaacaatgctttgaatgcctaacatcgagcaaaattgggagagacatgtcaagttaaatgcataataataaacagaaagactatataataaaagatatattcattgagacttgaatttaaaatctaaccttaactcggaaattttcatatataggatgtctagcaggtgctatcactccataattacgctttggatcgattactgtgactggatcgttgtgattagcatatttttcctcaaatgtctcaccaagcatgaactcgggaagcatcttaacataaagagcctcatatctgtacaccaaattaattgtataattgttaattttcccttcacaaaagaaaagaaatagctataaaaagtttacctgtgaggtgacaagttgcataaataatccaaggatgcttctgcttttagcagtttaataccatcatcacccaactcgtccaggttgaatccatttgcatcaggcaatgatcgagacagaagagaagatgcgatggacttaattattttcgacccataaaggcgcctatcctcactgatccatagtcagcacctccaacgctacaaaggagaaaaataaacattgttcagaaataaagctacaatggatcaaacatataacaaaatgagaacaatgaagcctttctttctacctgtgctttattcctgaatcaattccccaaaatcgtacgtggccaggaatttcgacaagtccaattacctcagcaggctgaaaagtgacaagtgaatttaacaattatcttctaatttgtgtaacaatagcagcaaagccaaggttgttctgatataatgagtacctggcacaccattgcaagaagtttattggcttcaccacaagctgaagtcatctggtccataacaccacaaggagctccaacaatatgattctccacctaatcaccaatttgaaagtataaaaaagactggaattcgagacaatctcaatagaaatctgggaataagtattggaaagaacactcttttcaagtcataccttttggcaaagcaaagcaagatctcttggattaatagttaatcctgcaatgcagagagtcggcttaaataatttgtctatgcaaaatagtctattttgacaattagtagtttatgctaaaaatgaagaaaaaagcaaatttgaaacatttgaaaacactcttatccaaattttataagaaacaagcataactaaaaatacatcccatacatctatacaactgatatgtactttaaatacagcaaaactatgaaattggaaaatggaaaataataaagttaccatgagaagcagctatggcagacatggtagcgacctcaacagaagcagaagaagatactcctttaccttcagggacactagatgctaacctgtacacaaaatttgaatattcagaaatgggctttaaagaaatgcagttgaaatgacaccagttgcaaaaaaccagaataatgaaaaattaaaagtgatgctaagaaagacataccaaaatacttatactatcctcaaagcgcacacctaattctgtcattaaaaccagaatagcaccctgcaacataagctgcccacctaagagcacacaaaccacttaatgtaagtaggatattcaggcaaagatacagacaggcatattaaacaaagtaagattggtatacttttgggaaggatccttagcaaagaatttatttgccttctcatatgatattggcttttctccatccataaaatcagatagatccatgtcaaaagtttggaccacgattgctcaattctgaacc

SEQ ID NO: 239613 - DNA, 975 bp, Cannabis indica
ttttattttgttttaaaattaaaaaacaaaaatggttctaaaatacttttttttttcaaaacaaaactttacttatatttttccgattaaaaaatttaaaaacaaaaaaattaccaaaagaccatagcatagagatttacgtgacaccaacaagctctcaatctcaatgggtataaaaagagaagatcaaattcatatcacaatgaaagaagaatattattgatgtaagtattacgatctgtcatgtaagtagagaataataatacaataacaataataataatgataagagacatctcatttttatgtaaaactaagaccccttctcctaaaacaatataaccaataaaaccgaaaaacaaaaacttgcaaattgaatactagtatacgcaatcaacagcagcatcatcacctgtaacaattaacaaagataatgttagtcatcgtcaaacaccagaagcaataaattttaatatgtacagacattaacttcatcattttttttttgaatgaaaatgaaaattcattaaaaggcatctgccaatatcaagaaacaaagctcaagaacaagccggaagaccgggccatcaaaccatagcacactcaagagatgaaaccaaatagattaactttatcattaaattgtcttttctatatatgagtaacactattgcaaatacacattcttcaaagtacagttttccctttatcaatgccaaagaattattgacatgcatttaccatgaaatagtttcttggcaaatcaaacaaagaatggggaatctgaacccaaagaacactccaccaaaaagctctggcagactggcacatatcatctgccgagcatgtggttgtggtaactaaactaaataatagattctcttttcaacaaaaataatattattaaggactggtttctaacacaatatggaaaaatgcaagtgtataagtagaataatcacatacaaaaaacta

SEQ ID NO: 239614 - DNA, 1280 bp, Cannabis indica
gctatactagcttcctggagtaccttgtactccgggtgcctcctccgggacccatgctaacagcgcttcctggtggcgcacaaagacttagcaaatgtttccaagttatctgacccacgtgtctcctctcgactggtccacgtattttgggcgaattctggagcaacagaagtctttttgaaagatgctcttagaatgtacaatttttgtagagtaataatctttttgatttatatatataaaaaatatattgtagactattcgttgtataaagatgatttttaagttttcaactacgatttttcagtcaaaaattttacatttttaaatgcatttttgtcttccgagtaagttgggcatggtagaaaattctttcaaaaaagatgatatatacatgaatgttctcggtcaaaaacaaacaagatcaatgtaccatttcaacgcctcacttttgacttatttactatgcaattattagaaagaataatccaaaagctaaagattttatttattttttatgaatcaaaatctaaagatattatggttactattaatatttgttgtcaatatcatgtatgtatataattgtgaatgaatgagatcagccatgtattgtcataggctgtagatcgttattatttttgtaggttattatttgtgtaatttaaagttaaattttttaattatcattttttgaaatagaattatgtttattttctttaatttcaggttttgacactttgaaatgtataaattgatcagatttcggaaaaaaaatgatctatagtatagagaaaattgtgcaaaaaaaataaagtttaaacttgaaacctaaattcgactataatctggtcagattttgaaaaaagtcgatataaaagttctagatctctctttaagctttgtagagcatcttgaatcgttgagttattgtcaaaatactatcagtcgtggaaatttctgaaaaaaaaaaagataaaaaatagcaaaaaaagatagttttttaagtagagttgcgatttttatttttttaagtttaaaatttaaatctttttcgtatcttttaggtaactttgttagcctatataaacacattattattagtatttttaggaggtttgaagagctaaaaaaaatctgagaaactcttaattaacaagcgatttaggagtatgaaaattggagagcaaaatcaatcgtgaagcctttttcaacgagttttttaacatttttttcttctttattttctttttctactctgaattaatatgtgtgaattt

SEQ ID NO: 239615 - DNA, 1336 bp, Cannabis indica
tgccatccaaaaaacagcagctaaggccaagattagcttgaccgtgaccaactttatgacagaggcaaaaagtctcagagcagtcaataccttcttattggttgtagcccttagaaaccaccctagccttgaatctttccacagacccatcaacattatatttgattttgtaaacccatttacacccaatagcatgttgatatgggctggtagactaacaatagtccaagcaccattcttttcaagagcctcaatctcaatgtccattgcattgtcccactcaggaataccagcagcttcatgataatattgaggctcataatgacttgagatagagcaaataaaagcattgaaggtgggagacaacttggagtaatcaagaacctgagataagcaatggatagtactgttagaattatgacatgaattcacataagaagactgattagttaagaaacaatggtaatcttgaagataagagggctttctaatctgtctaatgggtcgagaggaggaattggcaggtgcataagtcgatggggaataattttcaggatctggtgcaacattatcatctggtgcagcagtggagggaattgaattttggtggaggacaaggtcacaaacctttgtaataggtggattgggaggtggatcaggttcgagaacatcagtaataagttcctaagatggaccaggagcatcaaaaatactgggaacaatatgaaaaaattgttcataatgagcaggcagcccttcattagggacaaaagggaaaatgtattcttgaaattgaacatctctagagcaaaaaatagtgttggtttcaagattgagcaatcgataagctttcattcccatggaatatcttagaaaactacatgacacagctctaggagaaaacttagatcgattttggcttaatgtagaggcataggcaagacacccaaaaggtttgagatggttatatgctggtggtttatgatttagaatttcaaatggggacttgttgcctaaatttggtgttgcaattcgattaatgagataagtggctgtactaacacactcaccccaataaatcaagggaatataggattgaaataaaagggctctagagacatttaggaggtgttgatgttttctttccacaacagaattttgttgtggtctttgcacataagcatgataatgaacaatacccaacgatctaaacaaatcaacaaattgaagttccttagcattgttagacctaaaaccttttattgtagcattgtactgagtttgcaccagtttaataaaggcaggtatgacaaatttagcttcagatttgtgctta

SEQ ID NO: 239616 - DNA, 1166 bp, Cannabis indica
gcataaaacccaacacattttgcccctttaataaaattcaaaggttaagtaaccaccatgggtaattcagtcatttctaaatcccgtcaaattcccaataaatccaaagcataacaatgatgccccgctattaatataattctaaaatatataaaaatgtgactctttatagcctaacgtcaccttccatcgctaccgaacacaattacagaaaacaagagattcatatatagcataagtattatatataaataaaactctacaatatatatatttcaaataataattaaattttatgaataaatcctaattatttaataattcatcttattaaacttaagcggtctttacaatgaaactacccttgtcaatagcaggacaaagttttcttacaaggcatggcaaaaccgttaaacaataagcaaaataaattaagcaagccgtcaagaagctacacaaccatgtctatccaaccaaggtgagtagataggctggcttggaaaagctagtatggtcggccagggtttgagcataagctgtccggccaaagggtggttgttagaccaaaaaagggcctgttcgatgaaggaagcctgacctttttgaggaaagttataaaaaggctagccaacacatgcaaatgctggccaacacttgccaaagctggcatgcacttggcctgccagaccttggctggcacttggcctgccagaccttgacaagcacttggccggctagaccctggcaggcacatggctgccacaccctggcaagcacttggccggccaaacccgggcagtcacttgggagatcagcctgcacttgcctagtacttggtgtgcagccttcatttgggacaacaagccaagttgcgatttgggctttaacaacccacaaaaatagtggagaaatattagctattcacctattcttgggggataattaacatatttattatttaattttgtaacatatgcataatatttcctatttttcaaggataattggttattaatctcttgtaaagctctcttatgtatagagtatgaacataaccataattcttcgaagtcttaagctctctaagctctcaagttctatgtttaaaaccctaactctctcttccattctctcttataggaccaaacctctctctctctctctct

SEQ ID NO: 239617 - DNA, 2119 bp, Cannabis indica
gatttgaccatgcattacccatggtatgttcattgagaacacccaactttattgttagttacagaaatacatgtactataattctgggaatcaccccaccaaaaaaactataaataccccctcaaagctcattaatggggtcgagaattttgggttgcataagtgcaagaagagtaaatactcaccaagaacattctctgtattaaatacactcataaatatacagactcgtggactaaggcccattaacgccccaaccacgtaaaaatccttctcttaatttcttacagctctttaatcttttattattttattggttgccgaaaacctcggtcaacacctgtgaattgaattctccacttacattagaatttaggtaagaaagtagaccatgtacttagagtttagagctttggcgcctttatatattaatcatgtgtagttagctaattagaaacacgtgttagagttaaaacaataaagtttctatgtatgagaatgtgttaaatgagttgtatatatatatatatatatattaagatttatgtgtatgaaacaagatataactgggttaggcctgataaacaacatcaggataaaaccctatgagagcataatgtatggattatgcacatatgttaagagttgtatgtatcagacatagctaggttggacttgataattagaactaagataaaccttaataagatcttatatattaaattgacatgtaaacgtaacacgtggtgtctatacaaaatagactgaagatgcggtggcatcatcataaaatgttgtggcgtgttatattagtgcagtggcacaattattatcacaatgatgtattaaatgtgataattatgcaatgtgattttattgtggatttgatcatgctttcttgttgggcattggctcacgggtgctctactgtgcaggcaatggtaaggcatcgtcaaaccagccatgagtttgagggcttcaacgatggggtgtacatattccggccaagctggaccacaagggttgggtcctatgggagattgctttagaaatctcattttgctgcttaggtcgacttttgtgtaaacaacttgtaatattttataaaaaaaatacgggatcccgatcaagtaaatattattttgttttaaagtttaagttattgcaagtttgttttaatttatcagttgttttatttagatctactgaatttagtagaccccaattaatgagattaacacaatgtaatcacaacatgaggcattcctttaattaggatgttacaaaatccattagcttgaatagtgaatgttttcaaaactttaaatttgtataaaagaaagagtaaattacacttaaagaatataacacttaaatactcaattttatttttggtggcataaatatttgtgttggttaaatataacatttaaatacctaaacttgtgataaaaaatactcaaagtattaaaatattactccttcactatctaaataattttgaaaaatttaataaaaatgtgttcaacttaaaaaaattattaaaattataaaaaaatttaataaaaatacactaaaataattaaaaaattaaataaatattttatttaataaaaataatattttttgaattaaaaaacattaaaaagaaaaatgaataactaataaaatattcaaagagaacaaaataataaataaaaaatattcatacattaaaaaatatccatttactatttttattaaatacaattattacttaattttaagattaatttaggctactttatatatttttctataattttaatgattttataagttaaaatttgttttattttattttttaaaattatttgggtggtgaaggagtaatatttcaatactttgaaacttttttcggcaagaaaaaaagtttggtatttaaatattataattaacgaaaataaaaaaattcaacaaaaataaaaaatgcgtttttttttttacaaaataattagaataacttatgaatttatgacgcagacgtctgccaccggcgctggaaccttttcgaaccaggatagctcatcgtctaaccgcagagtatgctttgccaaaccatgggccgctaaattctcag

SEQ ID NO: 239618 - DNA, 1732 bp, Cannabis indica
gacgccatagggtcgtccagaaaaaaaaaaattatatttaatttccaactgcctctaaatggtataatgcaattttatacctacggtttttatcaaaaaaccgcctctaaatgtcaatttcgaatatagcgggtattttcaaaccctttagtttccctttttataaatgggattgaaaaaactgcctctaaaggctaacattgtagtagtgagagaggaaatgtctcgtagggatctgcagggatgccaaaacaatccaacctactcctagcccagatattttgattttagactttttttgctacttgatgacctcttgggcataaaaataacgataattaaatgacacatgagatggctgaagttataagaaccaaaagtagtttgtagagacattaaatagtttctggaaaaatatagttgatcagggaaaattaaatgatttgtcatgattaatgagatgtaaaagcgtaatggaaaggaatttgggattgaattaaggtgaagattaaccctagtatggtcactagagagaaaaatacaaatcacttatttaacttaatacaaatcacttatttaacttaatttattaacaaaaatgtacttaattaaaaatcaactagacatcatgaaactaaaaaatattaatataagtatttttttaatgaaaaactaaataaaaactgataaataattaaattgtaacccaattttaatataaaaattaattgcgcatcaaattattgcgccaataaaaaataaacttaaaaataacacaaaatatgattttttaaaattttattataaaaatatggtaaatttaggtttgaccactttgtatggcatattttaatttttagacttttttacggtatttactataccatacatatgtaaacttattttcaaactccatatttaatatttagatttaccatctctttctttcctgtaccctacctccctctcgctcttgatttgtgcggcacccttgtccaggctctgatgagccatttttggtcggcgatggtggagcaaaaaatcaacaagaaagtcgagcttgtctctcctttgccgaagaaagatgccggaggtgataagaaatcggaagaagctaaaccggcagcaaaaaagaaacccgccgaggagaagaagcctcccgaagttcaaaagccaaaacaagtaataaaacatcacacgagccacaccattattagagtcaatgatgaaatttcttgtgtatttggattggaactcttatattcctttcactgagttcccatgactttttactcacattaaaaaaaattgaaattaattttatttattttttatttgtgaacagagacggtggttttgaagagcaggttgcattgcgagggttgtatacataaaatgaagaaaattatctccgaaatccaaccccgtggtttcccaaagtttctttctctcttttaatatatatatttatatatataatcttcacgatgaccaagccaagcccgacgggcttcctccgaacggcggtcgctaataagtttgaaaccctgagccctaagatttttgaaacttccctcgccgttcgttttccatttagggcgtgtaggagttaaaactctttgactccgatctagtgcttaatgaaattggttttttatatttattttatacttaagtgaaattgtttttgatctgtatattttgttttaatttatatagacaaaaattgaaa

SEQ ID NO: 239619 - DNA, 1295 bp, Cannabis indica
aaaatgtgtgatctcaggctgattattgagagcagatactgatgcttttagagctctatgatccgagttatagaagtccaaatgtgttaaggaaggaggaataaaagtagtctcccaatgactattgataaatccataatcaagacgctctttaacatgtccattaccttgatgcttattagtccaagttgctctttcaccttgaaaagggattgtactgagttgacaagaatcaatagctgatctaaaagcagtaatctgagcttctactcttcttgggccaccaattttatcttcatgagaaaggacttcattaaaatctcctaaaaccagccaaggagatagtggcgaaatatcaaagcacctccgtaacagagtccaagtaaaatgtctgtgagcaacacaagggtgtccataaaacccagtaaaatgcaatgaaggtccatcttgattttccataaaacaatcaatgtgattttgtgagaaattgttaatggaaagtgtgacatgggccttccaaagtagcataagaccacctccgagtccttgccttggtacttcaatgccattaggaaaatgtaatgtattacgaaatctatctatactaccatattgcagcttagtttccattataaaaagaacacagggagcttgctcttgaacaagcaagcgtagatacctgaatgcactcgggttccccaaaccccgggcattccaactgacgatattcatggctgtgcgcggtgttgcggagcaacaaccgctgagatttcagactgaaactcttctgaatccaaattattaggcctggaaacattcggagttgggcaattaccactcggtgctgaagagtccgattggatatgtagagtatttgaacggcatcgtttaagaacattgcgaagagattctgaatcaagctgtctcttgaattgcttgttaggattaatattttccaaatcgtcatccgagacaagaatagcttttcctttagcatttgtcagaggagagtgtaatgttggtgagatatttgaggttacaactgtgctaaaagtaggcggattcagaggaaaagtagcaggcataaatggtgttcgattgggaggcttgactgattgtggattgggtggataggtggcaatcataggtgtaatgggaagataagaagggaatggtataactggtgttgtatctgaggaaatgagatcagtagttggtgtagtaaccgataaaggagtggaagagatgggcatagtaacctgcgtagaggatggcaatgtggaggatgatgagga

SEQ ID NO: 239620 - DNA, 1427 bp, Cannabis indica
ctcatacttgaaattcgcccaaatccagtcaccattctccttacacagtttcatacgtctcttcagaggctttctcaatatcaatagtggctacgaacacgtaaataatcccgccaaataccgttgaaattcttgggtcagccttgacaaacgagccaatataggctcctgcacttcgcacaactttatccatcatgaacccagaacgaagatcgtgaatctgcacccataaatccagtttatgtatatgtatctcccttgggttctcaccacttttcaatctatgaaagacgagaggaaccttattaaaggtccatgggcttccatcaattacactttgtatatccaactcatgatagaattggaaaagatatagattagtttccaattccttgatatacaccccttttccaggttgccaaagagatgccatcaagtgtctcatcgcatcaaaatcaagcgatcttcccgttaagaacttccctaccagacaccacctgtcatcaaaaaccaattcttccccttcggcctcaccctcaagcaatattccttcttcctctccctcaatgtgaacttctgcgtattggtctgcaagcctactggcatagtgactactggaagccatagtacaccgcaatagacaccaagaaccacaaaaacaaactgctaggacactaaccaatcaccaaaacaaaagaccaaacaaaaacagagaactttcacagcatgtcaaaaagacaagacacataaggaaattagtctaattagatgatcaaaaattattggtaagtttattattttccgttaattagtttcttatattatttatttaattaaattagataaaatttgatattctgttattaagtttattaatgtcaatggatctttaatagcgttaacggtgagtttctccaaactagcgacaatattttgattggcattagttggattaatgttaacaaactaaagtacatatagagaaaagtacgtaattgacttataataatgtgattgaaatttcaaatttaaatattctttgtcgacataattatatatttcttttttgctaaaggggaaaattgattgaaataccaaatcctcaaagtctgttaacaacagcaggtgttaaatcccaggaaaacaattaaaattaaaaatgtcttgccgaagaagctatagaatcagctatgccattttcatctttgggaatctagaggaaattataatcaagaacatcaagaccatcaaataaaaacatgaacagggcatccaactcccagcagggctttttacgactttcagttgcatgacaaagctcattacaatgagaattaaacacaagatttgtcacaccaagctggaatttgattagattcacggctaaaatccctgcacgagtcacaacttcaagggctgaaactcat

SEQ ID NO: 239621 - DNA, 1006 bp, Cannabis indica
gatcctgataaaataatttctaacatcttgtagtgctaatatcatttctcactgctagttgcaaggttctttaggggatattattttagatttttgtccaacttgcagaattgtgcaacttagttgcaatcttgccatgtggataaatttgggaagcttaaatttgatatctctcaggcacaacaaaatgttaatttacttcattcctctatttctattactcacggccattcaaacatagttcaaacatcgaagtctattcttgatgatctcttagcaaaagagaaactttactggcggaaacgatcactaattgaatggttaaaggcaggctcctcaacttgagatccaactctcttgttgaacgacctgatcaggtcctaagcttccctattctggaagttcagctctgcctgttgggcttggaggatcgcagcttgttgatccatccactcctgtaatttgcgtctctgttggtcaaaagtatcgcccatagaagcgcgtgtttcttgttggtcatggtgcaagaggttagtatgaccctaagcttgtcctatggcctctctaaatgcatgtttcttgttcgtcaatgctagggtcgccaaccccaggtgtagtctcacaagcatagacacaaggtcccatccctttgccaagaatttcagttgtgggctagactgtgggtccagtagagacttgctctcctgggcggactgttttggaagctctgggcagctggccggaatgtggtggccggccagccagggctggattggtctcgacaggtggcacttagacattagggtttgcggccatagggtctcgtgattcagtcaaattttcacatcttgtgacagccatgctgaagatgagagcttcttgaatgagaattatgggctctcaatgaaagcaccaaaatattgactgtggatttagccaaccgacatgaagtctgactaggatcatggcttataactaccacatgtggaacaataataaatgtaaa

SEQ ID NO: 239622 - DNA, 1475 bp, Cannabis indica
aatcttcttccttttaggaatctggtatgccaatgctgaagatgcaaatccctttttgctcgtgttcttaactattgtctcaatgagcacaagctgcccttaatgctgatttccactctctaaaggttttgtattttataggtacgcttattcggaggaagtgggagaaaattccgatgatgaagaaactcaatctctaactagggggaagtctgacggtgatgtcagcttagtaaagcaagagaaaaaagagaagaaagctggggatgaggagaggtacgacgaggaagatgattccgaagaagataagagggaatgattgccatttatttttcttctcattctgcccttttttgcggtgcactcttattgttgcaggcttttggaggaaaagcagagttaatgatcatcacactactcatggggcatcatgtgatgtattctttggagagatgataatccttccactttggttgaagtaaagaggatttgtaaaattttgctataaattgaatcattttaggctcagatttgtatttgttcaaatattagttttgtttcaatttgtgcatgtaaatcccatatttttttcagaaaaatgatttgtgattaatgaaattaacgaaaaacttcaactttaacccttaactaaagaccttgtttctttcgttttgataggtaatttctgcaatttaattaaaggaaacacagagaatagctgaaggaaatccgaactgaaattgtattgatagtaattaggattttcaagagcctgacttctctgccaagagtttccaactcacccaattaattttccacacactactcagactaatctcactctctttattctattacttgttggtgcacacattttccaacccccctaacgcaccttctcctcaaggtgcaaatgagggcattgttgctatatgggggagaaatcttcccgggtcgcttcgaatgcaggcaaatgagtccattgtatgagagcttgaggaggagtcttctgcgtccccaacctgcagcaagatttggtggcaaaactgtggccctaatgcttgacaaagaacagagatatggaacatcaaatgaatttttgaatcaagtaggcaacaactccaatgtcctagacaacaagaacagaccatagaaatgcaatgccaatgttgcgaattttatataactataactatacatatatactaggcttgcaggacgtgtcataggcacataaccctgttaaaatttatgagttataatcatatatcttatttttatcaattatgtttaaacaatggttaataagaagttatggttaaacatggacatagtgtggtataagttaactttttgaaactaagattaaaagtcgtcatgtctaaatgtaagttcatgtgatttattttactattatctactaataagcaaagtttagaagaaaaataaaataataattaaccaaaatttatgaa

SEQ ID NO: 239623 - DNA, 1322 bp, Cannabis indica
tcatcaccattgtttgattctttctttgataataatttcttgttattttgtggctgaaattcatggcaaaaggcaagccaaatctctcatccatttgagcaaagctttctcaaaacgaaaagctggagtggacaccaaccttttcgctgttgatcaaagcaatgtagtcaatcatcatgatcttcacgatcatgatgatgacgagaaatttttgaaggagaatgatagaattggaagattgccggggcaaccaaatgtgaattttactcagtatggtggatatgttacagtaaataaaacagcgggtcgttcgctctattattattttgtcgaagctcactataataaggattcattacctcttcttctttggctcaatggaggtaattacaaatactaattcttcttcttcttcttcaaagagttatttttttaagaaatgaaaatgaatcttgaatctctaataatgtgaaaattttgatgattattttttttaatatttatttatttttgtatttaagtcataattgtatgatatggttcttaattatttcttacgccatacaccttttcaatgtctttttctaataatttataatttcattttattaattattaattgattattctgtcttttttctgtatttgattaataatactattttatagtaattaagctagtaatcacatttgcatgaaatatgaacccaataattttattttttctttcttaattcataatagtaattaaataataataaaataagttaaataaatttagaaagctgtacaatttgttttgtacccaagtttaggttggaattggttgttaaatcaacattaattgtagttttcatcacaagcaattaattaattaatttctatatggcatgtaatgaatgaattatatatccattttggccaaagcacatgcatattgcattaagacaataataaataaatttggcaaacctacttaagcaacattacttaataatattagttttaatatcattattttttttttttcaaatacggatttatttaaattaaatatatataaataaaacagtactgttgtccaggttgtgtgcctctaattttgattcaaatcccatactttactctcttcttcaggattttccgccgtggcctttgtaactatatataaatatatattaattaatatataagtcaatataaaaaatcaattaaatataaatttgatagaaaagtacattaattaattataaataaaaaaaattataagtacggctgtcctcatcataaaaacaaattaacttctataattatgtagacat

SEQ ID NO: 239624 - DNA, 970 bp, Cannabis indica
ggcataaaacccaacacttactaattcatggcacctatgagtcaaggattttgttccttgtattgaaacatatttcatttgtcctcagtttttcttgtattgttcacatcgggcaagaaaagatgggctagtaaaaaaattcacactgcctttgccattgttctggagttatagtaattggatgatttttagcacttcctcgtaatcctcaggttttgaataaaaatatttaaaatgcttgtgtcaactagttttctttattctatatctattagcacacttggtatcgaaacatctcaaaattttatcagcataaggattctcgtcaatttgatagtaaaactacattaaaaaaatgtaaagtatattaacaaatatatctatagcaaggataaatttttttgaattatttactcaaactcttgcaagcacttgatccttgtactgttgggccactgcattctaatctttgtaatgtgtaggacacatagcagcaatgtaattgctcagaatgcgtgtgaaagctgattgctctacttccactatcttctgtcaaattggatagtagagtaattgcaatggctcttttgcatcactccttcttttctttaattcttcacgaatagatggatcacgaccctttgttcgggtatcttatgttttgaataagaagaagaaaactataatcaacatatatatttttttttattttcaaaaatattggtgtaaaatataaattaccagagtagtcctcgtacgtagcaagaatcctagaggatcagggggatcttctccgtcaccatctcctccatggtaagaagctacatctactgacatattgaaactaaatacaacaaatttattaaaactatttataaatattatatttttaaaaatattattgatgttatacttctaaaaatatttattgcatagtcgaataaattatttattacaaaactagttctaa

SEQ ID NO: 239625 - DNA, 1441 bp, Cannabis indica
tttaatatttcagtgcatactgttattaatccctcaaagaaattacatataattttgtttcaaactagctgaatatgccctttgttgcttcctatcgaaaagggtaaagaaaaagtaaattgtgaaaagaaaaaataaaagcaacaatattaatcataatataaaacattttacttgtatatgatattatagaaaagtgatcgaaattggtaaagaccttttggttttgtttcgacatctctagactaagaaaagtggtgtttaaattgagaaatatttgtgtggaaaacttttttattattaagttcccaatcaaaaaggcgcctctaatcagaaatagacaacaaaaattcagccactagtagtatgtacgtataattaagttgatggaagacaggttctttattaaaagttgaagaagaaagaagattcaattataggacaaaatcttttaaagaggaaacacaatcaaaattgtagaatcaatatttgtatttttgctctataaatttttacttgtaatgtattttggtttagaaatgtgtttcacaacaaggatgtacaccaaattttattggacagacatcgatgaatttttttaagtagtaattgtaacaacccgaaacaaagaaagggtagaaacaaagatacaattactacttgaaacaagagagtcatcaaactctcctgatacgatccttatcatagcgtaaagcatctcaagcttcattatgtgccaacgtgtttagggtcaatggaacatgctgaagagaggctttaagaaaagtagataaggactgaatgattctatttatgaggcctgaaagagttgatcggtctgcactaaatttattaatctttgtgacaagttgaagacaatcagattcaatgtgcttcaaagggattcttatggcagaacaccaggtgaggccacggagcagggcttgtccttcggcaaagatggtagatgaagctcccggttttggtgaagagagagttgtaactaagctaccattccagtctctgatcactacacccaagcctgtacgatagtttttgaagtctggggctgcatcaacattaagacagtattctccataagacatctgggaatggttatgagctatatcagtggttgattcactcatggtgggggtagttgcaatcccctcggtagaagaaattgtatcctgcgagtgttgtgatagaaaataatcctgcaaataggtgtgagcatagaattccaaatcattaaacaataaggtttttctagaaagtaattcatttttttgtcccaataagccaggtgataatcaaaacctcgaaagagaaactctctaatattacactgccttttatttttataaaactgacttaaagtacgttctctccaaactgtcttggctctgggaactgtctagaggcagtgggtaatagtttc

SEQ ID NO: 239626 - DNA, 1162 bp, Cannabis indica
ttattattattattattaaaatcgtcactttcctgagccctgaattagtccaagacatgtactgataaaattgttcactatcattgattttatataggttactgatataattaaatagataaattgaaaccataatactttttgaaaaacttgattaataaattggtttattgttgaaccttggggttataacatatcagttgcaataacgtgtctaagtttaagtctcaatgatctgttgttaataactctctttattaattttaatctttacctgtagaaatttatgccattcttaattccgaatttccaatatggccaaatggttaggttctcaaccaaatttaaggtcaaagtttatattattaaacaaaacaattaaggataactaaagataaaacaaaaagagtacttctttacaggtaatttacaggctataacaatacacaaagtgattcagaaagaagaaaaaagatgcccatctcatcttggttcaacccaactttctgtcatgttgttcccataggactgtgtgttagactcaggcttagaagaattgtattcggttgaagggatgcctcggccaatctccgtggagatggaactcagaaaaggtggttgtgttggctgtggaatctcatgattttttgtaagaagattcacaacagctgacattgatggtcgaagctcagcagaggcttgtacactaattagcccgatttggagcaaccgagacgcctcctcagcttggaagttaccttctaggcttggatcaactacttcattaagtgtaccacttccataatggctccaaacctttacacaatggttgaaaaagatataagaaaacagtctttatcatctgatttatgacagtgttttacctattttttgaaacaaagagcttaccatctgcagaatagaatttgggttttgactgaaagaattgttctttcttccacacactacttcaatagcaagaattccaaaactataaacatctgccttctcggacaacttgccacgaacaatatactccggagccatgtaaccactaaaaacagtcaaattgaaattcagatcagagttgggattccaaaagggtggtaatcaaaacatgaccaagtccaaggaggttatatcaaacttacagtgttccagc

SEQ ID NO: 239627 - DNA, 1175 bp, Cannabis indica
atcctgggttgaaggtgtgtgtaagtggtatttgtttatttttttttttatttgagctgcatatttatttatttcgctagctggaagtatttttgtaatattattatttatttttgtttaaaattgaaaaaaaaaaccctaaatatattctaacacatacttgtttgatgtgtaactgattattttaaactttatttttcactaaattattcataatttttttaaaaaacgtataggatacataccaaaattatattgtaaatggtcatataaaaaaataatcccaactcgtatgtggttaagaattgagatcaaagagggtggtgtactggtgtagaacctttttgtcctttttgtggtctttttattgagtatgagcatcattgtttgctttcttgtgagtattgttgggtgactggtgatttgggacgtgtggggcgagagtttgtctcagtttggggttggatggaggagttgtttaagtgcctgctgcctggatcagttaaaggacttgtgtcgtgtgggcggtgtggtcagctcgaaatgagttgttgtgaactaaaccgattagaggcatcaatgttgatgctgccattattgaagatgataggtggtttagctatagttttgtgggcgatgtcagttgggtatggctgatccagtgttaattaaaacgctcgaaattaaggaagcttgagttggataaagaattttaattttttttcttatgatgtagtggagtccgatagtttggtggctgtttagtcaatgcataatatttcaaagtcgtacttctgctttttgtgtagttgtttagtaaggcttttcttgggccattagctactattgatttggaatttattattttttttaaaaaataaaagcgtaatatcacaaaaacgaaatagttagacctcccggtcattacaaaataagttctccagtaaagaggaaaccggaatagagacgttcaaatggtgagtaaaaaagcccacttaaccacgttgtgagcaacaaaattacaagaactactaacattaataaaattacaactaataaaagagggaaaagacttaatacaaaaagagacagttctcaagagcctaatgacactcctttccattgaaagcattgattactagtctcgagttattctctactattacaaactcagt

SEQ ID NO: 239628 - DNA, 685 bp, Cannabis indica
gagagaaaagtgaaattaccatactaccctcattcattacatattttctgattcaactagactagagtctagactgtagagtagagtaatgggagaagagagatttgatgggatggattagacatattttttcatttccaatatcgtacctctctacttcttgaagaggaaaagctaaaaacaaatatttgctttaaaaattatcatacaaatagtaaaatctcattgaagaggtttgtttttaacacttcgagataacctcttacagaaaatcacatcaaatggcaaatagaaatgccacatttaagcatttttctaaatttgcgtgttgggtttatttgtaatttttaaaaaataagttgtgccacagcaaaatataagccgtatcttgtcttgctaacttatttaaaggataggctcggcatgactcgtaggctcaatatttttcgtgttgtgctttgttggtatcgctcgtatttcttaaacatgtcagcctatttttatatccaagcttaaattcgtgttttgttttttatattttttaacaattactacattatatgtataattcaaaacttgagttatgtttacataattttttaataatttttaggtgcttttacaaaaatactaaattttgagtaaaagcttataattttactatcttttacaaaaatgctcgtgt

SEQ ID NO: 239629 - DNA, 1410 bp, Cannabis indica
aatcaatccaaagtaaccgatccaatccgcacttttgcggattggattggattggattggatttgagctattgtgcagattggattggatccaaaaaatgaaatgcgcacttagtgtagattggatgttgtttgaccaaaaaagtgggaattgaatcggatgaacaagctaagtgtaagtatataagtataacaatatacatatatattgtcgccttttgagagatgatgagttaattaataagaggttgttaaatatcattaaatagtttagaaaaatatatgtgtaagttgattaattaatttctgaacattacaatttaatagttacaagggtagatagatacacgtgaatttcatgggtgtgaatttgatgagccaatgatttaattatttttgtggcagtgatacatctgacaattatgaaattattattattttttttatagaaaaatgaaattataattaagtcactgtccacacatatatagtttgggaaatttatgtagtacacactttaagtatatgtttttttaggctctttgtctattttaacatttgaacaaaaaattaaacttctgtacatttatattatagctatttaggatcgctcgtaaatttttagaaaattttgaatagtttagagtcgtgataataaagttcaaacaattatttaccatgcgcattaaaaaacacagatgtgtgttcaatgaaatatttaaaccttatttaattgtaaattactcaaaatttcctaaaaaatttataagtaatcctaaaaaaaactatagtgtacataattatgaaaaaaaaaattaaactaaaaatttctcttaaatgctgaagtagataaaaccaatggcagaggaaagggggcatgtggggttatttgcctcccctcagttttttgttcatataaattttgtgtataaatttttaagtatattatattttgactccatacaaataagtttttttttttttttttaatttatgtccttacaaatttttatatttgtccccataaaatttatactttttatttttatcctacatatttttattcatatttgttgaccccaaaaaatgctcaactgacagtatggtcgtatagatctaatgcttgtcacatgttacacaaacaacaaaaaaatataaacacagagatttgttatagaggttcgactcccttgtgatagcgggtaatgacctactcccttttttgttgtattaatacctagagataatactattcagattgctataggtgggatctgatatagctctctataaggatacaaaacatgaatcaataaatagatctctaatgaggggggtgagattgcctcataggcgtgtgagagataaagcgaaaagccctatggggcgtgagagagagagagagatagag

SEQ ID NO: 239630 - DNA, 5020 bp, Cannabis indica
tttgctggataattggggtcgatattcaatgatggcagattatctttggacttattcccaccatatctaagtggctccatgcaaactgatactggtttgcctgtagaaaaacaattaattgctattttagttcttcctccaaattcttcccaatgtaaacacatttttttgggattgtttggatttaaaataacttcttccaactccttaataaatttgagctggttattttcatcttggattctaggatccatatgtttttcttccctctttctttcttcagtcaggattaccattagttgatggttggctctcctattctaaagttctactcgataacactctcgagccaataactggtcacctctgactacttctactcctgcttgtgttggaaacttttgggacaagtgtttgattgaacttactacccccagtccaattagtgttggtcggcccatcaatacattgtatactgatggaagatcaacaactatgtactcctgcatttgtgtcgttgataagggtggctctcctacagtcagtggaaagctcgatgatgcttaagctggcaacattgtcgcctgtaaatccacacaggctcaccatgcatggtttcaactttgcatcctctaaacccatctttttcaatgtgtccttgtagaggatgttgactgaactcgcattgtctaccaatactcttttcacccttttattggcgggttggactgttataacaaggggatcaacatgtggatattgtacgcgttttatattttcctccaagaagataattggaggttcatttaatttttccttttttaatggttctggagaaaatgtcgattgtccattttttattttgtttatgtacctcttttgggcattattactatttccagcgaggtgcgaccctcccaaaatgaccaagatatcctcgccttcaacaggaggaggttacattctctagttattcgagttattagggttgttaggctggttatgcttgttttcttgatgtcttacatattgcctgaagtatccctgcgagatcaggatttctatattgtctttcagttgtcgacattccttagtggtatgccctatatctttgcggaatcagtagtactttgttgaatctcgcttatgccttgcatgcctcattggctcaggtttgcaaaatgcaaccctgttttcattagcaaggaaaatgttctcgcgagtctcattcaactctgtaaatactgaataaattgatacatacttgtcatgctttttctgtttctttttattcttggatgattctttcgagtcatcctttcttttcgtgtttgaaccactagaattgtccaatttagttgagattgtgcttcttgttgttgtactggtgctggttttgcttcccaagcccattttaaacaacttcttttcatttccttcttcctctttacacacaaaaacttgtgctctttcattgaatttattactgttcgtcacagggcgaccctggagatcatctcataaatcacctccagtcatggataagtcagttgtgattcctacttaaagtgtcgtgagttgaatactttcattcaagtttctgacttttgcaacggctatgctaaagcgaattaaataagccttaagtgactctcctggttgttagtttatattggttaaggacgatgcttcaggtcgtcggtctcttgcggcttgaaattgctttttaaagtccctggacaactgttcacaggatgttatggaaagatgtataaacttgtcgaaccaactgctcgcagctcctattaaggaggttgtgaataaaatacaacgcaaattattcgagatattgctggctcgcatgatagtgttaaagttgtttaagtgagcagctgggtctttggtcccatcgtactacgaaacatgtgggttcttaaatccttgaggaaacttagaatttaagatatctggatggaatggctcgatgtcttcatccgagtcgaagcctggcaatttaccatgtttaccatcctaatattttttgaatttatcctctagttcaattattcgtagttggatggggtcaactttttgctgatttgcattttgattaggttgatgacacaaatcaagtgcattttggtttagactcttgcaaagatcaagctgtctttaatttaggtgcttgcaaagatcaggatgccttcgctcataattacttacagatcttgtctctgaataactctcggattgatagctttgtgaattgcttatgctttcttggtcagcataataacgtcgagatctacttccttctcgcgtatgtctactagaccgactatgccctcgagatcttgattatctcgagcttgaacttgcttcatctcgcactggccttcttctctaaaagagattagatacatgtcctctgttcaagtatatgtatacattgtctctacgcgctcgtgatgatcgttgaggatgcatcggaggaagcccacttgaccttttggttgatttctagggtttctctcattactacgagggatatcctggttccttggtcgaggctgttgtgcctcttacattcctgtgagatgcttctggcacgtcggttcgttcattcccttggttattaaatccatgggaagttcgtagaatatctcgttgatgttcttggttccttgtattattaggatttgtctgattgtccattggagcatcccttgtattcccaggttgttcttcctgagtatttgggggattcccttagtttgtttccttcctcttggttctggagcctcgaggtcttcctcgtggtctttttactgttaaatcatgttggttttgaggaaccgttccctgtgtcatcctggtcattacaacctctctttccaacttagcgtttcatcggttagatttagctaatcgttgtcggagttgtctattttctaactctatcaatggtatgtatctagttggatcataagcatcctcactcctaggcacgtatctggcagagttattagcatcttcgttccttcgttctagaatttgatcaccatcatcattgttcctctttgaacgtggtgtttcagaggtgttgggcctttgagatcacatgggctctttgctaggacgatgggttgtttcctcaagttgattattgttacattgatcatcaccgaccattgaatgtgagtaaataaagtttataaggaggaatttttctgaatttttatcaccaataaaagtaccagactattaacgcagattttcgttaaccaaatcaaataacctttttgtaataaatatactacaaaaataaataagtaataaatgataagataacaccagatatttttacgtggttttgtagttaaaatctacatactccacaagtccttattattaaggatattaattgagtacagaatacaatatcaaaatttgagtaatattctctctccaatttgtcgtcccttttctataaaatcggtccctatttataggaatataagttggcagttactctttttgggattgattcaaatataatggttcaggaacgtggacaatcatcacgtttcatttaatcacatgtgggataatatctaataaccacccaaccactctttacttttatcctttagacagttattgctgacttggaaggttatatctcgcttgatatgagttatcctccttgtcaatctttaataaaagaaaatgctaagtgttaggaggcagttcacctcgtcgcatccctttattcaaatcagtattgtgaggtgaccgtctcgctatgtgtagcgcaaggttgttgtatgttattacatttattctgctcaagtggatgaatatctccttcttgtctgtatattctgaggtaggcatattgtaactccctaatgctaaggcacgctacaataatttttcaattgcaatgctatctttgctaatcaaagaattttctcaaaaatcgtatcaaattaaaactttagtattaacttttaaactttataaactttacataattatttacaaaagtcaggatcccgtttctaaactttcttacaaaatattccaaaatacagtaatcaggtcgcatagcgactacaaaatgacaaccccagatgtcccgagaccgaacactccaggttgcgcggccatgacatgtataatcccatccaagctcaagctcactcctattcaaccctcgcctttcctttacttacacatgaaagtagaactgtgagtcgacagactcaataagaaaatcatataacatatcatataataacgacttgtatctaggcgcccatacacctatttacaaggcttaacatatgagtaagaatgtttcatactaggatacagccactgtaccacatacactatgtacatcattgcatgagtgttggtagggtatgtttcgtaccctgaataccactgagtgatatccacacacaccgtgtactttcctgtacttgtgttggtaacacaataatgtactctttaaaccacatacactataccaatgcactctataccattttctgtacaagtgttggtagtgtactaaccatataagcatgcatatacattatgtaatgccctaacaaataggcacgctacccaaggtgattagaaaaaccttaatcccctaaacaggattacaagtaaaataagcgcgggaaatttaaacttttaactaaaacagaatgaaaattaaacttgttataactttaactttataataaaaaattacatgtttcgggtatcagagccttgacccaactaaaagtgtggtcgatgaggacatcggaccccgtaagggggtgattgtgacagacaatagtctcgtgatccgtaaggggaaataccgggtaagctgcacaatcttacaccgcctggggaaggtcaagtggtatgattttgagattgtgtaggtatgggactgtttgaaatatattttaccaggatctagatttactaccatgtatgtttcattaacatc

SEQ ID NO: 239631 - DNA, 864 bp, Cannabis indica
atcataccatggcagcaagaggtgatccatacatgatgatattgaggccagcacccaaaaacccaattgcattagtacgtgcatctccttccaaagctaatcgagttactaaaatggctaatccaaagaaacccacatccaatattcccaccaaaacgcctgtctttgcctgtaatttacataataaaatgaatttaattattaattaacacaactccaacaataacatttaattatatatgtatatatatatatatatgtttaattacatttataccctcatctttgggtgagcataaagaagaaacaagaagacgtaaatggtctcaacaaagatgccaaaaccattgacagtggccacaagaacttctcctggcttcgtcaaaccgtaataagtccacaataatgagtttagcagtgtacaaatgtacggaaggctctcaaattcttcagtcgaaccattttttacaattctccaaaatgtccttctgcacatatttatatagagataaatataatcaattttgaaattaatcttgatgagttaatttatataatatatatatagaacttacgccggagaaagaaacattagcactgaaataatgtttcctgtaaattagaaccaaacaaaaaaaaaaatcactcattagaaatcatcatcagcagcatggtcatatatatattcatgtatatatatatttgtatagttatatatatggtgagatctgttacctatgactccaacagagaaactcaaatcttccatgtttaagagagagagagagagagagagagagagagagagagagagagagagagagagagagagagagagagagagagagagagagagagagagag

SEQ ID NO: 239632 - DNA, 2327 bp, Cannabis indica
agagcaatgtcacacttaaaaaataagtgctcaacactttcaggtgacctgctgcataggatacaatcgggagaatcaataatactgaaattataaagtctttcccgagttttcaacctgttttggacagccaaccacatcaagaagctatgtttaggagaatttagtctattccagacctcattcctccaaaaaaatctgttaaatacaggagcaaaccaactataaccaactgatatttaatatttcacagaagtaaattgttgtggttgttgtacctgcttgattttgttctttatttccaccattttcctccaataccaactgctggttgtggaagcattatactcccaccaatcatgatgtttgatgtacacacaatgaacccacttgacccatagattgtctttcttattagctacaacccaaacatgcttagccatggctgctatgttccaaaatgcaatattcattatgccgagccccccttctctcttaggagtgcaaatcttctcccaagatatgcatccagcccctgtcatcatgtctttccctgtccacaagaaactcctacatatggcttctatttcttttattactttctatggaagtatcatcatttggctccagtaaatatgaattgaaataaggactgagtttactagaacaagtctaccagcaaaagataagtttcgggttccccataccttgattcttgcagccattttctgaggtagacaactgcaatcggttgcattgatctttcttgcacatatgggaactccaaggtatttgaatggatcattttgcctagtaaaaccagacatatccaaaattctttggatttctctatctttcatgcccgagcaatacatgactgatttctccttattaacattcaagcctgaagtaagagagaaaagcaaaaggccttgcattaggaaatacacactcttgaagtcacccttgcagaataatagaatatcatccgcgaagctaagatgattaagcttcaattcaccacatctttcatgaaaataaaactccactttcttccccaccttgataagaattctacttaggtactcaatacctaacacaaaaagtaaaggagacatcgggtccccttgcctcaaaccccttttggctcaaaaaaaaccatggagagatccattaaacatcaatatgtatctaggagtcttcacacatgccataatcaagcttataaattttgatggaaacttcaatcctatcaacatttcctcaaggaaatcccaatctagtgtgtcataagccttttgcaagtcaattttgaacatgcagttaggcttagctcccttttttgcataactcctaatcaagtcctgacaaatcatgatgttatgtgcaatatacctccccttaatgaatcccccctgatttagagacaccaaatcgggaagaatatgcttcaatctagagcatatcaatttagtggccactttataaagcacattacaacatgatatgggcctaaaatcactcaccttattagggtatttgattttaggaattaaagtaatgactgtagagttaatctccttgagaaggttacctgagtgcagaaaagaggttactgcttcacaaatgtctttcccaataagctcccagttgtcttgaaagaagtaacttccaaagccatcaggcccaggacttttaattccagggatgctgaacactgcattcttaacttcagtttcagagaattcctgtaagagaaactcagcttgtgactctgataaaatcggcccctcagctattactgcatgtttcgctttcaatctcccctgcatcttagttcgtagaaggcatttgtaataatccaagaaagcttgcgtaacctgttcaggattctcaactctctctccattattcgcttcaatagacaggattctgttggtaactcttctatttctgatactggcatgaaaaactgctgtattagagtctctattcttaatccaatccaccttggatttctgctgtaagaaagaaaggtaagctttctgcacatgagtataattctctctaaaagcttgctcagtttgttgaagatcaatattcaaagggtccccttgaagagctttctgagactcttccaaattaatcttggccttcttctcagcaacttgaatgtcatgaaaaccctgtttatttatctcttgtaagaccggtttaagagctttcagctttgccacaatttgaaacattttagtgcccctgatattccttttccacaccgaaaccacctgttgctgataatgagggtgacttgaccacatcctgaa

SEQ ID NO: 239633 - DNA, 2077 bp, Cannabis indica
tgtgactctaatgactattcgttgaattttccatcgtcattgaagcaaaaatcataaaaattataaatttcacatatagtataaacaatacacttgagtgtttgataaaatctctagaattgagaaattataactctaattcttataaaaatggggacccacacaataaatatttatatatagttaaaaaataaagataatgaatgctaattgccctactaatccatgtattaatcatgaggttattacaacagccctatttcaggaagaagacgagatacaacacccagtttactacatcagcaaggaaatggtcgacactaaaactaggtacgctcttattgagaaattgaaattgtgtttactcatctcctccacgttgttacgctcttatttccaagcttcttgaaataaagctaactgttgcccatcatctactttctttaccttagaagcctcctctttgaacctctagatgaagttcatcaacgtttccataggtagttgattaatgttggtcaaggcgctgacttcaaggtttatctttttggctgcaataaattgccttcaaaaattagtttgtaacttatttcaacaatccacagatctgggttccaacttcttgaacttttcttctgtagatcctcccaatgtcagtgggaaacataagcattttgcatcattgttgaccctcacgactttcataactctattgaatctagacagatgatcactttgatcagtgtcacccgtatacatagtcatttcaggcatcttgaagttcttcgggagttcagcctcgagtatgtttctagcacaaggcttccggtcttcacagtctaactctaagtcatctctgttttgtctctgggagacccttggtatgtgcttcttgaggataacaagttcggtcagaactccttcatttaggacactctcggacgctggagcaactttttttttctagttaggatgcgccatgaggtctccaagtttggcattgagatttttttccaaattgacaagagggtctttcttagtggaccccctctattttcccgactcttggtgcacaaatacgctcttctgacctccacggtcctaggggctagttttctctttgggaaacctaccccctgtagacctttggcttttgggagatcagaacaaactttctatggatctcaggccattttgttctttccaaatacagtcgtagggttcccctttgggttaggcctctcttgagggtaccagatgggactaggctccctatccttctatttttcgcctccctcagggtgagaaggctcttcccttatcttttcatgtacatataggactgcaattggatatacgtgattgcccacattttccattgccttttttatggcaatcaatatttcttgcattctcttattttgctccttttgttctgccaactcagcctcatggtcagtagccttttgtcttaactcagctagttctgtatagttggcttcatcgtattcttcttggtttatattctcagggtcattggtgtctccttctccctcagcatccaccctagaagctgcctcttcttcttctggaccttttggatcattaggctgttatggacgtgaagtgttccttgttaacaccattatacaatgagacttcatgcgacttcctttttttggcaagcttcctacagctctgaatgaaagtaccaaaatgctgaccgagatttttggcaactattaattagagttgtttgaagtaattaatgagtattaaagaagagattttttttgcgtggttggggtattaatgagacttagttcacgagtcactgtattaatgagtgtttttgttttcagagaattcccaaaaataagtcccatcttctatacatcagtgtgatatttataagctcataatggtggtaaaagaccatcatttccgtgatggtatgaacaatgctttgtacaatttcctaaatttgatcatagggcattatttcctactttttatggtataattgggctgactataggtgttcggtaagatatggcatatctcttatttatgattt

SEQ ID NO: 239634 - DNA, 705 bp, Cannabis indica
taccctgtgaatccaaaatggcttagggaaagttctctgttttgttattgggtaaatatattatgaaaagaatgacttttgcaaatctatggatttgtcatagtcggtttttaaaagatacgtaaaactcaattatacttgattggtagcttggtttggtgccttcacaagttggaatcagttcatttctgtttctattaaacctttggcaatgatcaaacgttttggaggaattgcacacatgcttgttatattaaatgaaccatgacaatagggcctagtttgttattccttcttgtattgaataacttctttatgtattaggaaaaatggaaaaggagtatgagatgatattgaagaggaccttacaaagcataacccttttaaacgtcaatcctaatacaacaacatccctcataatacaagtaagttatttatttcccttctcccatattaatgccctaacaatttgttagaatctaagagccttgatgttttcctatcatcttaacagctctgcttgtttcttgttttgtctgtaagtcattttattgatatgattcataatgatttcatagtttcttgttgtgtatatttgttggtgtcatgaaattgaacaagtattagattgtgttttgcacatcgtatatattttaaactatcatgtaagagtccacagatgggttttgttgaggtgagattgaa

SEQ ID NO: 239635 - DNA, 1947 bp, Cannabis indica
tctcagcttgaatagcttctacatggtatcagacgtcttccatggagtcctcgattccatctccagatcctacaccttcgactgttactgcttctccaccagatgtgactgcgcaatcccctgcctcctctgttcacaatccattttccagttctttatcgacatccctcacgatcaagcttgatcgtgccaatttcctttcttggaaatctcaggttgttccagccgttattggacatgatcttgatgctattctcttcaatggcgttccacctcctcaaaacttgatcaatggcaacccaaatcctctctatcaacagtggaaaagacatgaccaacttcttctttcttggcttcgctcttcaatgacagaaggcgttcttgcttctgttgccaatcatcatacctcctttgcggtctggcgtgctttggaacaacgatttgcgagtcaatctcgtgcgaggcttttacagctcaaaggtcagttttcaaatgttcagaaaagcaatctgtcaatctcagattatgtggataaggttcaaaatcttgctgattctttggcaattgctggtgctaatattagtgatcaagatgttgttcttcagatcttgaatggcctaggtgctgaatttgaccctgttgtctctggaattacttcaagaagtgactctttgtctcttgatgaggttcaagctcttctcatgtctcatgagagtagacttgaacatcacagtaccatgaccgatatctctatgaaactccaagcaaatctggccgtaggtaacaatcgcaacaactctggcaaatatatcccaccagctgctcgaggaaatatccctgaatctttttcaagaactggttttaaaggagcttctcgcggcacctttggttttcagaatcgattaatgtgtcaactttgccttaaaagtgggcacacggcagctgtttgtcactatcggttcgataagaattttgttcccccgaaaccaaatgttgctgccccccgtgcgtatcttacagaactcgacatggacaatgagtatcaggtatataattccactatcctacctgattttggtgatgataacctttggtttgtcgatacaggcgctaatgttcatgtgacaaatgggtctgaatctcttgaatcaccctctccctacattggcaccgagtctttagctgttggtgatggtaagccattacttatcactcatgttgggtctacttacttatctccccatacttctcatcccttgcgtttaaaatcggttcttaatgttcctgccattaaaaagaacttagttagtgtttcaaaactaacaaatgataataatgtgttccttgaatttcacaaacattgttgttttgtaaaggacaaactcacaggggctgttcttctcaagggaccggttaaagatggcctatatgtgcttggtgattcaagtcaatcctctcctgcattacaatgcaatctcaccactgtatcttcctttaattcctcccctactgattcttcacatactgctccttgtaatactcatgctggtttaaacatagaatcatgtactatgccaaatgataataaagaatcagtttttgcctatccttttaattgcttttctactgctttaactaccactttgaaacaagatgttaatgtttggcatcaaaaattaggccattcgagtactgctattttaagcagagttctttccaatgtttcacatagtgggaccttaaaagatttacaattttgtgttgcatgtcaagaaggcaaaagtcataaacttccatacactatttccactagtcttgctccacaaccccttgcattaattcacaccgatttgtggggtccttcccatgttgcatctaaagagggttttcaatattatattcattttattgatgatcatactcgctatacttggatttatcctttaa

SEQ ID NO: 239636 - DNA, 2529 bp, Cannabis indica
tggcatatcaatgttggaaaaatcagattcatttggagaagatgaattgtcatagcagtatgggaaattattgttgccaagctttttagcagcatactgagccaaatctattgtattgtgaagggctccatgttgtatgaaataatgatcatgttgaggctagaattttgcagacaaaccaggcgttaaacatggatccttagtggccgacctattatttgttaaacatgaatgattcaagtttgctggtgcaaaaactatggatccttgtccatacagatgcacatttctttgatgaagtctaagttccatgacaagttgttctgcagccattgttgatgattgaccctggtagtcttgtgcagtgtatgaagcctcttcaaagagcagtttccttggttgtggctagtttctaagtggaggagaaggtattgtactgttgagggtgtttattgccaatcgagtaaggaggggccatgcatttccttttgaaaaatctgttcgatatcgatcataggcagaagttggtaaagcaaccccttttaattctggttgatatgctagtttaggtttaataccattgtccacaagttccataaaggttgcacatttatgaaaagggtgacccaagcatccacattccatacaccattttgggagtcttttataacaaaaatcaacccaaaatttatctttgatttactgtaatcatatgtttctaccccttatcaaaggcttagtaacatcaatcttcactctaatgcataacaaaaggcccccatccttcacttagtgagtccataaatacttctaaaaatttaccaagaatatcgcctaaagcttttgccaatcctctagttttacttaaaaatggtaacctatagacttgtacccaaaatggtaaatatttgagatcaatatgcataatattttgtaagacagttagcttatagagaataatgtggtggttttggaaatgtcatggctcttgagtgaggaccctctctttgtctccttcacaaccaaaagagagcgtatagggatcaagttgttttcagcaattcggacaggaaaatgcccaccccaatgagccttcatctgtttttgaagtattgttagaaagacaagttttctagtgagaatacgagcaaacagagtatgatcattggtagagtttaattcatgggcattgtaatctccaacagggaggactacttcatcttcatcttcaaggttaataatacctttcatcttgcttgctagaggatccatggtgatagtgatagatcaacgataaggcatttaatggaaaaactagagcaattgtggggatctgcaatagggaaagtaaaaaattgctaaagtaactaaaaacttagaaccataatggaagaaaactgccttagagcaaacacgacagacacttttttattatatatctcaagattttagtttttaaataatatttttaaattaataaataatttaaataccgttaatattatgatttattataaataaaatattatgatatatctttagtctgtgagattttttttttttttctaattaagttatttttataataaatagcatagagataaaatatatagaaatgttcattttagttaataaaacatacaataaaatttaatatttactaattaataaatatatttctttaataaataattatattatgtacaattaacattaaatagatataataaaaaattatttttgttttaattttataataatatataagattcttgtacttaaccaaataatgtaattcaattaacgggaatataattacatattaccttacttaaacacacatttccctacaattatattctccttcatagtatttcctataatcaaattattttaagcacctcgtaccaaatgcttattttttggggtgtaaatataacttcctttttctatttcaaactaaatactacaacttctgttttaataagaaaaaaattgtatacaataatgaaaaaaagtcacacatccaaagttaatgaagatatttcctcaaaaaagtatcaaataaattaattttatatttaattaaattaaagtttataaataagacaagttgagtagcatggtgttggaaggtcatccattgtaaaagaagtgcatggtttgagtatgaccaaacacaatgtatattttaatatacatatacaatatgttttttaatgggtaatcaattttaggaaaggtcgagggggccgaggccaacaccaaagagcgatgcaacgccattgccaaacgctccatctaccgagcttggatggcaaatctagagatagacttgagcttcgtgggaaagggcatggaggaagtccttaactactgcgagcaagccaaaaggcagaggaggaggccaaggaagcgggaggagaagaagaagaaccatccaagtctcctactatgtaggcttggtttttaaatatttatattttttttattttaagaaaatggtcatatggccgagacaatggtttg

SEQ ID NO: 239637 - DNA, 1836 bp, Cannabis indica
caacgccaaaaatatgattcaaataatctatttcacacatgtataaaataaaagaaattacgcatgcaatagattgtttgaaccttatttttagcgtgttaaattttttaaatttcttcaaaattttgtaagatgtattaaattgctataacatagatgatcatacaaaaattaaactaaaaaaattttctcatatgcaacaaatagaagtgtatcgatagatccattttaagagaatgcatagtaaaagcaatatttttaatcttataaatataaataataatatcaatatatataaatataaaaaaaaaattatcgtaggtaggcacacaatatacatgctgtaaaatttggtgctacattggatgaattataaatctaacttttagtgcaacgttggagttgatctaacaacatcactaaatagtgtaccattttactaaagagcattgctatgaggtaccagtggtgtctagcaccttcttgacatgtcacattacgattggttagcgatactccctaaaaactattatactaaattatatgggacccaatacttagttgaaccaatagcgatattgacatataggagggttctaggcaccactagtgccctttagcatttctctttactaaattagtgtgaaattttcacacaccattttactttaatagcacacacaattggtatccgcccaaatttacaccattaatatggtgtgggatttttaattctacaccaatgtggtgtaaaaaaaaaatcattctaactcttattttatcttattttaaaaaataatcttacattttaatcctcaaaaaataattgatttaaaatactaacatatttgaaaatataaaataacaataacaaaaatactgatattaaataaaataaaaacaacgtaatactaacttataaaattaaaaagaacaatataaaaataaacattaagtaaaataataatttaatagtcaaattaattacttgaagattttaactttggagaatatcaaaatattagttatatgcaaaaattttgttttgtaaggccaatatagctaggttttggtttgttttaattttgtaagttcattgtggttttgttttgttttgttttgtatggccaacgtggctagttttattttgtacgggcaatgtggctagttttggtttttgtaagtcaagtatgactagttttatttttgtaaagctagtttggctagtgttagttttgtaaagccagtatatgcctagctttaattttgtaatgtcagtatggtctaatataaacacatcagatgtactgtagctaccttcaataatggagacgagaacagataattactaatattttcctcaaaaaaatatgagttacaatatttatatgaaatttcatattttattaaatatttgatatttactttgtacgtgttctaatgttagattgtaagttacaactctcagtttagaggttttttattctaatattaaggttttattgactagttctcttaggttatctttgcatgccctcaaaatagacaatgaacttttataaatagaagaaaatcatctactgcttgcgtaacgttgttagctttgttattttaacctgtatcgatttctcttaaaacacatatattagttatatagactgaagtattttgagaatattaatatttttttttcattttttcataatacgttatttgctcattttgaaaattgtgtatattaagattaactatagaagtttaatatttattttttaaaaaaaaattaatgtttaattgatttaataaatatttattttactaaattattttaaaatt

SEQ ID NO: 239638 - DNA, 861 bp, Cannabis indica
taaagaagattacctgaattactcatggtgatatggtaatgatggagaatacttttatattcgactaggtggtcaatctggtgtacgaggtgaccattgaaattctaataaaacgattattttattaagcaatgataaaaaggtatgctcacccagaatgagaaaagcttataaactgagatgcaatttaatggaaatgtattcaagtggtcggtgaatattggattacaaagtaagttatttattaaacaaagaactatataattgagtgtaaaataagttttagagtggttaaccaagtatgaagatagcgataatttcaagggagtaatgacagcgtatgaattagggagtaaattcttagtggtaatgacgagaaaggaatgtgagagtcttagatgttgataaatcgacaccattaatgggagactcactataagttggtatggtagttcataccaagggattgtcaatagaacagagaatatacttgaggtatgtatatttctggatgattttgaaaagatttttaagatttttggcaaagacagaaacgaaactttgagatcaacgaatgatctttgattaattgttatcaattgagaattcaggaaatgaatgtttccagtttagttatgggtacctagaaggagaaatgttgtctctaccgcaattcaatatataacgatggttaaccataaataattgggaaatttaaaagttgtgtcaaatcaagggaaattgatataagttaaaataagtggagatgaacaagattcaagttgacaataagatagaaattcctcaagtttaagtgaacaaaaccgatgaggaatcgtaagatgctaatgaagggagtga

SEQ ID NO: 239639 - DNA, 2250 bp, Cannabis indica
ctaaaacagataagagtgcatcaatgtatcccttttaagaggtgcattgtagaatttcccaagataatattttcctctatcagctagttttggttactattggggtggacaatatcaaaatcaattcaattatatatcaccagtaatattttcatattttacttttattttgggaataaaaaattaaaaacaaagtgttactaaacgaccttaatttttacgtattttttttatatatttttaatttaatattgaaatttagttatgtaattagatatccaattaaaaacttcatccatctaattagtaattggattggattttgaggtctaattggattgtatcggatgataattttccaaatctaattaaaattggattggatcggacgaggaaaaaaaagttagattggatcagatgactacccttaattagcatcaataataaatagagcattgctattagactatccagtactttttataggtgacctattggttattctttaaaagtttttttcttaagtttcaaaagatctattacataattgcactaatagtagtataacacaaaaaagtactaggtaccaataatatcttttaacaattctctaatagatatgttatcagttatcttccatagtgattggtatttggtacttaatcattcttttagcattttatatatattgagaaaataataatatgtttttgtaggtgaaaaaataatatgttgttttttttttgaaaaaaagaaaatactttattaagttaagtcatccaaaactaagaataaaatttcagcaggtaaagaagccataccgaatgtacaatcaaccatgtgaatagaattacgtgctaaagcgtacacaactttattgcggatcattttacaaaggaaattaaaattaggggcaattctactaccaataccttacaatcatgaataaccataggtttgttagaactaatatcattaacaatatttagaaaatctgtctccattacaacatcactccattgtttattcacaacatcatgaataaccataccatatgggaaaaaaaataatatgttaaatatgttgagttgagaaaaaaaaatatgaagaaagaaagagggattactacagacagaaaacgatgaaaaaaggaagacaaattgacatcattagtcaaaggacgtgtgtgtgtgaacatattatttgtaatatttcataaattattataaatggaatgtaaacatatcaatatatcatttaagtgcatttattaatatgatctttgactatatgtcctctacaattttatatggttatagaatacatttactccttctgttcaatccttcaaatcacaatttgtactcatgatgtggcagtgtaacttaggatagaatatatttttttttgtaaggaacaaagaataaaatattaatttcacttctttcttgaaggaaaccaccctactttaataatcaaaatggtattatttagacgatctccaattatcatattaattaagggtagaatttacactaatttagtataattttttttttactttttaatggaacagttccaataattcacaccaaatatcacattaaatatattctatcaaataaatatattttacttaaaccatctcactttatattatttacattaataatcaaaaatagctaacttatgaaataattagtaaaaaataaggtaaatactattttggaccttatgttttataaaagttattaattggaccctcaattttattaaatgataaaatagactatgtattttctaaaactgtaaaaataggacattgaactcaatttttaacaatttttattttaatataactaacataaagacaatttttaatataaacagatacagaaaatataactagttttgtcataacacttctagatcggattattattaattttttaaataaaaaatcggttaaggattctatttataccattttagaaagggataattgcggcaaaaatttccaaaaacttagagttgatgcagattagttaccaacctcaaaaattgacggtaatagtccctaaggtcacattttttgtaagtttgttggtccctaacttaactgatcgttaaacctaaatcaaatgccacgtgtcaattttttattggtccaaataataattttaattaaaaaattaaaataaaataaggaaattaaaaaatataatttaaaatctaaaatttatttttttt

SEQ ID NO: 239640 - DNA, 1371 bp, Cannabis indica
ttcaatgaaaaattgtataattgttcgtcccgtcttaagcaatggaagaaatccttgggacctcctcttgctactcaaattcgtgaagttcaatctcaactcaaatttgtttaatccttccctcggcccactaatgatcaattagatcagggaaggaatcttgaaatggaattaaacagtttgttacagaaggaggaagaatactggcaacaacggtcccgtgtcacatagcttcagcttggtgataaaattactcgatacttccatcgtgtggcttccatgaggcgtcaaactaacaaaattctttctcttcaacgctcagatggttccacggcaaatgatagaacttctattttgaccacaattgagcattattttactcacctatttcaaagccaatcacctaaggatgatatcatcgattctgttctctcaggcattacagaatgtcttactgaggaagaaattgagcttctccaggccacattttttgctaatgaaatcaagaaagctacattccaactttcacatgataaagctccgggtctagatggtttcagtggttgtttctttcaaaagaatctgcatttgttgggtaaagatatcattactgttgcccaaagctttctaaatggagatgcggacttagtggctatcaacaagacgctcattgttcttatccctaaaaggccaaatcctgagcagataacggactatcctcctattagcctttgctccacattctaaaaaatcatatctagggttctggtcaaccgtctcaaaccaattcttagtcgcataatctcccccacccaaagtgctttccttccaaaccgttcaatctctgataacattatcattggtcaagaggtcatgcattccctttcccaccgtaaatcgggacgactgggatggatggccctgaagcttgatatggccaaagcctttgatcgcatcgaatgggtttttgttcgtagagtaatagagaaattttcttttcctcagcgcttcattaacctggtcatggcctgtgtctctactgcaactttttccttctccatcaaccagcaggttcttgggcaagttaagccttcccggggaattcgccaaggggatccgctttccccatacttatttcttttatgttctgaaggtctctcctctctcattcacctcaaaactcaacagcgccaaccccgtagacattcacttggaattaaaatttcctgaagagccccgactatttctcatctcttctttgctgatgatagccttctctttagctctgcttctcctgacgctgcggctgtcatcaagaaaattcttcatgattatagccttgcctctagacagttggtaaattttaccaag

SEQ ID NO: 239641 - DNA, 1464 bp, Cannabis indica
aaaattaaaatccttaataataagttgcagcactttaaataataataataataataataataataataataataaggattatagtttcaagtataatatatattttttttaaataaaaatcgagaaatatgttaaaaaatatataaaatttgttacaaaactataccaatttacaattgttgtcgggtatcgttccctagtgtgagataaactaaacattttttactattttttcttctatacatatccacaaagaaataaaaataaaaagcatgaaagctataaaattaattaatgtaaaataatagaactaagtattaaagaagcattgatctatattcccaataattgttgatcttgaatccaagatacagaaaccaagtttgggaagtagctataggcaaagcaatttgaatcaattggtggaagattgagctttttaaatgttttagtgtttagattataagccatgaaagtccctgttaaatatcttattaacacttcatcattctcccatggccctataacttcatagggatgatgagagtacgaatcccatgacttcatatgtacatatgaatgcttagggttatggtaattaggcatataaggccaagaatcttgtataagtgttgtcctaattttgattttgtacttttgaacccaaatttcttcctcatcatctttgatcaaattccatatcttaatgttatttgaagacgtataatgtaccaaactcaaaactccataattgagatcaaccaacttaatattaacaccaaaaaaataatcacagttagcttttaaaggtaatgaaatccacctaaattcttctttctcaatatctgaggccatcaccatataacaattattattatgagtagaattagtattaggatcaaaacaaacccaataaaaaactcctttattatcaatccaagtaggatatcccattggaacatatcgatgaggttgtaatgataattttgtgatgagttgaatccaatttgaatctttcaatgtgtaaaaactaatgataatccaatattctccaaaattactctcacataaatcgagaacagcacatataattttgtacgttctctttaatttatcaaaccctaatccgtaaaaataacggaatctcaatcccgcaaaagattctctatttaaaggtggtaattccaaaacctcttttctcaaagggttaaccaaatagggtttaatacaagatgattttctagtgaagcaaaatataccattagcacaacactgaaacaataatgggtccttgttattgttcgaatgccaattaggccatggaaataggttcaaatcaatctccaaaaccctttcatccttattattagggttaaggttagggttaaggatacgatgatgatcatcatcagaagaagaagggttatgattatgatagaaaattaagagcatgggttgttggac

SEQ ID NO: 239642 - DNA, 1731 bp, Cannabis indica
atttttatctcaccaaccttgcatgctagtattggccaatattattaagtacaccctaaaattttaagtatatttttatcctttagtaaaatcacagaaaaacttccatggagtcttgatcatctctcttcaatactattaattttgtttgatattcgagggtgtttttattaaaataattaaatgttttttttcttaaaatacgatgggagtaaacttaatatggaatgtagttacatttttgtagggaaaaatataagtctccttataataccttccattgatatttattaaagtttttccctttggctatttaatgccaactatagctgttaagtgttagcgaagatcaatttatcatctctttattaaaacatgtgttaagtgattaattaattgcttaaattatattttcaaaataattttttaagtcaagaaatatgtaaaagatgacatttaaaaattaaaaagcctcctaaacaaaaaagaaaaagaaaactaaagtgaaaccatcttcgcatctccatcttttcttttttttttaactctttctcagtcatcgtggatgatgagatgaatgagcagataaagaggacgagcatccaacaaggttggatgacaagtaacaacccataatgcggaaaagaaacaagatttgaatgttgtttactgattaagcattgaagaaaaacagaggagagacatatataggaggccagagctcaaggtggtgcaaagctaattcctaaccaccttaactaactccaacaaacccaactaacaatcggacactaagcaataaaataggaaagaacatgaatctgttagtgaagtaaaatattaacactgacagtaaatacaacagtaaatacaacataaagaaaattaaccccccccccctcaagatggacggtatacatctatacagccattttgctgatgtgagagttgaggatggtagaagccagtggcttggtgaagacgtctgcgagttgatgagtgctgctaacagggctgagtcgaagtttggatttgttgattttgtctcgaataaaatgacagtcgagttcaatatgcttcgttctttcgtgaaaggtcgggttgttggcaatgtgaatggcggactgattatcacaataaatgaaggcgggttggtgttgaggaatttgaagatcttgaagcaagtattgcagccaagtgagttcactgccagtagcggcaagtgctctatattcggcttcagctgagcttcgggaaatggtaggttgtttcttggtacgccatgatattaaacaatccccaatgaagatacagaatccggttgtggagcggcgagtaatggggcaggaagcccagtcagagtccgagaagcctcttagattgagagaagaggatgctgagtagagtaaaccttgtccagggctgccttttaagtagcggaggagatggtgggctgcctgcaggtgtggagttcgtggtgaagccatgaactgactaagaatgttgacagcaaacgttatatctggccgagagagagtgagatataacagtttcccaacaagttgtcgatagggagaagggtcgtcaagagcttctccttgttggtcatcaagtttaactctaggatccatgggagtcttggcgggtttacttccaacatagccattatcttctaggagttgtaaaagtgtattttcgttgggataataccaagccttcctttgcacgggc

SEQ ID NO: 239643 - DNA, 1084 bp, Cannabis indica
aatagttgccgaaaatctcggtcaacagtttctatacgattttttgttgcaatttaagttgtaacgctagttgcaataagggtttctatatagaattttgtaaaaataaaaaaaaaaaaaaaaaaaaaaaactaggtttaaagtgtaaaaataaaaaaaaaaaaaaaaaaaaaccaaattttatttatgtttaagtaatttgtgacataaatacttaagttaaattaatagttataaataaatacctaaatttaattttgacgataataatactaagttatatttttgaaacttctgtaggtacctaatcactaagtgtcaagtgaatatccatgtgcaatttttagtacaaatcattaatttagagttaaatttatgaatttaattataaccgagagttaaacttaaatatatttataccgtaaattactcttatatgtttcagcacataacatgttaatgattctcaattctatttacaattttaacttaaaatagagagagaacaacgttatataatcaccttcactcgttgacagaaggagcaaggagagtatttgcgctctaaccaggctcagcccaagcattttaggagtcttgtgcaaaattttaaaattgggctctttaaaaaaaaaaaaaaacaaccgtgtacattaaaactacaattctattactaatttttttttttaagattcgttcataaattttcaattataaattttttaattatgtatatataataggaaaaaaaagaaaaaaaaaagcattttctttaaataaaaaaagtgggccttaaaaaaatagaggtcttgtgcaatggcccaagctgcccaatacttaagccgaccctggctctaacccactttaaatttttattttatttggaatattatcaaaatttaattgatctctttactataactaaagaaaattattgctacaaaaaaataattaactaaagaaaattatattaaactcttcctagaagtctaaatttataaatattctcaactcatcacaaagtatggcttagtcattgcctctattatggtggactaacaattacacctaaaaatagttcaaa

SEQ ID NO: 239644 - DNA, 1168 bp, Cannabis indica
taaaaatatttgataagtttatacaatataattttatttaggaatttaaatttataagtttgtttcttacctcttatcaattagatatatttattaaagactttttatttcatatgttgctggtacatcttttatttgtatgccttgtattgtaatcgctaatattttacattttgaatgttaaaatattttaaatttaataaaaattggtatagaaggaaaatattattagcatattaaaattaaattaccaatttatttttgaagacatgtaggggtccaagtcattaaaattgactgttttgtattcaatttgctcatttttgtcttcattttttggcaagtctatttttgttgtagttataattatccattgatatagattaaaacttgagattatttcacaaatacacaaaaataacaaaaaaattataaaaatacagttacacggaattttaaatatttttacgattattttaattttatttataaaaaatacggtctttttatgatatactattgctaatttgttgttgattttttattatctgtatgttgcttttgttgttattattttgatgttatttagatgttattttcacgttacttttgtgtaatttttttttattattttcgtatcatttttatgaaaaaccgtaaaaatattaaaaattctctatacgtaaaaatatatattttttaaaaaaaaatgatgccctcataagttgaaaaatgcctcttttattaatctattaaccaaatttacctctaattttttttttaattgaaacatactttttttatatgtattgtacctaaaatgccctgacataagagagtcacatagagagtatcttgaatttaaaagggcaaaattggtacaatgtttaaaaaaagaggtaaaagttatagactttaaaaaagatggtaaaaataaaagagtacaatataaaaaaggtatagagtctaattttcactataattatcccttaaaacttgctattttttttaggcccaatatcgaagagccaattccaacaagagttacacaaaggtcttctctcttcactcacacaatggttcagcccaacaagaagtgagatacaaactcacacaatgaaccaacagtagttcggcccaaagggatgagatcagcccaataaaaaaa

SEQ ID NO: 239645 - DNA, 1283 bp, Cannabis indica
tataagaaagagagagagattgtgagctgcaatattgtaaaaccagttcttgaactaggagagaagaaaagaaagaagattacatggttgatttgtaataggacattcatttggaggttgtaaaatcgttgatcaccatagtggatgaacgagctgatctgaagagagctcaaagagaaagtagcccaagatttggggtgaacctctataattcttatgtgtttgatttctctacgtgtgttttctaattcctgatcttttttagtttgcatttgattatctaaattttttattctaatcaaaatccaatatgagtttttgaagtaagttcatctcagaggtttcgagaaagaactttaatcttttttttttgtgcgagtttagtagtgtcatagttcaattttgatccacacatgtttcatctctatttggttagcaaggtcataaatgactatgaattaatgtgtgtgactaagtgtgtagggctttacaggtcttttaaacccaacagtggtatcaaagcctaaaaaagagttcaagaaagttttcattagtcacaaatagatacacattcaaagacccaaggagagttcggaagatgattgtagctgcaatcataatttcttgactaattaagaatagtgaagtgtttctttatttcttaatcttaaggataaatttcttcaaaattatcaacctatgtttactcaggttagattattgaaatgagtaacataaaaatataaattgacgaatttgatggttaagggaactatcgaatatgtagaaagaaaatcagagccctgctagctcagaataagctattaaaggttcttgaggatcctgtagagtggcatgctgacacatctaaagcacagaagggaaaaattcttgaaactgccaaaatgttcttgaaagaaagaatatttggattcaagatgtctcataccaatacaatagaacataacctggatgaattcctaaggatgcatattgaacttgaaaattcaagaaaggatgaggcactaagtgataaaaatcaagcaattataatcttaaactcatgaccagagttgtataggaaagtgaagatgccatcaattatggaagaatatctattactcttgaagaggtaatatctgctctcaagtccaaagatttagagatgaagaatgagaaattgaaaaagtctcatggagagttaaacctcagtagaggaagggcatctcagagaaagccctgacagaaaggaagaaacaaagcaacaacaatcaagatattca

SEQ ID NO: 239646 - DNA, 940 bp, Cannabis indica
aaaaaacattttaaaaaaatactctaaaatttcatccaattcggtctaaaaatattacatcaaaagtattggatgtaaccgatctaatacagagattcatccattgtatggaatcgatccaatttaatatttttttggatcggttcggttcggttgagcctacagtattgaattggatcggttggaaaaaatctaacatataatgtgtaattagattgaatttggatgggtccaaaaatattgaatgtgattaaataaataccttaaaatatattatcattattattagcataagcaaatatatttgttttgttaatttatctttttttgattttttaggagttgatgttatttttgttggtcttatgtaagttgatttccagttatccaaacagaaagtgtggttttacttgtagtattggattggattcttagtctttccttacattttgtttagcagttgtaaatacgttttttaaatgcttttttttctttagtaaatttagtttcttattagaagatttagctagtttgatgttcaattttcttgaactttacatgaattagctcggcatactcttcgggtggatagagaattagtataatttgatgagatttcattaggatttcttaattctttgtatgacaatttgatttctttgaagttattcatggttaaaaaaaaatcatttttaaccaatctatggtatctcaaccttcttcttcttccctcttgtgactcctctgaatgagtttctattttctcccaaccactgcttctctcttccttcctcgcagccaccgcaacctatctctctcgcctcctttcggttattcaccaccgtctttctcaaacgtctatgcctatgctaccctcttctccctttttccgtctaatcttaagttacttatcactcttgattttgaatcgattgttgta

SEQ ID NO: 239647 - DNA, 1059 bp, Cannabis indica
atgaaggcatgataatcaagaaagttaaatgcaagatggagtaggtctgaacaggctaaggcccctgccacacctctagtactgcactaggagaccaaaagagggagagatatgctcactcactatgtgagttagtcggtctctgacgtgaacgagcagctagcttgggcggacaatgacctatctctcgagttggttatgggaggagtcctgaaagagctttcgagggtaagtctttcttgacattttccttttgttcttctttaactacttttgattttaatgtctttttttctgcatagagtggtttgaagatggcctatgcatattcccgagctaagtcagttgctgctaagaaccttgccatttccaacacaatgcgaacagaagtggacttggccaagaaggacgccgaggaagcccgggttcatcttggggttgcgcagatagagctaggagaagtcaataagaagatccttgccgttgagaccaaagtggcagaactgaccaaggatctgcaggacatgccatccatcgaacaactcgaggctgatattgcttctttatctcgggaagtgaccagtctccgagacgaaagagaaggcctctggactcttcttcgtaggttggaggattaaaagaaagctaaggaggaggagcttggggccgaggttgagaaagggaagttagaggttgagaaactgatgtccaaagtggcgaggctcgggggaaaagtgaatgccctagagacagctggtctcgagatttttttatgacttttggaaggccaatcccaaggcaaactttgattatctcggtgattccaaagacatttttctcaactatcgtgctgctcaagcggcctacggggaatccgaggcgaccacttccacctctcctactgatcaaagtgttgaagtgccttcgtctcagactaatgatcctcctgctctttctaacctcgttgacccatacaaggagcctggaactcctgttgtttaagtacttccttttactatcttttttttaatttgtccggccataaggcctttttttaag

SEQ ID NO: 239648 - DNA, 689 bp, Cannabis indica
cactatgcgatgtctttcatctaacagttttcgttcctcttgaatggagaggttgtgggtaatgtctggccaacaaggggattgcgttaaggagacccttcgtcaccttatctttttctggtatgcttagaaggtttttcaaggcttcttaaccacgaagaacaaacagggaatctaaaaggattgatgcttactagacacgccccatcaatctctcatatactatttgcagatgaaagtcttttgttctgtcaagctactaaggactcaaccttggccatcacacacgtccttgatatctatcatcgagcatcggggcaattattgaatactcaaaaatcaatcatgtcattttctcccaatacaacaatgtggcaaagaatttttttagccaaacacttggaatgccaatttgtgaatgccatgaagtttaccttagccttcttgcttattcaacgcataacaaaaagaattgttaagtaacatcaaggaaataatttggaaactccttcatgcttggaatgagaagctcttctccattggtggtaaggaagtcttattaaatgcggtggtacaatctataccaacgtatgctatgagttgctttcgattgcaaattggattttgtaaccaaattgtatctgtgaaggcaaacttttggtttgtatcaaacaaagatgggtcaaaga

SEQ ID NO: 239649 - DNA, 1717 bp, Cannabis indica
acatgtgttaattctcattcgttgtttatgacgcttcctttcgtgcctttagaactccttaatcacattattatgcttcttcccgacctctattttgcatctctattattcagagctctgctctccagtatttgagcttcctgctctacttactttctttagtaaaactgtgtgtttctctttatgtcctgccacattataatatatcaactctttttcctcattttaatctcctgaaattacttatttcttcttaagattatttttatctcttataattgcccctcagttctatagtaatcgattactagaaatattgttccatgtcattaatgtgtgttgattgatttaatgggtaattttttgaaaaattatccccgccttttctaatttcccgaatattattactattttttattattattattgagttttaaggagaaatttttattaggaaagataaaataattttttgtaacttccctgttttccttcaaatcgctaatttaatttatccttcgctatttgcttcctcttattttgaaaccctttttgctatcttaggctttatctcgacttttaacgatgacttcaagatcgtccaaggtcaagacaaaatttgttgagaaggtttctcctgttatggagccaaatttcatgactgaatatgaatccatcttcaaggatatctgcgctagttaaatgccctattccagaagggatcactttttgtctgctaacaaaagaagaactatataaagatttgaaggaactctaactaactgaaagtggaactctagttagtaggacacacatggaactcgtgaggtttcatatcccccctcgactagtttacatcatttcccttactgaggtttctttaatcaactccttcccaatgttgttcagaaaattttgggcatatctgccgtctgtgctcataagcatacttcgttccttactttagattttttttattacttcaatagaacgtcatgccctaacctctttcctacatggtactttatagcaaaaattcctaattatacttccttcaaggtcttccttcttcaaataggagttggaatacctttgtttttgtgattggcggtaagcgatttcccaaggttattaaccctaaggcttttcctattgtcaatcgtatttcaacagcagaaggggaagagttgacatcaactacttgatcactcacaatagaaacattagttgggagaacttcaatagaagataggagggaactccaacaccaaaagatttcccaccttttagaacaaaagagatcagctcattatcatcatcaaaactggccttttaattaataatttagtattgaccaaaatctcaagctttgctagacaccttataaaactacgtactaaaaaaagcttttagtgcttctcctatttatgctacatattttttaattgatattgattgttatatgtgtccgatcttatgtaatttagtattatatatacggaacacttcttaatgggtattagtcatgaatggttactaaacaaatttaactataaatattaattttaaaaatatcaagccatcgaattttgatctaataacgaataatgaaatcacaaatttgactttctatgcttaatttaactacttgattaaaaaaatatcaaaaaatatctcttttacactatatcaaaaatatgttcatacaaaaatattt

SEQ ID NO: 239650 - DNA, 1379 bp, Cannabis indica
tgtgccaggatgggaaagaaacaactcgacacctattttttgaatgtaaatatgcaagggaatgcctcaacagactcaaggagtggctgggatggagagtaagcagtgaaaacttgcctcatatcattaggtggatcgggaaatcgaaattaagcagaggtaaaaagaaaatttttgctgcttctgcagcatctctagtttaccacctttggacagcaagaaatgctctgatttggaaaggggaacaaccagtagcagggaggataaatgaagagatagaaaggaagttaaagatgagactcacaatgtatcaccctaagaaaataagcagccatgataaagaatggatacaatccttgtaataaggaaatcgacatagcagtaggggaatttcagttttgtacatagagtttgaaatttgaggcctctacttgaggtgcttttaggatgtagaagtgattgttttatggaatacaactcactgatttatacaaaaaaaaaaaataaataaatgttaccaatttaccaagttactaatttttttaattaaagtttaaactaaaatattaccaatttaccaagttaacaaattttttttaattaaagtctaaaataaaatgttaccaatttactaaagtaacaaattttttttagttaaagtataaactaagatgttatgctaccgaaaattcgacaacataacaacttaaaattgatcattcccaaatttttaatatctacaaaaaaaaaaagctacaaatacaataatatttgctacccatccaatcacaatatatttttcacagaacctatttcaatatagtgaatatataagatattcaaactttactaataggtattttcaggtaaattcatagcttggtatacttgcaaataaattgtataacaactttattctatggtgtatgagaaagtatacaaaagttatggatttgttgaatatagtattaattttttttttatttaacatattataaaaacatactaacctttaaatataatgaggagtgaattttttcaggcaacaagtaaagcgacactaaatatttatttaccaaaaaaaattaaaatataaaaataataattataattgtacaataatatacgtaatatatattatatacgtacacatatatatacatgcacatatatagacatacacaaatatatacacatacacacatatatacatacacatatatgtgtacatacatatatatataggtacacatatatatatacatacacacacatatataaatacatttacatatattttagtcacacatatatattaatacactttactaataggtattttaagtaaattcaacaacttggtatacttgcaaataaat

SEQ ID NO: 239651 - DNA, 1348 bp, Cannabis indica
taaaagcgaagtcaactagttttgttttttaatttgtttattttaatatttattttaagctaaatcattttatagatatttatgtgaaaaaagaataatatattagttgttaacgcagattttcgttaaccaaatttgagcctaatagtgacaatctcacagagaaaaataaaaactataaaataaaaagtatgaacgcaaaggattttttacgtggttttgcagttaaaattctgcatagtccacgagtcaatcttattagatttctgatggtttttcagggccttttttgtatgattttttcgtccccttcttgatctaacttgccactatttataatcacatagtaggcagttaattacaaagttgactgtgatctttacaacgtttctcccctaaaatcatggggtctgattacatgtcacgtagtataaatgcggttattatttcaaaatcacacagctgtgattttctcgcatttactgggttaaaatgatcgtttgtctaaacacgtctttaattgtagtgttctgggatgtattgacaggatcttggttctgatggccttgatagcgagctggagcctttttttcccatctttctaaggtcgacaatgtacgcctcgttgcttcttattttagagcataatgcttcattgtaacaattgcaattcctattaacagagaatttctcgaggctcatttgaatgtttagcttctgactcgtcaagattgcaagtctcactgaaaagatgtctaaagttaactggtggatgttacaggaatgagccttcctatagcgagatatacacctctcttattgaatccactcgacttttatacttagtttatgcattttacactaagtatttcacaatcaatatgcgttgttttcgccttcttagatgtaacgagattgatgcctcgctttatgcattcaatgacatatggtttctcgttaatacactaaataacagtttatatatcttttcctcgcataagaccttacagtcaacgagttgtaagtatactctgctacttatgcaattaatgagttattccaaatgttatcgatccgtattccctttatcttgacatgtgtcctccactgagatggtagccgaattttgggtacaataattgccccttaaaaagttctttttttatataaaaagtgctttttaataatttcagagggcatttttgtcataatccattttggaaaaacggatcctttgattttggcagttgtacagtttagagggtcattatgaatcgtcttttcatcttctgccccactctcaaccgttagatttcccaacctttggccttcttgtcactagactttg

SEQ ID NO: 239652 - DNA, 1066 bp, Cannabis indica
ataatatttgaatattattttttgatatttgaatttttttttataaattttactaaaatagtataagtaatcctaagtaattatgacatataaaatcgtatttaaattactaaaaaattctcgtagatgtccgaaataattatgcttattttttttttaatttaagcatttatatattacaatgtataatttgggattggaactaaaaacctcaaatacacacacgtttttatagctacttgtacctctagtggttaaaaaaaaaaaggttctcgtagatgttcaaaacgattttattaaagtatgtacaataaattttatctaattttatttaatctaaagaaaccaaagtagataagattttatttttatttttatttagagaagcaaagtagataagattgatagaaatatataatggaatgtgagtaggttgtagcacagtactaattgtagtagtacgtacgtacattgatcctaaagtaatagtgaggtgaatatagggccatcgataacgcgtgaacaaccttagttggttttattctaaacactgctgctattacagtcacacaccaggcatggtgactgctcttatacagtaaaaattatttcctttgtttcttagtacgtacaaataaaaatattaagactttgcttcctcttcttctaattatatatattatattatatttttctttacatattttacaatgttaattatgagtttgtttcataataatatacgacaatataagttcatgtgttagcacttatattgtcaagaatattagacttgaaaaaaaatttctcatgtcaagaatacgacaatgcatagtctagctactatgttattttatttatgattaaataatatagatgaatgtaaaatatttaatatatatgtgaggttaatatatatgtatcgcatatatagtgattaaattataattacatgttaaataatttaatatgtcactactaaaaaattcttttaatgttttttttcggacatgaaaattttttggagagttttttagtctaataatattagacttgaaaaaaaatt

SEQ ID NO: 239653 - DNA, 2249 bp, Cannabis indica
tatataaatattatgtaaaagaacaatgagatcaaaaacacaataaaatgaaattatcgaaggaagggcaatcatcatcaaggcggtggattatggtttttttacagtgaatgaatcgaagaaggtcggagagttggagatgggcggatgatttgtagccggagcgaagacgagcggccaagaggaggcgggtaagtcttcgaatgacggcgtcgggtaagagattgcgctcgagagaggcgagagcgagcttgactgtggcgtcgtaagggagttgaacgagggcagccattgttggagggagcgaggctggtcggttggttttctcagtttcaatgaagagaagagaaaagagataaggtggttgttttgttgtagaagaagatgatgatgatgatgatgatttatatattaaaaattatcacaaaactatatttttttaccttataagattgatttttttttttttttgcgtaaaataatttagtttttcgtcaacaataattttgagatttgttgaagatgagataattaccttaaacacgccagacataaaaagaagtatataaatcttgaatctttgaagcaataagcaataagtagagtcataaacgttaaaacaacaatggctaaaagtagctagttataagaatgaccatagtaagactcttgtgtggaggaaggcggttccgggaaatacgcgttggagtggtcattgaatgagtcagatgttggttgattgtttggaggttgttgcccctgagatccagtgttatgttgacgatttgggcaccgtcgataatcatggtctgatgagcgacaaatgcgacaatgtcttgagtttcttgggatctgctccccgtttggtccttcccttgtatttcccgtaccctttgttctcacaacttcggggtctttaataatgttggggttgctacgatatcttccaggttgtggcgtctctccttccggattggaattcaactcaaattcttccttgaacattagagttagccgttcaatctcttcctttgcacggttgtacgaatcctctgattttgctgcatagaaagtgaagttataagttagtgaactgagagatccaaacctagccatctcgtaaatgtgctgttgtggttgtgctggcgggttaaaatgtaggtggagatttgtcttcgcggatttgctccatcgcttcatgagaagagaattaggtattcttctcatgtttaatcttttcattgtagcccataaatgtctacaagggtacccctgactttcatagagcatgcaactacagtgtagtgctcgtcggccttcacagtaatgaactcggtattggacgtccggatgctgaaactttccaatggtgaatatctgccactctccttcttgctcttgacttatgacaaaataattattctctaaatcaagctgctcagcaaccttgtggtacatagttcttgtgtagaattcagcacattggttgtagtaagtggtcaagcatgtaggattaggtgggtgaggtcgagtgcatctacttttgaagtcatttgcagtctcgttgtgtctgagctttgagactgtcatatctatggttgttacaaattcacgcaagcaataattcttctctaaaaatttttttagagcggagttgatggattcgcaacgttgtgtggttctcattcctgcaacgaatgaaccccttaaatacgtttctgcccattgttgtcttgactcgaatgttgtttgacaccattcattatctgttagttgttgggtttggatgacgtctaaccatcttgcttcaaattcttcctcctcgtagtagttgtacatgagatccttaaatgtttttaagaagatcggatctttaacctttttcgaagcatttgtattgagatgccaagcgcagagacggtgcgtaacatcaggcatgtgttcaacgatagcctgtttcatggccgcatcttggtcagtaactacaacatttggcttcttatctccatggcattctagaaatttttgaagtagccaagaatatgatggaagcttctcgtggaggaggagagcaaatccgaagatgcatgtgttgaaatggtggttgacgccaatgagaacagtgaggggcttattgtactcatttgtcatgtaggttgtgtcaaatcctagtacatccccaaagccacatagtccacgcgtgagtttccatctgcccagaataagttagccaatcgattctcctcgtc

SEQ ID NO: 239654 - DNA, 881 bp, Cannabis indica
cagagcatgctttgccaaccatgggctgctaaaatcttagagcgagccccatggaacaaaacttagttatagatatatttatatatattactagtagggaaagtgggccaacatataatatatacataacttggcaataattaaagacaatgtattttgtaagtctatttgcaatgaattagatgatggactactttttttcgtgtatattcctattaataattgtttagggttaataaatataaaatatctttactattttattatataaaggatatgtttctctttttggtgtatggatttatttaattaatatgcaccaatattttattagggctagccttctatatttagcatcttcacacccctaatcactatagtgatgagtgtcgtcttcttttaatatattattaatttctcaaacaaaaagttagattcttaataagaaaccaaatcaatacaattgactatttttttttatataaaataggatttttagcatacatactctcgagtttttcatatttaccaattcagtcccttgatatgcttttattttccttgtgtggcaaccactactagcaacctcatgatagggttttctttaaattcttttttggataaaacatagtttaaaaaaagtaagaattatggtagatacattctcaaattatgcatttttaaatataaaagtctaatccaacttatataaatacataggttgtgtcgtctgtcttgagtccatatttttagagtaaagttcagcctgacctatgaacctaaattatttatatgtgttgtactcaagtacttgtcatgtttaagtttatattttttgtgtcgagtcaaaattcatattttttgtattttatcgcgcctga

SEQ ID NO: 239655 - DNA, 751 bp, Cannabis indica
tattgtacaagtactcccaatagttactattttctataggggtggcaaaacgtgtcacattcgtattaagcgggttgtgttgtgtttaactcgtttttatttcatgggaagttgtgtcgatctattttcaaccagcatctaattttcttgaccctaacccgtaaaattcgtgtcgtgttcgtgtaccgtgtcgaaactcgttttgccacccataattttctgttctttagagaggagtactgttaaagagtatctctaattagggatgctttatataatatttaattatatggatatatttttaatattttttaaaatatgctaaaaaggcatacaatagcatttttttctatatattttttctttcttatttgtttttttattattttgtcataaaataaaaaaattagtcctagttactcttcaaaacgaaatggaagacaacaaaaattaaagcaaacatataataacaaatttgaaattgtaaccaaacaataataacaaatttgaaatcgtaaccaaacatctcccattggttattttttattattttttaatgaatgtttagtaaaaaaaatgctaaaaaaagacatacaatatcattctttatatttttttttcttatttttgttattattttgtcataaaataagaaaatttagttatttaatatatattaaataataatataatattatttaataattttaaaagtgcttaccgtataattagaacaaaaagtaacaaaaat

SEQ ID NO: 239656 - DNA, 886 bp, Cannabis indica
cgtaagccactatttgtgcctctccgaagttaatgtacttttggaccctcttttgaaagtcttggaggcttgctgctccttcctactgcagctcattccaaacaggagtttcggtccgaatcctggcatggagtagcgccagttgttgtccatcatcgacttttttggtttttgaaccttcctttttgaacctctttatgaagttcttcaaggtttccgttgttagtggttttatgttggtcagggcacttacttcgaagttaatttttctcgctaccacaaactgccatcgaaagctgacctgcaacttgttccaacagtccacgatcttggttctaacttcttgaacaattcttcagcggatccaccaaatgttaatggaaaacataaggacttcgtgtcattactgactctcaaaactgtcattactctattgaattgggacagagggtcactggggttcgtatctcctgtgtatattgccatttcaggcatttcaaaatgtttagggagttttgcctctaggatgttcctggcgtagggctcgctgtcctcaccaattagactccgagtcatctcttttttgccttcgtgagaccctaccaatgtctttttagaggagttccaattcagccaggatccctttttttagggtaccctccgacaccggtattgcttactttttttttctctaagtgcttcctaaggtcaccatgcttatcattaagcttatgtcttaggtcggcagggggatgcttgcaactctttctgcctctttccccaggttcttgatgcactgacacgctttttcgatccactcgatcttgagggccagtactctctagggagcctacccctttgcggacatttttctttcgagaaatta

SEQ ID NO: 239657 - DNA, 3375 bp, Cannabis indica
aaaaaaaaaagaaagaaagaaagaaaaggaagagaaaagtgagtgttaagagaaggggtacttaataagagaagtgatgaagagcaagagcagcccttttttaccaattatgtgattattttaatgtcaaactcacaagaggttgaatagggagcagaagatggacatcaagttcatcatgtccaccaatgatatggaaccacgtcatcactcaaatatatgtatatataaaattaaaataaatgaacaagaaaaagtaggttacttcattacagcttccacacacacacacgaatatttagagagcataataaaaataaataaataaagtttcctccatactgtaacgtggagcatttcgataagaggaccaatatatagtaatatacgatatattaatccgattattataaagttaacatgtggaataaaagctcaatattcaaccaagagagtaagagctagccatggtatacattatttaactcactactatttatctttatatatatattgattattttttttttttgttatacatatttatataatttttgctacaatacaacacactaatattgttttaaaattcacctagctagctagctagctagctactttaaatggtttcataatctcccctattgactagggcgcctgtaagattttatctgattatcagcaaaaatgtttgtacttttaagagaaaaatcatcaaacataaaaacattcaagtctatagtctaattggtcctttctggctgagtgagaactgttgtttttagattgaggaggtgcatacaaaatatctttattttctttaaattaggtaactaattggcagaaggatgtaaatttttgtgggtccattaaagttattcatagatatatatatgaacaatacaattttggtaacatgagcatttttcttttctttgcgagacttttctagcagacaatatacgaagaagctagatggagagatgaatcctattttgtccttgcatatattgcatattgcatatgtataattatataactaatttgttgttctatcagatatgatatctcaactgtccctgcaagacattttgtgcaagaaatcaaacttttaatatctgcgtgtataattaatttattaattgttttaatataaaccaccttagtggggcaaacggataatgacaaactaattaaggtgtggattctatatttaaattatagtgggtccaaattgatacttaaaggaaggttgctaaggccccataaaagtactgtgacaacaaatattgtctaattacccatgattctaataattaagaccattgccctctctattgctttcctttcctttactctcaaccacagttgtacctatctctatgatcttctcttttgaatcaaatcatggacaatcatcatttttcgaatttcaacatcaatgagatgctcttcaactccatctgtatattccaacttaatcatgcatattgataaaaagaattgaagcttacaattaattaattgactattatcatctatcatttaaatatatatatgttttctaataattatttatgcatgtatatgcacaatacacatggagttagcacaattattaatcaaagttttcaaaaaaaagagaagaaaaggacaccaaatcgaatactacaaactaactgattactggaagataagatttatttattttttttttttacacataaattcaacaagagcaataagacagccacacacaaatttattcttttgataaatttattaataacaaaaaaaaaaaaaatactatgacatataccaaattaccacaactgtatatcgagattgaggaaagatatgttttatgtatgtgaatatactctatgtattatatatatgaaaacgtacattttttttttgtagatagcttgctatacctacactatagaaactgttaaatatatttatgatatatatatatatatatatattggatggagtagttcttcaatcgaaccatgattagagagtgcatacataaaaagcagccacaagggaaagttatagaattatatatagtgtaaaggaagagacagccacaaaatggggcggtacatgtgcaatatcacaacccatatatttaaaagggtcgacacactaagttgtggttgtcaatcaaaaatttccatgcatatatgtgtactgtttacatttttgttaaataatattatataattataatttataagcatataccaagatagctatgtctctctcccctttaagagaaaaaaaatatttatacctctcgagaataatatagataaatatgtgaaaaagtaattacatatttttatctattaatactactatatatattattgctgattttatgttgcacctaatattagaatctaggtagtccacaattggtttacgcacaagagaacaaaagtttaaagacagagtatccgtggggtggatattgcagggaacttggttttgaggaaaatatagatagattgttgagacaagtcaactaaaagttatcttttccacataatcattccactctttaatttccgtggaaaacaagtcaagtaagtatttcaatttgaaatagatgaacatatatattcgtttcttaggtcaatctttaaatttaattcaattggcttttagtcaggagtgtaattctttttattgtcacttctttaattcgctggaacactgagttgagtgccgcgccaatagattttataatgcattttgaagtgacaaataattttccatcattacaaccaacataaaatacatataaaactaaatacactaaacacatttattgtggtgcaagagagaagaatgaataataatgaaataaaatatagagaagcatagaaataaggttctttttggttggagataatgaaatagtcactactataaaaatgtgtattcgcgattgttcttattagaattagttaggcaattagtttaaggaaattttcacgatatactgacttttattattttttttacaaaaacattgctaggtggtattttttttactgtgtatttttataagtttcatactgtagtagtatacttttttattttttttttaatttgtttggtttgttttagtgttgttttacggttgttttccataatttattttttaatgtcgatttcactgttcttcctccatcttgctagaattaatgattattttctgggtgttctcttggtgttgtggtggttttatctgtgggtgagtgtggaagatggaggctataaaatatatttcttcttccttctctatggttattttgtggttaatttttattttggttctcctaaaaatatatttga

SEQ ID NO: 239658 - DNA, 2017 bp, Cannabis indica
cttaaaggaacacgaagctcagttaacagagagttgatccagcgtatctcggcagccgtatttgctaaagacctgaattcgctttcagtacttgaacgagccaccacgggttgcttcttagcagaccaagatatgagattgtcacccaaaaacacaacataaccccctatagatcgcctatcgtcgacacagctagcccaatccgcgtcggagtagctcgtgagagtgagttcaggacatggtcgaagcactagaccctctgaaatcgtgccctttaaatatctgaggagccgtttacatgcttcccagtggcatgttgtaggagcctgtaagaattggctgagtttattaactataaacgccacatctggtcttgtaagagacagatattgtagagcaccaattgtacttctgtacaattttatatcagagaatggttctccttcagcaagagacaacttggcaatggtgcttgtgggatttggtgaactttttgccccttccatgtgaagtttaacaagcaaatctgtaatatattttgtttgggaaaggtacatgccagtgggatctctatagatttcaacacccaagaaatagtgcacttcacccaaatttttcaaggaaaaatgatggtttaagtcacgaataaggttgttaatgacagtcacatttgggcctgttactagtatatcatcgacatatactagtaataggatttgatcagcacccgaactagcaaataaagaactgtcagccttagatgtagaaaaaccccattgaagtaagaactgttttagagtatcgttccaagctcgaggtgactgcttgagaccataaatggcctttttaagcaagcaaacatgatctggtttgtccttactaatgaaacctgggggctgtttcatgtatacaacttcattcagagatccatttaggaaagcattgctaatatcgagttgggtgactggccaattgtgagtgacagcaagggaaagcacaatccttactgtgattggtttaacaacaggggaaaaggtttcttcatagtctatgccaggggtttgtaagaatccttttgccaagccgtgacttgaatctatttaatgagccatctgcatttaattttattctgtgcacccatttattatctataacttgcatacccgattggtatggaacaagaatccatgtgccagcagcctttaaagccgaaaattcatcactcattgatgcaaaccatttaggatcctggagagcctgtttaatggttttaggttcagttggtaatagggcatgaggtaaaggatgtttggtagccatataggctttaggtttaactatgccattttgagaccgagttgtcattgggtgagttcgaaccatagaggtgttatcagcaagagaggtagtttgaggaggtaatgtgggattttgaggagagactgggagaatatttagtgagggaatgggatctgtagtggctgctggaggtgatggatctgtagtgacaggtgtagtggccacgacttggttatttgaggcagatgggagagttgtgggagacatggtgctgatatgagagccttgtgcattttgcacagtaggaatattgtctccaggagcaattatattggtggcatttgttggaggagcagaacattgaggtgcctcatttaatggagccatggaaccaacaacacccgtattagtaggagtgaaaaaaccagtgtgaaaagtagcagtaggcatagtgtgagtaatagtaggatgtgcctggttttggagagaagattgtatgactcctggatagtattcttcattgaaaacgacattcctggagatgtatatcctgccttgagcattttcacaaagatagcccttatgatatgaagagtacccaagaaaaaggcactgttcagatctaaatgtcatcttgtgagagtgatatggtctgagatgtgggaaacaagcacaaccaaaaggtttcataatatcatagttaggtaattgaccaaac

SEQ ID NO: 239659 - DNA, 867 bp, Cannabis indica
  modified_base (34)..(34): a, c, t, g, unknown or other
tgatgaagcttctgccagagaagttgaagtttcngatcctaccgaggaggtggatctcttgatgttgcaatgttagatgtaagttttgcaaaccaggtgaagtctgtaaagcagaattttgtaggatcaatcagaaaacttcaacattccacagctggagagactttacacccgaattatgaagggaatttttgaaatcaaggataaggaagtggagacgatcccaaggcttcaatcttgagttttttgcacaagtttgtggaggacaaagccaaatttctagcttattatttcactcataaaatagaaaaaggaaaaaaaaaggaaaatcttgtagtcagataatgtaaatccggtatcattttattcatattgagtggtagcgttttttttttgtttttttgtttagtggcattggtgtttttttagaaaatattttgatctccggtcgttttatcttgttttactcattttgggatcaagtcgagctttatttacttcaatgctataaggtagtacgttgcattaacagtaatgacaaaaacacattggaatgctgaaaagctattcatttctcaaatattgacgatgtagtgctgcatcgtttgataatatatatggggagacgattttgttttgacgcagtttcacggaatgtatttcgtgatgtatgacagttagatggagggagttatttgatctgagggttggggttgatctaggggtaattataattaaaaaatggtaacgtatcctgagacttatttaatgtattaggaaatacattctgtgaaagtacatcacgagacaaaatcgtttccatgtatatatatattgtaggggtgtatatgggtcggtttgatcggg

SEQ ID NO: 239660 - DNA, 1798 bp, Cannabis indica
aaaagagaacttgtcacctaatcgacttcccaagagaatttctgaaggaactaatcttcgacaaactcttaaaagatgcaggggtaatccagcacaattgttcttttctcctttgtcagcagaaaatgaaccacacttggatgtttccattgatggaatggattcgactggtgtctatgacagcgatgcggagtctgagtctcagctccgcgatcaaccatgaaaatcttaagttggaattctcgtggtttggggaacccgaatgctttccgtcatcttaaattgcttgtcaaagagcaatccccacatgttttatttcttatggaaactaagttaggtcctaattctatttctcgttttcgtaatgtattacatttcaataatggacttgaagtccctcgtgtcggtcttagtggtggtttaatgttactttggaaagatgatgtaaatgtaactcttttaaattataatataaatatgtttgattgctacatggcttgtggaatgggtctgacttggcactttacagctttttatggtgcaccagctgttcaaaatcggcatcttacttggacacttttagaaagattaaaggatgttgcaccaacgctaccttggatggttgttggtgacttcaatgaaatcttgtcgaacaaaaataaatcatgtgggagcttgcgtaatgagtcacaaatggacaactttagacatgttcttgatcattgtcacctatatgaacagcccttcgaaggtgatcaattcacttggatcaaaggacgacttaaggctgacacaattaaggagcgattggactggtgctttgtgaatgctatttggggtgacttctttcaacaactcacaacaaagcatttagattactatggttctgaccatagagtgatctctgtccaagtgctggaaaactcttcaacacactagcaacctcgtcgacaaacaagattcaggtttgagaaattgtggttgcacgaggaagaagctacagatctcattcagcaacattggaagccgatttttgcaggaaatgctgctgcgacttttctacaaaacatttcttcgtgtgctgattctctccaacattggcataaaaaaaatttgggaactttaaaaagaagatttcaaaagtgcaaaagaaagtagctgatctgaataacacatctgttcgaagcactgctgcaatgaatgatttgaaacatcaagaatcggttctagatgagttgttggcccaagaagagacatattggcagcagcgatcgcgagttgattggatgcaaaatggagatcaaaacactaaattttttcatgcttttgcatcctcaaggagacagcacaataccattaaatcattgacagataataatggtaccattgttcattcaaaacaaggaatgactgatgtcattacttcctattttggtactttattctttgcaacagccgttaacactgaagctttgcaacatgttctcgctgcaattccaaccacagtcatggctgaaatgaataagtctctcataaaaccgtttaccagcgatgaagtctacaatgcactcaagacaatcaatccagataaaagcccaggttgcgatggaatgtcggcaatattctatcacaattattggtctattgtgagagatgtggtcactaaagtggtacttggaattttgaatgagggttgtagtatggaatccattaacaagtctctaatcactcttattccgaagattaagtcaccaacgggaatgggagactttcgcccaataagtttgtgcaatgtcat

SEQ ID NO: 239661 - DNA, 3010 bp, Cannabis indica
atattaaaaaataattaacttaaattaatttttaaaattattttcaagaaaatataaaaaaaatataagatcactctgtctaagcccctctcaagtagaatggaagccaacaactaaaatagaatactccacaattgaaatacaatccaaatttttttcaatgcattcaatatgaaccccaacttctctataatgtttgccaagaaagaccttcacccgatcataaccttttgccatatccaatctaatagcacaatacccaaatgtaataaaaataatctttccataatttttctcattttattataaatatttgaaaataaaaaaaaaaatattatgtaaattatatttgaaatatagaaaaaaaaattcaatagagcggtatatccaaatatggtaaattatttaaactaattattttgttgtaagtgtgacttattttttttttccaaatatgtgtaactttcttgattttgatatttaagcattttgtcttgaacatatatgttctctatcttgaattaagtcattaattttagatgtatcttccatcttggatgtaaataatttgttttgaatgtaacttccattctagatgtatgttatctattttgtttatgtttatgtcatcatgtctgaggtatgtcatcccatataaagtttgttattcgattgactaattgagatatgagtcatcccgaccgaccgactgagatataagagtcatcccaactgaccgactgagatataagattcatcccaatcgattgactgagatatgagtcatccgatcgatcgactgagatacgagagtcatcccgaccgactgactgagatacagagtcatcccgaccgactgactgagatacgagagtcatcccaactgactaactaagatatgagtcattcgaccgaccaaatgagatacaataatcatccaaccgaccgactgagatacgagagtcatccgaccaactgactgagatacgagagtcatccttatcgaccaactgagatacgagagtcatcccgaccgaccgactgagatacgagagtcatccctatcgaccatctgagatacaagagtcatcttgatcgaccaactgagatacgagagtcatctagatcaaccgactgaggtatgagtcatctgaccgatctactgagatatgagagtcattccggccgatcgattgagatacgagtcatcctgaatgaccaaatgagatacgagtcattctgaccaaccgactgagatatgagtcttcctcgacctaatttgagatgaaaattatctcagatcgatttgaattaaatataactttgacttgtccagtgaggctacactcttagttatattcctgtatttcgactcctgatcttgatcttctcaatctttcatgggctttatttgtatttatttattgaactttttctatattcttaacaccataggtctcttgttggtccattgatttttctcgaaacaaatactagtgctcacaatgttgctagatgggaattagaaatgaatgttgctagatttattgtggattcctcaatgtcaatggatatattgtgtaaaacaaaattgaatctttctcacacgacttaatttattttaataattaattcaactataattaaaatttttgtcctttaaactttgacatgtactaaatatattattttaactttttacgttgttaaatatttttcctgaactattgaaattgttagatttaatgacttttgtctaatttcattaattttgctaacatgacgattgtccatatactaaatcgtgcccccaaattttaatatttactaaatcatgcccctgaactttaacatgtatcgaattgtgccccctaaatttttatccacgtcaaattttctttagtcaaattaaacaaaagtccttttatccaagaatcttaatagttcgagaaaaattttaaacgaccaaaaagatttaaggagtatatttaatacatgtcaaagttcaaaagtaaaaatctaaattaatgctagcatatattaatagttagtacatactaccaaaaatactaattagtgaaaacctagttttattcactaatctattacgagattaacaatgcttattaaagtctatttgttattaacaattaatcaatcaaacttttagtattatttgttaggaccaggtgctttagaaagtcattatacttaatgaaatttaccatatttattccactaagtaattacataataactatgcaactgatagtaattaatgagtttaatttacagtcatcacttatgagaatcacgtctaattataaaaatttataatttttttaagtataattaattaatttgttttatataattatcaaacatgaaaataagattaatattaccttatacgggtaaatttgcactacttaatacgaaaaaaagtaatggtatttaatattatatagctatatgtatattcttattactaaataatattgtaactttgcaactaaggtataagtaaaactattttcctacaaaaaaaaaaaaaaaaaaagtaaaactatgttatacatatgatgttccttgttctttttctcacgttgtcaaccacgaaacgatgtcgctttatgtgacgacgacaaaaaataaaaataaaaataggaagagtaaatagccaagcgcaagcgcaccgttcctccagaaaaaaataataaatgaaaaattaaaaaaaaaaggaagatatatcaaatggttggctgaggagtgaggagcttttaatttttcttttcttacacaatcacaatggtatgaacgaaaataacgccttaatatttcttatatgcattagtgaaggtaaaggggtagtgatatatgtccaaaaatggcttcactctgcttgaattctttgcctctgccaccctcttctcagtctcagcccaagaactggtggaaacttcattatttcttcagtgagctataacagtcctaatggccttgtcaaagg

SEQ ID NO: 239662 - DNA, 1442 bp, Cannabis indica
ttggcggcattacctttatggcgagaaatgtgagatttaaactgatcacaaaagtctgaaatacttctttacccagaaggacttgaatatgagacagagacgttggctagagttggtgaaggatgagcttttcaaagttactttttgtagtgagagagtgaaaagtgaaaagtgaagaggagttttcctgcataaggcttatatagcttctatgggatcacttcttcacttgccacatagtgttcaactaaaatgcatgtagaggtataatatggttaacttacggcaacaaatgagatcagacagccaagagtagttatttcaaagactaaaaatgtagcaattagttggttgcggtttggtgatgaaaacacaagctacttccactctatcatgaaaaaaaaaaaggaaaagcagattatagaatttgttcttatagtattgacggagctgttgttgacgagtatgaaaaagttgttgaacactttctcaaccacttctgtaacttcatgggtaggcaaagcacgacgactagaagattggaacttgactgtcttgaacacgaaaataagctgaacattgagcaacaggttcaactaattcgtccgtttaaaaagaaggatgtgaaagaggctttgtttggcatccactcgtcgaaaagtccaaggccggatagttttggtgctggttttttcaaaggcctctgggaggagataggagatgacatatccaaagcggtgttgggttttttccagactggaactctccctaaggagatgaatgagactactatttctctcattcccaagactgatagtccacaaaatgcaggtgattttcggcctattgcctgttgcaacaccatatacaaatgtatatccaagatgatgtgtaccagactgtcgaaagtccttcccattcttatccatgagaaccaaggggcgtttatcaagaaattaaggtctctagctcgcaacatactaatcttacaagatctattaaaagggtatactcggaggaacatctctgcaagatgcatcatgaagatcgacctgagcaaagcgtacgacagtgtggattggtgctttgtagatgatcttttgaaagggctttattttccttccagatctatttcatggattcaaagttgcctccatggagcttcttattcccttatattaaatggaagaattcaagggtctttcaaaggtgagaagggtcttcgccaaggcgacccaatgtccccgctcctctttgttctcattatagagtatctaacgagactgcttattcacaagtccaaggagaagggattcagattccatcccctttgtaagtctttagggcttgtcaatctttgctttgcagatgatcttattattttgtgtaggggaaatgagaaatcagtcaagtatgttagtgaagttgttggaaattatttt

SEQ ID NO: 239663 - DNA, 721 bp, Cannabis indica
aataagggtacgatcgcaaggatgaggcgtgcatgcaaggtgggtacaaccacgtggcctgtaagatttgagggccatgaggtacaagtagtgggcgaacaacacctacaaggcctgctgacaacctgaccaagggtgcacagtagccactaatgtcctgcaacttgggaccatgtgacaccagacaaaggtataaagcacaagagcaccatctgcaacctacaacacataaaccatggattttaccatgtccttgggaccactagtgtaccctaggccattagagcctataaatacccatctctcaaatgtaagaagggattggaaaatcaatcttgtaatcacatagtttgaaccaatacaaaacattattttctctctactctcgatacccactctagtttgaatttacactttatcttcatcttatctctaaattttgaattcaaactttgatttttttggccaaaagttggttgacgggtttctaccgtcaacagtttggcatcgtctgtgggaacataaagctaaggctacattattttccttacatacaattattgcaaaattcttagacgctctcgtcgtctccaagatatggaagttcaccttgacggcacttaaccgatcgctccaaggcgtgacccaccaccactcattgctggagaagaaggtgcaaacggtcaaaggcctcaagcaagagaagaaggtgcaaacggtc

SEQ ID NO: 239664 - DNA, 1581 bp, Cannabis indica
caacattttaccattcaaacatgctaaatatcctagacctaacttaaactaagcatttttatcctagatacgaaataacaaacagtgaataaagcatcgagatactttcttggtatatgagtagggaatgagagattgtcgtggaaatctgcccaagggtgttgaacccagttgatcacgcgatcatagccagcttgagtgtcgaagttctcatcagtctaggggtggatcagttcaatgtctaaacgctctgcctctggaaagcgggtcgaacgtaggtttataaaattattgaattaagcaattgaagacttcttgcatccaccactaaggacgattgcgagtttgaagttttttttggaaaataaggctctggtttcaagtttaaaggcaagggattttgaaagactaagatggtgaaaaaaggaagaaataggttttgtgagcctatttatacttcggtcaaaatacgtgtggtttgaaatgaatagcctaaatcctttttccaaaaagcatcatttgatctgatggatggaaaattgaaaagatggcatttaaaattcacccatggtgtttattcttcatcattacatgcctcgagtactgtatgcattaaaggagggtcatttcaatcaacattctattattgtaatttctcccaagaaacaagcccccaacacgcgcgtgttgttaacaacggcattaaaggcaccacatgtgtgtcacgcctgtggtaccttcaaattatggccctgtacttgatgacaactcacgaggatgcattcacgatcccaacaatcaccacgtgtcaaaaactcatctctaagagatggaaggagactacaagctcccagattttgaagaatcctagaagcatgggggtaaatgttatccgtgtttctgagcatgtgacacatggcgtttaaatgaatggattaacctcatattctcgctaagtgaaatcccccactacaatcctatcatagagaagcctcacggaatcgagaacaagtcaagatcaaaggatgagtggaagcctaccttgccttatcctaacttcccggacacagaagacataacgtctctcctagacccggagtggtctaaacttagagtctgcccgactgatacccggatgggtactcgaagggcctatcacgaaaactaattacccaagagtgtcgcggacgtctacctttggtgcaatatggattgcccaacgatggttatgcttttttttaacacaagatcagatcttgtcccatgtgtccaggcacagtagtgcacacacctcatccatatttttgccagacggttatatcaaacctctacttttaaaggtgaaaccttttggtgacacgcaccctcttttaaaggttaaacttttgagggacacgtgtccacgacgtacaatggtctccaattatccagctgctgcacgcacgagcacaatttttccaaggggcccaatagtttgctctcttttgcatgtaatttaccccattagcagacttttagcagaaaccctaggcgggtcatgggcatctccatacccgcatttagcttataaatacatttcta

SEQ ID NO: 239665 - DNA, 647 bp, Cannabis indica
atttgaatggtgtgaagaagaacgtttatttatatatttaagtcaaatgcaataaattcttaatttgcatgacatgggaaggaaaaaccgccgtataaggtggaggcaatgtaagggtaaaaatgtaatttaagggtattaaactggtttaagaataatggaagaaatgattaaaaggaataataaagctaaaattatagtgtgaacgtgacaaagctttggaagattccattcgggcaaataattaagtcacctatcttaattaataacatatctctctcacatatataaaactccttcggtggacacctgcaattccgctagtttttttttattatttttttctttttatttaaattatattgaactgcaatatttttttttgaatcaaagcgattagattcaaacattaaattaaatttcgtggtcattacataaaatattatttaagatttcagttaaatgttattgttaaatatcaattagataatcattttgtatacgtgaaagtaaaactttaaaattaatatactaataactcaattggtatttaacggtgatatcgagttgacactttaaatttaggagaattaccccatatactatttttaattttttttcaaatttacggtttgagtttctaaagt

SEQ ID NO: 239666 - DNA, 1391 bp, Cannabis indica
acatgatgtcttcgaattcacataatcatacaaaaaataattacactacttttcactacgttgagtactttacataccaaccaaaatattttttttacacaaatgttggaactcatcgacgtctttccttaaacaaatcacttaaccactcattgtttgaaagtttaaactcattcataaaatttttcttcaaattcttctactgttatggaatcataaaccacaattttcaaggcattctttatttgttcatatgcattgtatccccttaaattttcaggcatatttttcagtaattataccataaaatgtcaagtagcgagaaatacaacttctatagcctttttcattactttgtcttggtttgtaattatagcaggtggttcacattcattcatgtatataaaaccatgttctgaacaaccaaataaatgtactagtatcttcatttgataacaatccacaccccaacaacattgagtgcccatggtgattaacttctacaaacaatgcaaatggaaaatcatatttatttgtcaaatatgttgtgtcaaatgtaactacatcatcaccaaactcttaaaataaggctttactccaagaatctacccaaaatatatatctgattctaccatcattatctaaacccatcatgtaaaagaagccaagccaatagattctttggttgcatactcataaaataatcatgaatggctttagcatctccaacccccaaacgtaaatgcctagctttatcaacaaaatttctgcaatctttttctaataagagtgatactttatcatgacctccagcttcaactacaaatgtttagaaatttttaccacactataaccctagcacgatcctttaattctaactttatttttgcccttatccctatttctctattgcttgtatacaatcttgatttatgaggaattagacaatgattatgctcaagcataacaaaaattaattttgcattgcccatcttcatacaaagtagcattaattcttgctttgtaatctgatattgtttgaggattaggaataagaaaattttgtttcttattgagttgagatttcctatctcaagaacatgaaagacaaacaaatttcatttttctatgtgttaaattacgacttgttttcttcttaacaccaaatccttcttgtttccatataatttatagtacaaaatcaaatcatcccatgaatcaaacttcattcctatcttaggtgttttccacactatcattcaaatatttcattgtgctttcaacttttttctcactaatatcttcattactagacaaacaaatatcttcttcttctagtgacatttgaaactctgtatatgttcctttaaaaaagttgatacatagctaac

SEQ ID NO: 239667 - DNA, 1271 bp, Cannabis indica
caaagggagtacaaccacacctcatacaagttatgatgacaagaatgtacaaatagtggaagcaccacacatgcgaggcctaacatcccgaccaagaatgcagaaaaacgactacccttgcaactcgagaccacctaacactagacaaaagtacagccgcaagatcaccatctgcaacctgcaacctgtagaccatggatgtcaccatgtcccttggaaccaccaatgtatcctaggtcattagagcctataatatccctttctcagatatgagaaagagttagaaaattattgtaacacttcactttcactccaagaaatacaaacatttctcttcttccatcgttgctctgaatattttttttttttagctttttgaatttttatatttttattttcgttctaagtcttgttttcaagtttcgattttctagccttgagttagttgacgagtttttatcgttaaaaaaaacattaatataattattacaaataattataaataaatttattacagaattactatattgttttatattttaaaataatacttattttccataaaaataaattgtgaaagaacttaccataaaaactaagtattgattaatatggagcaagcaagagaagttttttttttctttttgatgaagtaccaagcaagagaagttgcttggctaaaaatcactataaactaaaaaaaaattgttcttgcctcatggacatttattggcacaataaagattgtcatactttttttttttctttggtcattgaagtaagaaatctaaactaaatctctaccttacctaaaaggtgattggcattgaatttatttttcggcttacaggcatacctttatatgtggttatttggtattctctacaaaaggacataaattaaatttattattttctcctcttggaaatttatataaatataaatttgtgtagacacataataagtaaagccgccactattaaactcacccacctccaaaaccaaaacccaattcttccaagaacttgtttaactaataatactgaaaaatgaaaaatactaaaaagtactagtggtgtataatatttttttatgtgtcaatattactattgttttaattaattattaaatctcatataatttaatataataattttaaaaaaatatcactaactaatcgtaaaacaacatgtttagaggtactataaacactactagtgcccgaaatataaacaaagtctttaataacaacaacacgatctgcattgcat

SEQ ID NO: 239668 - DNA, 944 bp, Cannabis indica
taatattttcttgttattaaatggaagtaattataaaaattagttaaatactaaatgtaaaagatgattgctcttgttgtttctagtctagtctctcattatcagctgccttttactttgtttatttcacaactgaagcagcacaggtggccttatgtaattcagcttctctctctccctctctcatttctgtgctgttttttctttggctttcttggcctgaatttctacttcaaacattggatggtaggggtttatctctgatccatgtctctgttacatgcttgtgcttttctctgtcttaattcttcagatggattctctttgatattttcttggtaaatttcttggcaactttccgaggtttaaggatggccaacttgttttcctgcactttccactgcttaattctacatgtgcatcttcttttctcggttgtttttcctctgctatatttactgttccttgctttgacggggttttgggataactctcaatttatgctgtttttgtctatatatgtatgtatgtgtggtataatttttcagtccaatgtttaattcgggtaaatatagcagttagattgagtgtgagggatgagaaactcttgctgttggactaggttaatgtttgatcagatgtggagtgcatacaatattgttcattttcttggaatgactggaacagcaggttaataaatggtcttaaacttatttgtcctaatgatttctggataagttaacacaatttagtttagttttgattactttacttgtgcatagattcttctctaaatttctttggaaatttttccagctttcgattctgggtaatttcagcaagcaggacctttttcccagcaaatgtttgttgcccctactcaattatggaataaacaagtacattctgtgatcttgtttgtgctacatttttggtgatgtttg

SEQ ID NO: 239669 - DNA, 824 bp, Cannabis indica
gtatataattggcagcaaagaatagagtattgtgcccttaaagaaaaaaaaaaaaaaaaaagaaagtgttgtgcccatttatgtaattttacagcgaagacgcggtttgagaggtttggttaccctaacccttttgtttcgtggtgtggaaatctgggcgatcagacccgctctcatcgctcctcatccattcaatttctgattaaaacaagatgacctctagggacaaggacaaggaccaaacgacgccgcatcagccacttctcagcagcctcgtcatacgcccctctaacagcgacggcgtccgtggcactgactacgagcccggcgaggttcgccgtgaccctccttcctattccagatccgatcggttatccggagattctggttcgtttctttccgttttatgctttcttatttttgttattcttttattctaattacgttctagtttatccaactaataatttagggtatagatttctgtaataaatattcgagtttggattgggattcggggtaagacggtaagtaatgtttttgcaaaccctagatcgagctagtgctttcgttcttatttctctttttcagctggttacttaccgataatgttatgtcatttcattttctgcatttttatattctcgcgtatgattacatattggagttgttagatgtttattgtacaattcgtgttggttttttgaagaatttttttgtcagtgctgcttcaaagaagtcgagcttaagttacagtgtcgtgagttttcttagccataaacttattagtgctagagttcaaagggttttcttttttttttttt

SEQ ID NO: 239670 - DNA, 2197 bp, Cannabis indica
taagaaagtgagaagggtgtttcgctagttgtggagcgaggggttgtgttataagaaaaaacaccttttttcgctcgtcgagcttgcctttgatggtgtgtttaatgcttttgttaacagcttcagttcgcccattgctttgagggtatgcattatcgttacgttacttgacatcctcggtaaaagtaaagatggtttgtctagtcatttagagcttgttgagttaggtataagacacgatttgacacccgtggataaaggaaatcacacatatttacctcctgaaactttcatattgcctagagaagagaaacaagccgtatacaactcatttgcaaaaatgaaagtactcgatgggtattcatctaacgttcgaaacttaaagtacaacactgtattcattgcatgatgacatagttaaaaatctatgcaatcataaaaaaatattttcccccattctttgacatcatgatatattatggtccatgtactaagaaagttgaagttgtgtggaccagtttgggtgacatggatgtatctatttgaaaggaatatgaaggtattaaaaggttacatgcgtaatcacaatcagcccgaagcttgcatgattgagtgtcatatatcagaagctgcagtggaattttacttggagtaaatagaaggagttaatccaatcacacttaattagcaagccacaaaatcactcaaatggggttgatagaggattacgagagaaatgatcagtggtgactatatctagagcataattagataaagctcatttgcttgtgcttgagaataaccctaaagtccaaccatatataacgtaagttatatattattttattcaactttatactttttttcttaatcaaatgaaattgtatataacttatactttatcatttcagtgatcacttgaaattattacaatcaatgattagaaataaggttaagaataaatagatatgggtactagaggagcatcgtaaaacattcattggattgttaaagaataccattctagccttcatgatatgtcaaaagagttagaatacatatcatttggactagatactcaagtaattaataaatcatcattcttacattgtgggtgggggaaggatttcatacaaaggcaagagatgatgctcgaacaattcaaaatagtggagtaagtcttgttgcagaagcaatgcattttacatcagcaaaggaaagaaactcagtgtaatccactatgacatattatggagttattgatgaaattcgggagcttgattataggttgtttcaaattccacttctaaaattttcttgggtggaaaataaagccagagttaaaacagacgaacttaatttcacttgggttaatttaagaaaaaaaaagtatcaagaacgatccttttatcatggctacccaagcaaaataagtattttacataactggtcccattgattctaaatggtcagttgttttaagcacacttgagcgacaatattttgataacgaaaatgatgaaaaaaatgataatttatgtcatgatagttttgttgatcaataacagatacacgatcaagtggaggaaatcaatgatacatataaagatgataatggtgaatacattagaagcgatgttagtgatgggatatggctggttgtgcatcatctaaaaaaaaagaaaatgttttaagtgagtaagtatgatgtttagttgactaatagtgtattaatacataagttgtacatacaaatatgtcggatatagattgcattatattttgggttattacaaatgtgttaatacttattatttattttctactatacaatttaatttgtgtatctcttgcagaagatgcaaatagaccaaaaaggcgagatgttgtgatattttgcacacgcaagtgtacgtatcgttacaagttgtaaactcaccaagagtgaggtcgatcccacagggattgtagttaggtacgttgaaattaaacttttacttttatttggttaaataaaaattaagaaagaattttaaaaataagaaaactaataagaaacaaatatttaagaaaattgactgttaataaaaattaaggcttcgatttcaattgtttctattgattatggcctaatatgattatttttctaatgttaatttctatgcaatagcaggtttactaaggtaatttatagtct

SEQ ID NO: 239671 - DNA, 992 bp, Cannabis indica
tttgtgattaaaaaattaaaaacaaaagtgttaccaaacgacaccatatttaatttatatatagttacagaagaaaaattgtttgcaatattattaactttggccggtggcaggccagctacttaagatgtttattgatagaattagattcattatcaattagggccgattctgagtctaaataggaagttataggaaaaaaaagttatctttacggtaaagataaatgatatttttaaaattattaaaaaaatatatattttctaaaatgattttttatatttgggctcctaaaattagtggaccctaggtgcgaacttaacctacttatgcctagctaaaatcggttttgctatcaatcttaattaagctacccttaattatctttcaattaagtaagaaatatatatgcatattatatatatttatttacatggagtcttgaacctttagatttactaatcaatattaatttaatttaaattactttgaatcatattttgacaatgagttaaaattacttaagatgcaagactggctttttaattaggtgaacttaagaaaataaaaattatgggaccctctatttaaatatacatagtatttttaaaaaatactaatatatatttaaaataaatttttttggcccctaaggtaggtgagtcctaggtggcgcagtcacgcgggtctagtttatcttaactcaaactcgagttctgtagttacataaaaataattaataaattactgtaacgtattaattacaatttattttattttttatatatatatatatatattatgtcatcaataataattttaatttgactcgtaaataaagtgtgttgaaattaaaattttatcaaggtaaaaaaaaaagttgataattctatgaacaaatattaactagattttgtggttggcaataattaatgaatattcgatattgtagctgtacagtatagtgacaattttttattaattaatttatt

SEQ ID NO: 239672 - DNA, 1704 bp, Cannabis indica
ttacttataggtaactgtatatagtgtatagacttagaatacttccaacaaatttttaatttatcctttaaaatacattataaaaattttattttttctattttacagtactacacttttacatcacataatacatcatattttttttaaaatatatcaccaaaatcttacttttttaaaattttattatattttatttattaaaaatatataatattaatatatacatacatatccctatacaaaaataattattaaaacccaaaataatttataaaatatgttaaattaatttacaaaaatttaggaagccttctccaaatacaaagtgtaagaaccagtatttatgtagtgacaaataaggtcgagttgcgtctggaatggttgatgtgtacagtttgtgctattagtgttgtccatatcagcaaaaatatttttggttgtttaattgcccaactgtctacttcgaatttctttatttagctgggtagaaatattttttattgttacttttttgactaaccttcttgatcgaagattagagattcgtttctttcttcttatttttcgtctttgtgtttcattgcgggtactaacaagaaactctattattgtgggttgaagtttcaaaggaagtcctgaagtcaagtagtaagagctgaagggatttcagttagtacttggggtgttacaaatctgaaggtgttcatatctagagctttgttaaagggatttcaataaaacaagaagcaaggggatcttgcttgttttgccaaggaatttggcagattggagtaaataattttgtaaggaatttggcagatttgtatgaactggatgttgtattttttcaaatcatttagtgaagttacttatcctggtttagggaacccaagcaatactcgagattggaatgtgttttcagtggtagggaagcttgtaaatcgattgtcttttattgtcgtttctttatctctttgatacttgaactcattagtcgaatagataataggattaaagtgaaacttggtaatcaaacttagtaactagactttttagaacctacatttggtatcagagcaggctttttctattaaaaatattgatccttagggttcttgcaagatgtgttgtactaaagtttattattacagtaattcttgatttttttgcattttgtttcctttctgcaacacccggttggaactaatcccctctccagacacgactttgggagtatacggctctctatctttgttttgtttttccttgttcgtacaagaatggggatgttcaaagaaggagggtccatatctcgacccccaatgttgggatgtcaacctgggtgctggatattaacttggtcgttgggttgtcaacctgggtgctggatatcaacttggtcgctgggttgtcaacctggttgctgtgtgttgaacatcctccagtaaaacagtcataactccttcaatattgatccaattgacgcgatacaacttacatttcaaagctatttcaaagatctatctatcaagtcgtgtctcacacacatatcacaattataaagactttaagtccaaaatttgtgtccaagacagttgtaattttttctagagattggccaaaaatgatccaaccgatgagatttaaactccaaaaattgacgactttcatcaagaaacaccattagatcgtcatcaatgg

SEQ ID NO: 239673 - DNA, 1562 bp, Cannabis indica
attttaacttaattttaataacatcatatgttttgtaatataccgtggtgtaattttaacttaaagaatgaccactatgcaatttgcttactttaagatgagagcacctaccattattgagtttttttttattcagatgggagcacctatcaagaaattaaaatcaaatgtaacgaaattaaatgtaattacaatgacgattgattttcctagacaaagaaccaaatcgttcttaagtgagggtgagtgagcttttttcaataatgagaaatgaagaaccaatacaagccaaccaaactctacgaaccttaaatgattaggaggaagtcaacttataagttgtaaaagcatataaacaaaacaatatgtatataaatttttttgaagacaggaataaaacatatactggtctgttgaaaaagaagaaaaaaaacaaaagcaaaactattcaataaagatttaaatttgttgcgaaatcagtataattcatatttggaataagatggaaaatagttacagatcttgaatgcaccaatggattgctcttctgccttgagcctttgccgcagtttttgaatgtgtgagagcacgagagaggtagtcagttacaactatacataaagaatttgtaaacagttatataatcaaaataaatatttatttacgtattaaaactctaaattgattaaataaaagtattaattttcaattagaattaagcaaactaatgatcaaaatctatattattctttaatgatcaaactattcatctaatttctcgaaataataaacaccaattattaataataatttaagaagaaatcctctaaaccagatatgcgattcccatctttctgtctctataaaaggtgacccctctatactgtgacttctgagacctgccctcctttgctcttctttacctgctatttttgatttgatttgccctctatttgatttcacttattcggcaaaagtaacctcataagatggttaggaggcttattgccaagcaattataaaagcatgataaacaatattcagatggtgaggaggcatttaataatatcgtacacaatactgttccttgtacgtagttattttatgctaccatacctcgctactgggtaaactccagatctttgatgctgctaagatcatcaaatatatatataaatatttatggggacttgaataacatagctacttgagtagcttcaagtagttatattttgcgaattgaaagaacatactgattaggttcatccagggatctctagaagcataaaatctgttattttaaaggccaaccaatctataagagaaaattcatataaataatcttttttgaataaatcgattgcataagtgcataagagaaatcaaaataaatataaagtactaaattaaaaataatttaaggaaatagaaacacaactgtgtattattgatgaaaataaaccaagaaaataatacaccgaatataaatacacatttgaaggcccaaaattataagacacatatcagaatgttgcatcaaccttttcaaagaagatagtttg

SEQ ID NO: 239674 - DNA, 789 bp, Cannabis indica
tggccttatgacaatgacgtgtcgaaccataacatacccaggtaatgaaatttgtttatagactgacatttgtcatttttcgtgcaatcaatatcatattatattttatataccagattagaatgacttgacgaaaaaaaaaagtataccagattaagataagatcaataaataaatatacgcagccaccagccttttttcttagcttattaaggttgataaaaaatacacacgtatatatgcttctaataaataatatacatattatattaattacgtattgctagctaataatgaggacacctgggatactacaaaaacaatgtattcatatagaaacttaattagttgttaacttgtcatacaaattagaataacattatagaatatatatatacgtacgtacgtttatctgtttattttattaaaggtacactaattataataatactactaacatataacttgaggaatacagaattttacattgatttttagaatttaaagttgataattaattcatgttcttccccttaattcaccactaataatgttaaacacaattataacctaaattaaaaatttagtacggttgcagtcttgcaaaatcagcctagttctatactaaaattaattggatataatttgtaaattagaaataaaataaaaattaattagaataaaaaaggttattaaaattattattttttaacacgtagctggttgttgaggatgagaaaagacaaaagaagacgtaacgcaagtaccgcttgaaattataacggtgaa

SEQ ID NO: 239675 - DNA, 933 bp, Cannabis indica
taagtgttttataaccctaacataacataggaggatcttttatccatactgaattcaaaagtaaactcatgatacaattacaattcaaacagtttatttcacacgagtataaaataaaagagtcacgcgtacaataaacggtttgaaccttatttcggtatgttaaattattttaaatttctcgaaaatttataggatgtgttaaacaactatgatgtacactgacataaaaataaatatcattttaaacattgtattttgcaaaaattatttattttcttaaataacaatttgaacccggtgttttacaacaagaaaaataataacacatttgttttagaaaaaaatttcttaaaaaaataccatcgaaattgatataaatatacattgtaaataaaaaaaataattaatattcctaattagaagatagacaaaactataatttatgattgctaaagtttcttgtttttttctagatattttttcaataatagtgatgttcttgaggaatttatatttattttgttaagacaattgctctttcttaatgtagttaattccttttcaaaaataaaaaaattaaaacaacttcttttaatctatttttcaaaaatatgtttatttgatacaaaacctatcaagtttaatgcaatatataattttttaaaaaaaaaaaaatctaaaacaacacatttattagacaaaaaagaaaaactctaacaactccaatgtaatatccaacatcattggaaatggatgtgttgaaaaaaactattcgcaacattttctagttgaaaaatggtcaactacttgttactaaatgaaaaatattattattaggaaccgcagaggagaaaatgtagaattgggtttattccaatttatgaaaaagaaaaaaatgaaagagaatttgagaagaaacaaaccggccat

SEQ ID NO: 239676 - DNA, 741 bp, Cannabis indica
atattttaataactaataataattttttaaataatttgatatttatgtgttggaatataattaattcttttagtgtaacatttaagaaactaaatagattagcgagaaactagtaggttacctatttattatagatatcatctttataacaaaagtaaaaaaaacatatttaaaaatagtagaatgcaataatttttaagcataaattataattagtctagcatagataaaaattaataaacaaaaaagagaaactctcttaaacaaaaaaaacaaaatgaaaaactaaaagtgtcccacgaaaaataacataaaagaataaattaaaggagaaaaaaatttcctcttacagaaaaaaaaaatatattaacagtatacacgctgaaagtaatataccgcactttcagtaataaattgtctcaccacatttctacaaataatttgagatttgtgtttgtaggcgtaaatagttcaagtttaaattaggagccgagatacaggaataaaactaagagggtaacctcattggacaagtcgaagttatacctaagtcgaatcgatctaagataattctcatctaagatcgtgctgagaaacacattatctcggatcgaaaggtgcctatctcggttcagtcttggactcctcttatctcgaatcaattcaaaatatgttttatctcagaccagtccgagatatgacctatcacagtcggtccgagatatggagttcgagatatga

SEQ ID NO: 239677 - DNA, 1512 bp, Cannabis indica
gtagcagttttttggagtgtcatcatttcacctcttaaataaaagatatagattttatgtctatgataaatactccacttaattatactattaaatatttaatatgtaagtataagctaatctgtagggtaagtcgataacgagtaagtcaagacttaaataatacaattagtagaataatatttactcagaattaagatcgacttgacttacaatcaacgttgtgatatgagctagtatgagctggtctgtagggtaagtatttaagtatgacctagtctgtagggtaagccaataacgagtaatttagtcaagacttaaataatacaattagcagaatattaatcactaagaattaagattgaattgacctacggtcaatgttgtgatatgatatgttatagcaatacttaattatcttatcaataattaatatcggtctaatctaatgtatcaaaatatattcaatcatattgttcaatatcctggataggatatgttatacccatcttttgagaaataaataaatgggtcagatatctaggttcaactctatgtacaccaataccgctataacttctaattgacaaatcataatacatgtatactaaacatgtgcatatgtgcatctgttatactaaccttaccttaatttcgtaatcaagtgtgatggtcaacttaagtgaaaaaagtgttcaatgatcgaaagccctatatcacagtaacgtaaaactggtaagtaagtgtctactctaaaaaaaactttcttatacctgtttagaatctagggttttttttaccaaacaatatggtaaatatacctaaaataaaatgcacattttggatataaattacataccatattgtagaaattttttacaagctttaaaacagtatatataatgtctaaaatagacacccgagtgaaaagttatagtcaaaaaatcaaaaaattgacctttcccaatactgtccaactggacttccagttgatatagccctgtaccaatcggacgaacgattcctggggagtaagagcttgaaaattagaaatttttaagctcccaaaatatgctccaaacttccccaaatgctaccaaaattcaaaaacacaaaaatataacctactaaacatgttccacaactcaaacaacacaattaaacaccaaatcaaaaagtaccatggatgagtaaagcttgagttctaaaactcaaactcactcaaaactactacaactgctaaccttcaaccaaaataagttgaattctcactaaaaacttataattaaacaactcataacatcaccacaactaacagaatcaatttagccaaaaatcacaaaattctaactttaattcaacaagaactcaacgaaaaagagcttagagattttaccttaatctaggctaataatttcacctcaatttctagttgaaattcttgctaaaaccgaagaaaaagctttgaaattttcttcgtctccttgggtttcttagggtcgaaatagagga

SEQ ID NO: 239678 - DNA, 1044 bp, Cannabis indica
gtctttctttctattttaaaatgcaataattattccatcaaaatagtggaacgtgtattacattggaatcacattctaatactttcaaaaacaaccaaacaaatgaatagaatgaaatttatttcctttctattccatttcatttcattacttccaactaaacaacacatttgtttcttgttatcattggtgtttctaagccagctatcaattgatgtcattattgctgtagatgatcataagtgtcgacgtatgagatagacgggttttgtggtttgaatacaaattttcagttgattttggttttagttaataatgtgttggcatggaatagtgaaaaaagatagtgtgtgcattagaaatgtatacagtggaaatgagaaacttaacccttccctctagactcaaaaaagtcgaccctcctcctcgttattaacttttgtatcaaacatattaataaagactctaaaaattaaacgccaaagatgttgtagttagcattgctataaagcaccagtggtacctaacatcttctcgacatgtcgcgttgtgattggctagcgatactccttaaaagttattaattaaattatataagacccgatacttagttggaccaatagcgatattgacacataggaaggtgttaggcaccacgggtgccctttagcatttctctatagtattggacaatctatctgacaattccccttttatattgttaaaaaaacaagagtggggccaaactctcaatatctcaaaccgagggttgttctggtcacgaggacattgtttctaacatcaagaaattaaaataaattgacgaagacgaaaggaaaaaaatgacattgaatgtcatacattaaacaaaatttctcaacagccatacatgaagcaattttctcagtaggcattttacaacaatcgcaattagttgtgatggtgaaaaaagaataaataaaagagtaaccccaaaaatggtcacatatttacaatgtcaataatgtaccatgaagattttaggggaaggaagagaaaaaaaaa

SEQ ID NO: 239679 - DNA, 1312 bp, Cannabis indica
aatttatgttcaaaatatggcatataacacttctcataaattagtagtatatgcactcagaaaggatgctgaactaatttaaaggatattttaccatcattcttttatgatgtacttaattattattttcaatgaagtgatcattgttaaatacatatatattatttatttttattattcacttttattttttatgaataaaattatttttcttccaaaagtttgaatggaattttcggtcacactagtaattatttgaacttaaaaattataccattgcaatttatttttcaagatgattattttcatgtgtgagaagcatatatttttttcgttaacacaagcgtctgttaatagtacccattttgggaacgtctagtgccaaagtgagtgaatgagtaagtccctaatccttaaaatgaactatgtaatgtactttatttgttggcttgggcattttaccaaaagtttttattgtatcatatcaacccttgtgtgattcctattaaagcatatacttggaggtgggtgcatggcggacgatttcaaagcagactccccatttattagaggataccaaaataaaaagtagctttcaatgtttatttttgttaaaaaaataaattttttattaatcaaagggcaaaagccacactctatgaccaaaccaaagaaactaacaaacaacaaccacaaaactcctcacgccaataaacggttaatcattctataattacaagtattgtgtttcatgtgcagtatactatacaaaagacatatagtgactctttgtatttccttagctacatgtaaacagtataagaactattctcgtggatacaattgtttctattcaaccaaaaatagtaagcagttgtagcaagagtagcaaaagtgatgtcatccttggtcttcctagatatgttagagatcacattcaaccacccttcaaactgtaatggctaggccttgaaaccaagtcaattaattaaacaaagcttgaataactcgaactgaaaaatggatagtcaaaaaatagatgattatgacccacaaaccgggcaatcactcgaagtaattgttatgccaacatgagaaagttgaccatgagtgagaagatgcttatgaaatgcttgccagagaataaatctgtgctttgatggattctatctacaccatatagctctagaggagctgtcttgatcacaaactagcaagctactatagagtttagaagctctaaactaactttttcccccagctgccttcacttgctgcaagctaatgttggtttttatggtactaaattagg

SEQ ID NO: 239680 - DNA, 725 bp, Cannabis indica
ttgattagggagaggttggatcgggccttatgtggtccggagtggctggtggatttcccgaaggcgggggttcggtctcttgccattaaagactctgaccatgcccctcttgttcttgatctgctctcggatcgggaaagatttcggacgcccttccgttaccttgatgcttggtctcgggatgagacctgtagggacgtgatccgtcaggcttgggccattgatgtccgtggttctagaagctggcaattggttgcccgcttagataatacccgtatttgcctttcgaaatggaataaaacacactttggaatgtgtgaagagaaactgaggatcctcaataagctcctgattgagatccaaggtcgtgttccttctgatgccaacctgaaattggaggcggatattgttcttgaaattgaggaggtggaggctaggcaagccgagatctggaaacaaaaatctcgggagctttggtatcgcaatggcgatcggaatacgaagttcttccacgctgccacggtgatcaagaggaaacgcaatttcatttctgcggtgtgtgtggatggtaactcctggcttgaaggcagacaacacgtaggggaatattttcgctctaagttcatgtccatgctctcctcgacttcccctgttgccccaaacttttcagacttgatatccccttgtgtgttgatggaggtcaatcaagcgttggttaagattcc

SEQ ID NO: 239681 - DNA, 2861 bp, Cannabis indica
atgttgacagagagaatgctctgttgaggtgaggtgtaggctaacaaagctatgaaccatttaattcttaacaccacccctcaaacaaaggggtgaggcagtcacaccaagttgggaagttaggaggcgaaatctggaatgagataaagcttggttaggcagtcggctgtttgatcagaggagggtatgtatctaacttcaagttatttcttcaagatcttgtctcgaacaaaatgaatgtcaagctcgatgtgtttagttctggcgtgatagacaggattggatgcaagagcaccagcactaatgttgtcacaccaaattatggatgtaccagccaaaggaaattccaactctttgagcaatgattcgagccaggtaatttctgctgtagcaagagccaaggctcggtattctgattctgtacttgatcttgacacaacggcttgctttttggatgaccaagagacaagagtttcaccaagatacacacagtatccaccaacagatcgcctatcatcaacacaacaagcccagtcggcatctgaaaatccggtgagtttgagcttgtcactgtactgaatgtgaaggccgtaattcatggtccccttgagatatctaagtattcgttttgctgccccccaatgtactgttgttggagccttaaggtattggctaagcttgttaaccgcgaagcaaatatcaggtcttgtgttgcaaagatattgaaggcctccaattaagcttcggtagatagttggattgtcaagtttttctccatcatgaattgacatattctttcctgtagctattggtgtagggcaggctttaaggtttagcatgtgtttttcctcaataattcagcatgtatttttcttgagtaagatacaaccccgtatcatctcgtgatacctcaatgccaaggaagtaactcaggtgtcctaagtccttcaaggcaaaaagtttgtttagttgctgaatgaagccatgaagcttggagctgtcgttccctgtgatgataatatcatctacatatataagaacaaagatgattagtttctcatgtttgtaataaaacaaggaagtgtcagctttagaactcttgaacctccactcagtcaatgtatttttcagtcgatcaaaccatgctctaggagcttgtttcaatccgtagagggacttatgtaacttgcagacatggtttggttttgttggatcctcgaatccttctggctgaaccatgtagacatcttcttcaaggtaaccatttaggaaggcattgttgatgtcaagttgacgaatttcccaattgtttgagactgcaatggtaagtataacacgaatggttgaggctttaatgactggactgaatgtttcactgaaatccagtcctggcctttgatgaaatcccttcgcaacaagccgtgctttgaacctttgaaaagagccatctgcattccatttgattcgatagacccacttgcaccctacaaggttatacgcttcagaatatggcaccaaggtccaagttttgttgactttaagtgccacaaattcagtgttcatggccttgttccatccaggatggctgagagcttcagctacactttgtggctcttctttctctggattccactttctttgactgagataaactttgggtttgaaaatcccatctttggatcgtgttatcattggatgtgagggctgtgttgcagcaggagcagcaggttgtgtagcagaactggagctgttatcggctaaaatttcagcagggatttgctgacctgatgcatgggcttcagacacaatatcaaagtggtcatgatcagtatttgaatcaagggaaggagattgatttacctgactctcggttggtgtggacaaagcttctggtgtggctgctgcatcagagattgctgaaggttgagtggttctaccagtgacataattatgagaggttgtgttactaagaggatggaagcttggaagttgagaccaagcagaattttgaacgattatagagtgttcagggacataattgttgaggaaaccaattttaaaagggaactctccttcattaaacacaacatgcctagatatatatactcttcctgttgaacttaagcatttataccctttgaatgactcactaaaaccaagattgacacacttaagtgaatggaattgaaacttgtgagattgataaggccttaaacatggaaaacatgctgatccgaaagttttcagcagattataatctggttttctattataaacgacttcaaaaggtgatttgttgttaaggataggtgtaggaagtctatttataagatagacagatgtttggaaagcatcgacccaatattttagaggcatacttgcttgagcaagtaaagttaaccccatttcaacaatgtgacgatgctttctttcagctctaccattttgggctgaggtgtgtggacacgagtgttgaaagtgaataccatgttccttgactaaattctcaaaagcctgatattctccaccataatcagaccttaaggatttaatcttggtgtcaaattggttttcagcaaatgctttgaattgaatgaaagcatttaaggcatcggatttgtgtttcaagggatagagccaagtgaatctgctataatcgtcaacaaaatgaatgtaaaatctaaagttggtattagatgcaatcggggcttgaccccatatgtcagtatgaattagttcaagcatttttctagctctactgttggaatttttaaaaggcaatgcatgagcttttccatattgacaagcatcacaaaagtttgtttttaattcagatggaacagttacattgtttgattcta

SEQ ID NO: 239682 - DNA, 1505 bp, Cannabis indica
gcattcgtgtaactcgaattatgtaggaccagaggttaactcgcatgtaccaggatatatgcaagtatcctctcgatcttcctgcaaaaacatagagatcaattctctataacgcgagctggtcccaatgacccaacaacttcgataaaccgatatagactcacgtgtctaggttttatcagctcgttataagatgttcgtaagctcgattatacaagaacgcagacatcttagacttaactaaatgttagatatatcctaagcacgcgagcttacgccggaatatgaacagccaactcgaacattagaagttgcatacgttgctgtatttagtgaatagaaactattattcatttattgatgtttacgttttagtttaattactgtgaatcaatgtataaacggattgacaatgaatgcaatgaatgcaccatgaaatgacacctacgaaactcttgcaacagtggactaagtagactgtgatctgactgaaccactatactcctttgtcttcttgatatctctagtttgtactaagtacttacgttcccaattcgagtactcaccgttttaggttgaatactcgcaattgttcctcatataatttcttattattattattattcatttttggtgttgcgaaatttgctcgacaaaaacttgttaagtcagcttaaaggttgcacaatcaatcagatccacaaagaataaaatgcaacaggagatgcacttgcctacctagcgagcagtaccatagctgacaaagcaaacttagtgcccacacggttcttagaagaacccatcattattgtcccggaggaagttgacatgttggatgacactccaacatggatgacacatatcgtagcttatctccaaaccggagccttgcgagatgacaaaaacgaggctagaaaactaagatgaaaagttgctaggtacttgatcctagatgggataatgtacagatggagtttgtctatgcctctcttgagttgtgtcaccaaagccaaagcttaacggcttttgatagtaatgcatgaaggcttttgaagcaatcatgctaggggaaattctcgtccacaaagatactctgacacgggtacttttagccaacaatgatcaagggtatgtcagaaaatgtgacaagtgccagagattttcaaagataccaagagctccaccaaatgagctcaagatgatgcaatctccttggcccatcgtagtgtaggggatagacctaattagtcaacttcgaaagggaaaaggaggggtgcaatttgttgtcgtcttagtatactacttcaccaaatgggcgaagctgaacccctggcaacaaccaccaccgagaaggtccttgattttgttatcaagaacatcatatgtcagtttgacattcaccagaagattgtgtcagacaacggaaaacagttcgacagtgacatattcattgattaatgcaacagacatggaaacatcaagagcttctttgtcgtggcccatcc

SEQ ID NO: 239683 - DNA, 958 bp, Cannabis indica
gatttgagcaacggggcatttaaatcagattgatcttgcttcttcaaagaggaagtgctcatcgtaatctttgaaagttagttcttcccgggaatcgaagaaatgcagcggtcaaattctgagtattcagtctggaagtacctagggttttcatagtaatcttctgcaagaaggtacatgttcatgttgtacatcaacgaattagttagtgacacgtcattcgtttaggggtatatttggtagttaaaaatattagtgctcgttgaatgacaataaaacccttcagtgaatggaatggcgtgattggaatgaaatagtaaaagaagtttatgtaaggtcacaccgtagcagaattctgttttttatttgaccgttaatatgacaggtatagcttttcctccagtttttaacgaggaggagttgtcgtttttagtttaaaaaaagagaacgacacgtcgttgcgctggctttaacttttttttttttttgtttatatatatatatatatatatatatttatataataacaaattttattgttgaaaatgaaacaatacattggttattaaacaatgaggaaatttcttccaaccaagaaacctcattttccatctgtcgtgcataatctcaccatgttctgcagtattaccattttgcattacatgttgaagacatacactcgaaaagacagataacaaggacctagtagaacttaaaaacagcttcacccagacacaacctcagaaaaagaaaggactaaatggaagacaacttcaggatcactctctaaaagaaatagaaagacccaacaatgaacaactttgggtgggaggggatcatcttagttgcatgacagagagaatcttgtgcttgtgaaaaaagactctctcaaaaaagagaatatattttaattgcaaaataaaaaatatacatttgtaaggaaatatagaaataaaaa

SEQ ID NO: 239684 - DNA, 1959 bp, Cannabis indica
agagagagagagagagattggtgcagtgagagaaatgagaagatggtgatgggtgcaacaaaagaaaatggagaagatgacgatggttttaggaatttcgggaagaagatgaaaaataaaaggagaaaaataggtttttttaattatttaaataattataataatgtggactaatgaaaatctgtcatgtgtacacttgtatacatagtgtcatgaaaaagaaaaggattaaaaaaagggtttaacctaaaatttagttatactaaacttaaagtaaattgcagcataacccctaatattgtcaccttactagcaattatccccaaaaaatctaaattttggtggtaaaacttcctaaactcaagttctgttagtatttagtattttctatctatttttgacagttaattgccaagttggatgtccatgtgtacataggatattgttcacgtggacacaatgtacacatgacataatattattggcccacgtaaataaatatttaaaaataaaacaaaaaaaacaaattttaaatacaaaaattaaactgaaaaaataaataaataaataaataaataaactgtaatttccttcagaaactcccaaaccgaagctttcccctttcctctcacttgatctcacctctttctctttgttcagtgtcacacacgcacggttaggccacgatggtcatcctccggtcgacgatgatcgaaacggaccacagcagtgtgctcacaacctttgaaaacctcttaccccgactccctctcgtcactctcatctctctcggctgtgcacgaatggagctaactccaaccaccgtgggtccaaataaatgccatagatggctttgcagagttccgaaaaccctagatccataactcttgaaggtccctcactgttctgttgccgtcaaaaaggatcgtcagagctacgagttttgggtctaatctgggcacttccgagtctcaacgagccaaacggatggcaggtatatgttttcatcataaaaggtttccaaatctcgaagctttttttctcttgattttccttttcttttctaccgttcatctccgtagttggagccctccattgaaatcgacgtgctccattgccggccttggcttaatcaaataaagcttaagacattgtgagtctccattctcttttatttattttttatgtttttttaataagaatttttggttttcaaggttagattttgatttcagagatgagaatttttggtgggtttgcccatgctattggattcgaggtggagtttcaatagaggaccaaggtgtagtttcgatggaggaccaatgtggagtttaggaggattgaggtaggtggagcttcgaaggtggaatggtaaaaccagaaaagaaaaagaaacaagagaaagaggaaaaaaaaagagagaaatttgtttttaaatgattttttttaattaatttatttttatttatgtttaaatatttatttacgtgggccaataatataatgctatgtgtatattgtgtccacgtagataatatcttatgcacacatagacatctaacttgacagttaacagtcaaaaaatagtttaaaactgccatgtcttcttctttttctaaatgatactgcagtaccctaaaagatcttcttgtctcttttgtttgtttggtcaaagttacacacaatagtattaaagacgcaatgggttgagctagtttcttatgctgttttgagtactttgcaggtgaagataaactttgtttatccaagacaagattgcctaactcgaagtcgggttgggtaattattgcttcaatgtagtgtatgtattgcttgaatgttaacaatgactttttcttgcaacttcctcgaatgttaaaagaagatgcaattgctgaatactatggacttcatgttggaaattattttaccaggatctatttactatcatgtatg

SEQ ID NO: 239685 - DNA, 825 bp, Cannabis indica
agagtaagaagaatatttgagaacaacataaaattgaaacgtcagcagataaatctgtcaggaataaatatatacatatatacttgagacatgagaatagattgagttgatagaacaagaggatttatatattaaaaaaaagaagaagagtacacgaaaatacttttacttagagtccacacactgctaaaaaaaggaatatatataatattacatatatgttacaaacatatactgataaaagaaaaaggataaatattatacatatattacatagattcaaacaaacgaaaaaagagagaaaagtgatacaaagtagcaaactacgtgctactattacaaaaaatatgtatggtacatatattttaaagaaaaaaaaactaagtacataaaaataggggtcatataattcattctagtgtgctagacggcccggctcctgctgtatgatctccagagaacatgggaacttcataaatgttatcaaatggagtaccccgattattatggatgggagatgttagcgagacaagatgtctagcatccaaatattgacgaaaccatatttggatttcagtctttaacatcttcatattcctattaaattgatcgcaaaggacatgcacatttctgtcatgctcgatgaggacatgcctcatctcgacatcttttctagaaataatagtcgatgcctgcagtagttcgtttctaagaaacggtgttctcgaagacaactcttcaacacgatcagttaggccgtctagttgacgtatatgatcatgacactccataacttgttcttgattaacatcctctgaattagaa

SEQ ID NO: 239686 - DNA, 2510 bp, Cannabis indica
tttcatttccttggatttggtccattaatggcctctttcataagattggggttcattattgactttatccaattcactcatgaaggcatatgcaatgtcttcatcccaaatattaaaactgtacataggatttggttttggtactcttctgtttctgtccctggtcaattgatagtcacccaaatcttcttgagtcccctcatcagtgatcccagtaatttcttcttcatgttccacctgaatctggtccctaggttccacctgaatctgtcctccctggtattgatctggtgtgttctctgcttgttccacctgaacagatttaggcctgacctcaatgcttgtaactacatggtcagtttcttttgcacctacactagggttagatgtaataggcaaacaaggaaaagtatcttccttaaatattacatctctgctattaattatcttaaaaccccattgttcccaaacccatagtctatatccttttagcactcatgataccctaagagtacacatttcatagccctaggttccaatttccctatgctttgatgtgcataagctacacagtcaaatactctaagattagataagtcaggaaatttactagaccatttttcttcaagagttttgaatccatttgcattggatgggcttctatttattaggtagacaacaattaaggttgcttctccccaaaaaccttgagataatcttgattgtaacagtaagcatctcaccttgttgaggattgtcctactcattctttctgccactccattttattggggtgtaatcttcactgtcatgtgtctctgtataccattttctttacagtagtggttaaattcatcattacaaaattctaacccattgtcagctcttagtgtttttaagttttcatttgttaaatttttaacaaaggttttccactgtgtaaatttagcaaatgcctcatttttatgttttaagagaaatatccagacttttcttgaaaagtcatcaacaatggatagaaaatagacacaaccaccacgagtactaattttctctgggccccatagatcagagtgaacatactctaaaatcttctttgtgatgtgtgtgccagtagaaaaataaaaaacggatggaagaaatgataagcaaaaggcatgatttgtaataaaatgttacaaacaacaagaaggccatgactactttgatacttattctccggtgatgagaataaattctgtcaggatatttttggcagttatcgcattgcgaaatgtagaagtccatcaaatggatgtaaatattatctttatagatggagatcttgatgaagaaatatacatagaacaacctgagagttttgtagtttcaggaaaataatgaaagtttgcaaacttgttaagtaactgtatggacttaagcaagcaccaaagcaatgacacaaaaaaaattgatagtgtcatgatgacaaatagatttaaaatcaatgagtgtaaaaaatatgtgtatatcaaaaccacaaatgagggatacatcattctatgtttgtatgtagatgacatactcattgttgggagcaagcacgaatggttaaatccaccaaaataatgttaaactcaagatttgacatgaacgatatgggactggctgatataattttagggataaaaattacaaggacactagatgggcttaatttgagtcagtcgcactatgtggacaagatagttgacgaaattggtgaagatgattctggcacatccagaacaacgattgccataagtaaacatttatctaagaataaaggcaatagcatatctcaagttgaatatgctagatataggtagtctaatttacttgataagatgtacaagattagacattgcctatattgtgagtactataagtcggtacacgagttatccaattgtataacactagaatgcaaacgtcagagtactaagatacttgaggcatactcaagactatgggttatactaccctcgatatacatctattctagagggatatagtgatgcaagttggatatttgacatctaagactcaaaaggtactagtgaatacatgttcactttaggtggtatgactaatttatagaaatcctcaaaacaaagtgtaatcactagatctacaatgaaatttgagttttttgctctggatagatgtagtgaagagagagggtggttatgtaatttcctagaggatatttttaattggcttaagcatatgcctgcaatatgtatatattgagataatcaagctacaattgacaaagcacaaaatgtgttatataattgtaagtcaggactatacgtgacaacataacactgttagtgtaacgccctaaataattaggcacgctacccaagatacttataaagccctaatcccctaaacgggattactaataaaattagcgcataatttaaactttaatcataaacggaaggaaaataaaacttgtaataatttaaactttacaatctaaa

SEQ ID NO: 239687 - DNA, 947 bp, Cannabis indica
agagagagagggggtaatttaggaatatagcaattattgacctatcttaccaatattaagtatttacgatttaggggagaaatttccgcttaatgtaaacataagaaatcaaaatttcctattaaaaatatgtttgaaaagttaaataattaaaatattgaaaattttacatagaatactcattaaaaaaaagatatattattacatttgtactataacacaaatttttttacattattataatttattttactcttttgttactatacctaacaacattttttttttttgtttgatattagtcgtttatttctcttttgatttatgtgcatatatatttttattagtttaaatttgataatttttttttttttatgtgtgttgctttgtagatataaatacatgtatttagttatttttttgaacattttttttttaaaaaataagtacaatgataacttttttcattttttctaaatgacataatgtgcactagtaaatattgacgtatattaaaattatacatttatctagttagtttttttaattatatattacccattatattaaatgccccatactgagataatgagattataagagtttattatttctattattaatgtgtctattcatttaatttataaaaaataaattatcattttaactgtcattaactcaaaacaagagagaaaaaaagagctgaaagtatgcagttgtaataaataaatttcataaaaaaataacgtagtattacaaagatattcaagttgttaaaactagtaaaaaaataaagaacttatctcgtaatacaaaaataagctgaagagttgatattattttgtatattggaacgaagtcgatgtcttgtaatttttttgttgcttttatagttgtctttttgttattttatagttattttcatgttgttgtttatgtgttttata

SEQ ID NO: 239688 - DNA, 764 bp, Cannabis indica
agcttttaaaattgtagagtaatataaattattgaatttaataacaatttcgtttcattttaatttcatagctcacatatgagaaatatcatatgagctacaaaattacaagatttttacatatcacactttttttctatcttaatatcaaaagtacctttcttaatttaataagattattttttgtgttatatgtaaattttttacttataaactcgagaccatcctcttataaaattgacacgtgggctcacattcctagagaattgctgagttgtcaagaaggagcttctcgagaataagcttcccctgaactgaactcgcgagatgatgtaaccatgacagagtctagttgcattattaaacttcgcgtaatataaaaataagtaggactaagaaggatttataaaagttgtgcatatcctgagatatatgcgatgactaagtagccttctcctgcgaccaagtaaagatcgcttctttacataatgagttcatccgaatgacaaagcgtattcgataacccgatagggctcgcatgtcctatgttgtcgacatgtatgaggtgtctatatatgcgattcagtcagaacacaaacaccttaacacaaggcttaatagtcctctttagaatgataaaacacacccaaagcctgcaagcttgtgtgggaatatgaatagacaactcgcaccttagaggttgcatacgctgctatacttattgaaacagatttaaactatccttcatttattcttttacgttt

SEQ ID NO: 239689 - DNA, 779 bp, Cannabis indica
atatatattagttgataaatttagaaaatatttcaaaattttatcatttttaaaatttaaaataactatgaaatatttattttgtgatagaaaattatgaaatatttatgcatatgagtttaaaagaaactaacaaaaaaaaaactttatatatatatatatatatgtatattttaaaattatataacaacaaattaattaggatattgattatactccatattttataaaattgaaataaaagattagttagagatattattatattttaatatagattttataaataattatgtttaataaattatttatttttttttacaaatattaataattagatccacgattacttatggaattataaataattatgtttaatagttaggaatatttttatagtgattatttatgtatatattcagtgattttagtttactatacttgaaagggctatttaattaatttaaaaaatgatttatttattataaaagtaaataattactatttttctaattcaaaatagattttttcgaacaacattatataactctttattccttctcttaacaatgtttaaggtgacgattcgaagaccatagaggcatagacctataattctaagctccaataaaatatataatttattgagtcccttcaagtaatttttttttttcatgattactccactattaatatagaattgaattcatagtaatatataaaattatatttactgagtttaactctagtgtccgttgatataattaattccagtgatt

SEQ ID NO: 239690 - DNA, 1270 bp, Cannabis indica
atatcaccaattatttttaaaagcagtttctaaccaaatttaaagtacttatgtccggtagctgaaagaaatgtttttttttattaaataatgcaattttattaatatagtaatcgattaaaataataatttgtactttaattggaacgatttagaaaaatgagttaaatagacaacggcttaattctcaaatcgtttaaataaaaataaaaattaaaaccaaattaaaaagattccaatatccgcagtataataaatctcaaaatacttatatttaattttatttacgttcaaaatactaatattattcagattgaagtagcaccaattatatgtatgtgtggtcatgtgttcgtatttatacaataattatatattgttataaaccaaaaatgatacatgttatatgaatatcatataactttttactaattattgtatatttttattttttaataatgctcatcatttatatatgtactaaaatttgaatatcatttatatctatatactaaaccatcccttcaattgtataaattttaaatttaaattattattactacatcaatataataaacgcatatgtatgataatattaaaatttatgtaattatatagaaaaaaaaacaagtgaaaccatatttttattatctcattgccatacaaacacacaaaattataaccaaacaacaacttaacacagttcaaacttgactagaaaatactaaattaatcacacaaaattaaacatttgaaataatgaaagaaaagaaaccataactaataataatttgattaatcaaaaaaaaactttcatggttgaggaaaagatccgaagaaatcaccattggatccagtattaccgaaacccgggaatgtgccaaaagtaccactgtccccaccaccaaagctaggcaggcctccaattgaaccgccaaacacaccgggtagaccaccgctggccgggatgctgccgtcgccattcccggtggagccagcaaaaataccaaaggttttttggtcattaaaaccggccgcgctagcctgattatctgccactactacttgatcatgatcagtagtagtaggcaaagttctagccgtagttgttcccatttgaacaattacaaataatgaagaaatcaccgttagggttacaaacaactttgccataatttaaattttttttcacttgatatatatacttagcaaagttaattataatatgtattattttgtaatataaaatattgcttgaagtgattcaaat

SEQ ID NO: 239691 - DNA, 1054 bp, Cannabis indica
tattagagttagtctcacattattaatatatgaaaataaattgtgatataaaagatgaatgagctacttctcctaatttcaattgattttgagatggaatctcatttatcttattcttaaattcttttagtatattaatagttgtaattataatattattcaacacctcatcaacatgataatattttcgtgagggaaattttctttctatttatgattttattatgtaattttcttatattatgttatgattataaaatatatttattatttgaacatgtgttacatttcatatcaaatactctacagtcattctattttacttttattttatgtgctttattcatatttataaatatatgatccaataattaattttattatgtaattttattgtcagctcatttatatttattttatcatatgatatagtcttctttttatcatagtaaatcttactaaacttgaatttgttactcttgacatttatagaaaaaattatttggaatagtttcttgatacataaattcatcttgccgccatgaatcttggagatacaattaaagagaataaccaagccccttgcaagatcgagcaaaggtgatgatatttattcatcgtcacatcgatgaaggattgaaatctaaatatctcatagtgattgatccacatattttatggaacaatttaaatgaaagatatgacccccaaaaggaagtaatacttccaatggctaaaaatgagtcttcccttaagtttttttactggcatagctggggcaaaacttgtctttgagcacctcactaggtaggctaatttttttatggattagaaaaggatgattggggatttctcaatcacgggaatatttctgagctaatggacagaagcgagaacctcatgtacatggtaagcatcttttactcctttccttttacgtaatccttgagaagttctaaccttttgtctttttcttcgaaattcaggcttctcgaatggcttacaagagctttaatttgcatacacaacagtcttctcgcatcaatcgtctctt

SEQ ID NO: 239692 - DNA, 1672 bp, Cannabis indica
gtatatataatacaccacgatataaatattacatttcaagggtaattttatctggctcgtgatcagaattctacaactagctcatgatttggcaaaatatttcattcagttaaataatgagctattctgattcgaggaggttccaccggccgccgtttataaattactactttgttaattttgtttgactctattcaccaaatcaaaaaaaaaattacattttttattatctcttttttcgctcattaatataattaattatttatttacagtatatttatacattttaattgaaattttttatacattttacaattaaaaaatgttttgttagttttttaaattaattttaaagctaatggattagtcaaattttaagctttccaatatagcatattatgagtacaaattttaacataaatttacatcatttattagagatcgtgtaaaccaaccgacacttgatatatgtacttattaattattatgtgtattatatataatctattttacatatattaattatgtagtgtattaatgattaaaatttacaaatatatttagagcaatgatatattagctactcacataatttttattactctaaatttatattaaaaaaattaatttattttgaaatataacatattaataatcataacatactaaaaaatatataatatttaaatgatattgaaaaaaaaaactagaagaaaatggtgtaacataaaaagcttagtttattaaatacataaaaaagaaaaaaaaaattgtaatttaatttgaattatttatagagaagaggaatgctctagtaagtagtaaccaagagttagtgttaagaaatgagttgttggataatttatatatacgttggccacacaagacaaaagtttgttctacatcaacctacaaagcacgtacaaaccatgcagttaacttgtacacatatatataggtcttttcctttctagtaaagtcaaaagatatttaatgaattgtaaaaaagtcatcaagtgatgatcttggtagtaatggtaagcttcacttgattctaataaatactatatttatgaatcatatatacatgcatgagttgtaatattgttaaaattaaaagaaaataaaatgagtgattgagcaaagccaactaaaaggtcaaacaagtttacatagttgcacagagtttgtcatatatccaacattattattattgtcatatatcaaatttcttgttcagtcattattcctaacaatggatacaatatagctatcccctatatttatagtctataaatatatacatatagtctctctctcaataatatttttatgtttctgtaacagtagtgttgtatatttcacaatgctactacaatattactctatttccgtccaaatattaaatttaccatcggtttctaaaactgatgcatatgtgatacaggcgagaccgccataaaattgggaccatatatatgtgtcagtttagaatgtcgatcgacggaaacaagtgattgcatcggtcagtcccaatttaaaattaattgacaatgaatggagttgctcatattcttatatatggcttaattttctaccatttactctatgtgggacaaccaatcttgaaccgtatcagatgcctgtaaggtgttagaattaatattgtgga

SEQ ID NO: 239693 - DNA, 1188 bp, Cannabis indica
ttatcacattttaatctactttattattatattaataaaataatataacaatatatatatatatataacactggaattgtaaccaaaaaaaaagaaaattaatagcctttttaatctggtacttctactttttaatttaacaggggaattacttcatcttcatcctagtaaatccgaacttagaaaataaaaatagtaggattataaagaaatacataaaaattataaaaaaatatagttgtatagaattttaaatatttttatggtttttaaaattttatttacaaaaaatatgatcatttactattttatgttttactcttgttattttgttgttggttttttgttgttgtatataaacttttatgttttttcgatgttttctcaatacttttcatgtatctagtttgcttattatttttatttatagaaagaatattgaaaaaaaaaacataaaagtataatttttttatcaaaaaataatattttgtataaatttcgtaaaatagtaatttatcggaaacaaaacgatgcatgcatcttaataaagtagtaaattttgacatatatatgaccctatcaaaattgagcattgttataagataatagtagtgtttgttacgttctagacgtatcgttttgtaattggtcagcgatattcacaaaaaaattattatattaattaaattatatagtaccacatatttaattacaccaataacaatactaacacataaaaaaaatactaaacatcaatagtgcctttaccgttcatcaaattgaataatattattgttataccttttcaaaggtcattgcatcatttcatttgcactcacatcaaaattgatctacatccaatgagctaccagttgaggagttttagctcaattcttaaagcactcatttacgtacttttttattctatttttttaaaataatttattataatcttattttttttctatcttacctaataaatttatagggatttgattttgttatgttattgtactttcacggattgtaatccgtaatgtacggcagccatcagatgagggagttatttgatctgacggcggagatttatctaggggtaattagggttaaaaagtagaaacgtatcctgacactcatttaatgtacccagagacccatctaatatactacggaatacattccgtgaaa

SEQ ID NO: 239694 - DNA, 804 bp, Cannabis indica
atggagtatcgctagccaatcgcaacgcgacatgtcgaaaaggtgacaggcaccatacctaatagcaatactgatttcattaaaagttctcactttaaaaggatattccagctcagagttatatattaatatataccgctaaaactaaaaccaattaccatgtccattaacagtgctatatgtgataaggttaaggtactcacgtagctttatattaatttagggtaagctttacaacttatatttttataaattatttatatataatctggtttgcttgatattgtaattatggcagagaggtttattgtagccagacaaaaagagtattgtgtatttatatattatatttatgaaggttggactatcaatttcgacttaaaagctttgtggacaaagagagagttaaaatagataataactctgtggtgatcagtttataatggaacattatcaatggtacataaattgttggcagtcagatatattactcaatttggtccccaaacatcaataacaaatccatttctaaattatttcgtttcctttgctttccagttcaattatttatttactttctttgtcaatgttttcagttaaattcccagctgataattaaggggttattgcattgctcacctagttcataattaaggggttatacataatagatttatgttttttggaaatggatgtgtaagtttgtaaaaaggtttgggcaaaattttaattggagaaaacataaaaaacatcgtgaacaacagttaaaattaaacacagtacataatataaaacttacacagt

SEQ ID NO: 239695 - DNA, 1049 bp, Cannabis indica
ttaaaaaattatttaataaaaaagagaaattattgcagggtgattattataaaaacagagaaaaattgtgttttacacatgatgaattaatatctgtaattaattatatatatatgtaggtggagacagcactggctcttggggcgacaccgcggcaagcgacggttcagcaggtaaagagggcccttgtgatatctctgtcgccagtaatagacaacacgaagacagtggggcttatctcgcttcctggggcaatgactgggcttattatgggaggagcctctccattagaggctattcaacttcagattatagtcatgaactttatgattggtgcttgtaccgttagtagtgttttgtctacctatctatgttggccttctttcttcaccaaagcctatcagttacaaaccaaagtttttgtgccaccataataattattgccatccctaaatctaatcgatcatcaattaaatcaagcttattaattactattattagtatcattatggtattaaattcaagtaattaaggatataaagaacaagataaatatatatatatatatatagtaacatgcaattgaattgagtatagagaaatgtgctagtatatatttataaataacgattgatccatatccatacccaaagtatatacaattttatttattaattaatctcacgtctttggtaaaaattgtgtaatttatgtctcctaacactactctttatatatacatatacttgcttaaaaaaaatcattcgtattctttttccaccctcttggtcatattggcaatcttggagaccacttcttagctataggagcatgatatcttatcttaccttgattggataattggtagtcccttaagtattctcattacacagatgacaccacccacaactaagctagccttcagaatagccaagcctttaatccctttcgagaggggttgtggtgatcttcaaacccttgacccaaacaagaaagaatgtcataaagacaattcctacaactacactatataacatggtctatatatt

SEQ ID NO: 239696 - DNA, 2787 bp, Cannabis indica
gtatagtacttttggcagttcctatatcttcaatcgtcaaaaaaattatttttttttctcaaaaaaaaaaacagaattatttttttattttgtacaattttaaattgtttactttattatttgaacaataattcttagtttatttttgggttagattatcaaaatttcttaaatattaatatattgtatttagtatttacttttaatttataacacaattatttatattaattgaatattgtaaaagtaatctcaaataataattaataataaattttttttttcaattatttattgtatcaattttaaataaattaaaaaacacctagcataaaattaaatgtacatcccgcccacttaagtttcttctagtctattatatgcaagttatgtatatatttacacttcaatcatacttaaaaatcaatgaaataaataaataaacaataaaatggtgcaaaaaattattttattcagaatttttataatcccattataaactatgatcattctattattatcgatgccaaaaatcccctaaagaagctactccatgtggcattataaaacatgcatataacattattaattaacccaatacttaattgcatttctcaggtattaattgtgcctttatttaacgttttctaattagtttttatggtgtgttacaggcctttaccgctatcgcgttggagatatactaagagtatcaggattcaaaaacaaggcaccgcaattcaacttcgtacgaagaaagaatgtagttttgagcattgattctgataaaacggacgaagtagaactccaaaacgcggtgaagaaggcgaccaccaagcatcttaactcatatggtgcctctcttgttgaatacacaagttttgctgacacgtcagccatcccagggcactatgtcctatactgggagattacccaaaatgagaagactccaattcctaagtcggtttttgaggattgttgccttacagttgaagagtcacttaacagcgtgtatcgccaaggccgagtttcggacaagtctattggagcacttgagattaagatagttgaaaatggaacatttgacaagctgatggactatgcaattagccagggtgcctccataaaccagtacaaggccccacggtgcgtgaaaaacgcctccattgtggagcttctcgattccaaggtggtttctaattacttcagtccaaaatgccccaattgggaacctggttataagcaagggggcactacggccactactactcatgatgcttaaaaagattattttaaatctcttcttttctctctcactctcaaccaataatatatatatattattgtgcaggactatatgaagctctatatggaagtgtgaactagaatttgtattagcctgttttggtgtttccttgtgatatttaattaacttgtgttatttgtttaatattttgcttacccgaaagcattagtactatctcaagaaaattgactgttttttttatttctgtgaaatttgtcagtatatgtgttaaaagagagtaataattatttgtatacaaatatatatgctatatctacgcagacattatcccccaaataaataatagttagcgtttatattttattaacaaataagaagacaattaattaataatagggtgtttatagtcctttgactggttttggcaagtgcctaatgaaatttatcattcatttaaaaaaaaaaaaaaaaataatatatatagataaaagagaacatcaaatcactacatatttgtgattagtactacttaaacactaattaattaatctgttttaaagttgaaatattcccttaatcaatgtaaacatgcacgaaattctcatattaattaaattattgttatatatcaagtagtttttaatatgtaaaattgtttgcaaaatcaacagtagttgcattattgaaagtacacatttgaagtcaaccaacactttccataggatgtgttggggacttatatatgtaattatgcttttactggagtgaaaaagtaaatctataaataatgttgatttatagatatgtttatgtatggtgatgatagatgactgatgagaacgtaaagttcttaacagtaaacaggatggggacggggtcatttgtcgggggacacaaagcgggagacatttaaattcaatgtgttatacaataacaatgtatcctgccattttcaaaaaaaaaaaataaaaaataaaaaaaaaaaatattgtgtcggtttgtactatactacttaatgtaagggatttttttgcattaaagtctatttttatataacataaataattaatataaaaaaaaagtatatttaaaattaaaaaataattaaagtttacatataagaaaaaaaaataataaataaatttaataaaacttgtaattaagttttgtcagaaaaatcaccggaaaaataagggaaccaaaaagttattgttttcggaaaagtcaccatcgctggaaaagtcactgaaaaaaattactgaaaatagatgtctcaaatataaccaattctataacataataaataaaaacaaataactcaaaccggttatattgacatataactaattttgtaacataatgaatgaaaacaaataacataaaataattcaaaccagttataattaaaatagaattggttctataacagtgttataatataaataatacgaaattataactcaatccggttataactaaatataactggatacataacataataaatacaaacaagtaac

SEQ ID NO: 239697 - DNA, 772 bp, Cannabis indica
atgtctaatttgtttattaataaaaatatccatttaccttaaaaaaaaaaagatctccatcggttgtatatctcaaaaaagtttcccttattgaggcacaagagatacgttaaacaaacaatatgtatttttagtgtggaaagctgaagtgatcagatgcgaacaaagaaatgtaactatattaatttatatattggtatatacatatgtaatgtgtccgtctactgggttcgttgcgtcaaactttggaaacatttaaagcaatgaaaagccagatatacaccttgcttgaagcattgagcagacaaaattaagcttgaaacttcttactgttcatataaagcttatttaattttgcacgcttcatttactatatgactcacgattagagaaattcacacggagagttttccgcgggccccattattgagtacttttaggaaattaaataaacaattagtttgaattaatttcaagcaataacattttttttgtacatgaccccaacaagttcacacaaaaacacactcagactcttttaaagagtaatttatatttttttttaagttaaatgacatgtaatatttaattaccccaataatattataatgatacattttaataattctttttaaataatcttcaattattatcacacatttcatattataattttagggacacgattttgtcccgtgatgtacttttatggaatgtatttcgtgatgtacgccagccgttagatgggaggagttattttatatgagggctg

SEQ ID NO: 239698 - DNA, 2377 bp, Cannabis indica
gtttggttaattaccacataaaacaaaatgtccataatgaaagagaagtaatagtttgcttccatcttctacttatattattattaaaaaatatatgtgcatggttttgataaagatattttcaaagaaggtttaagcaccgctaataatttggagatcacaaattcaaaacaagtaaaagaaaaaaagaagagaaataaacattcacaaagtgacatctctttattctactacccgtcgacacaacaataacaatgtgggtttttgagaagtgaaataagagacaagtgagatacaactaagaccaaaataacttatctgaaagaatttcatggcacgacaagaccaatgtgggtttttgagaagtcactacacaaaattgttactttttgtgacaactttttagtcataacataatttttttatgactaaatgtgacttttagtcagaacaaaatgttccttattgtgactaaaacatagtatttagatacaagttgtactaatttagttttagtcactataagtattgtcattaaaaatacatttagtcacaataaattataatttttgtgactaatatttttagctacggaccttttagtcacaacataagaatgataattttataattttacaactttttcacttttagtcacaagttttattgtgactaaaagtaagaatttttgtagtgagtgttgggattagaataaatattcgtgcaacataaatggattcaaagcacaacctaaacgaaaggatactacaatcaacttatgatttactttatggacaataatataagtgttaggctatttttagtctaggtttcgggtttatatttagagttgtttttagtcatttttaatacttttaggacgaaattatacttgttttctgtattttcaagttccggtagtttttacaagtttagtacatcaatatttgataaagaatcgaggcgagacaaattaaattgaaatctatttttcatgaaatctcgtcgcgacgaccacgacttatggccgcgatgagaccactacagaataggtttttcgtgttttgttcagtggtcgctgcgagaaagaatgtgcaccagctagacactctcgtcgcgacgaggggacttatggctgcggcaagacaataggcagaggcaaggttttttgagttattgaactcgccgcggtgaggccattcttggccgcagcgaggtagtccatacaaatcgagggcagtttcgtatttttgtgatattttgagtttaaactgattctatttaaaaggacttcgagttagaaagtgggggacttaaaaattgaaccctagaagcagaaaatgacgacggctagagcgagaatggcaacccggatccattgcacaatcaatttctttcctctccttttatttcttttatgttgatttatgtttttagtttcattatggatgtgaacgtgaattatgaactaaatttctaatttagagatatgatgaatgttagttgatgttttcccaatttagttaatgtgattattcatttttcttctctggattgttgtgatttgtactcttatttgctttaatacatgttttagactagcaatcttgaatgtgatctatgatcttaatataaaatctaagaagtgaatagtaagaatgctttcatagaataaacataggtttggatgtaaaacgagagtatttatataacatgtgtgacatttagattatgtattcaatgcaaattatatattaatttatttcaaagatgtaaatagataatatatgatttaggaccttaatgatctgagaagagttagtgttatttttataatctgtcatcacttaaagggaaaatattgatattttacattaacaattggataattgaaataacaggatttatattcctaatccttcattcatagtcgattacatttaaacattgtttcttttattttcttttaattttctattaattattttttcaactttgttttagattcaatcaaatagaaacacaaatctaattaagtagtactcaatatcaattctctatgaatctacattacttgtgtgagtatttaactacaataaatacgtacacttgcgtagattataattctgagtaacaataagtatgttgaagtgtcgtcttaaaaaataattaagaaaaaaaatccacaaaatatgttaattttggtcaaaagaggtggggcttgacaatagaatgataataaatctgtcaaaagataaagtcgtaagaactatgaattttgacaaatatattggaagttttcttaacctagaggagcactaacagagattcttgaaagcactcacctgagttggaattagacaaaaaccaatatctt

SEQ ID NO: 239699 - DNA, 2039 bp, Cannabis indica
aaactaacagaaataataaaagaaacattgccaaaaaaagaatctgataaaggcttaaactaagaaaaaaataaagagaaagaggtcattactcgctaggagaagacattttggaaggatgaagctgattcgaaccctaaacgcccaaaattgagatttcctttctaccgtctaagagagagatgcggctgtgaggctgaagagaatcgcacgagagagagggctgaggtgagtattttgcgttttttagttttagggatttcactttttgttgcttcggttattaagtctcgctgttgtattttgcgtcatttttaaaagctcactaatacaatactggactattaataaatgatgcaaaatgaaacgaaaatttttaaattttctgctttttctcgttggtttagtttttagcatcatgcacctaaaagacgcaaatagcatattattagtgtcatttttaaagagacgccctaattatttaagtactattcacgtctgtcaaccctatgaatagtagcgttgactgacgtgaatagtgtaatttgtagtagtgcttcagaagtgctacttcaacaagttaaacaacaccagtgtcaagataaaaagctaagacatatttggtccgaatccatgatggtaagaaattttatgggtggacaattaatgttgaaggtcacttataccatcaaggaatatcagtttaatagacatctttgatcttagggagtccatttttattgaggcacatagatccaagtttgatttacatcccggaagcacaaatttgtaccaaggcttgaagagacaatattgatgggaagatatggagagagatttgactagctttgtagctaagtgtttattttgttataaagttaaggttgagcatcaaagacctttaagtttacttcaacctttgcctataccaaaattaaagtgggacaagattacaataggctttgttactgggtttccattcacacccttgaagcatgacaccgtttgggtgattgttgatcgtttgattaagtctgctcattttattccaatcagaaaggattacaagcttatcagactagatcgacattatgtggaaaatatagttcgagtacacggagttcttttaggcattacttttaattgagatcctcaatttactttaagttttaggaagttgtgcaacaagccttgggaattgagctttacttggataccgcccatcatccacagagggatggacagtctaagaggaccatacaaactttggaagacatgcttcgctcttgtattttaaatttttgaggtagcttgagagaacacttgatattggtggaattcacatatcataatagctacaaagcaagtatgggcacgactccttacaaggcctctattggagaccatgaggatcgccactgtgtcggactgaactagatgagcatgtcagtattggaccctagattattactagtaccactgagtagattaaggaatccaatagagacttaaggttgttcagagtcgttagaaaatttatgccaatctccatcgacaagaagttgagtttgatgttggtgatgatgtcttcttgaaagttaatcctatgcttgttgtaacgagattcaaagttaagggtaagctatccaaaagctatgttggacattttgaggttatcgagagagttggggaggtcccttatcgattaaacttacacagttagagcatgatcataatgtgttacatgtgtcaatgttgatgaagtatacttcaaatttgttgcatgtgattgagtatgaggttattcctattcgagaagatgtaatctatgcagaacaaactgtcaaaatcttatcaataaagctaaaagtgttaaggaacagagaaattcaagtagtcaaggtcttatggcagacaaagaagatgaggttgttgaggagttagagttagagatgtatatgaaaaatcttcgtttgtttaatttttaacttgaggttgtactttgaaattccaagaggaaatttctttaaaaagggaag

SEQ ID NO: 239700 - DNA, 2065 bp, Cannabis indica
tactttattttatttttgtatgctatttgatgagagtagccgctaaggctacactcagcggcggaaccaggaatacaatacaaggggattttaataggaatatatatgacatgtgcataaaatttctattttgtgttacatttgcttagcttttgttattatgttaaattgagcttgtgtgttaaaaaggctacctcttttagatgtaatgagaagagctctcttaattccatatactaataagtagtctactccttttatattagtataccttgccaatagaggatggctacatctccgaaagaaagtgaaaattgtgactaaatacaatagaaaaagccagaatgatatgaaataaaaaagactaaagtttgttcatatacataaaaaaattcttctgagggaatgatctgaattgtcattctaatcttggaccataagagcatactttgcacacaattatatgaagataatgactcaattaagtaaaatgggtgtcttcattgtagtaaattgtgcacttattttcaaggaaattttgtccatgtcatccatattctatatttttctaagtgttttgattcaacttatttgatcagatgttaactctcttattctcactgataggtttcgagcatctctaagcttgcattctttcaatctctattggtaaggtctaggatatttttgttctcaagtaagcatattttcatttattgatttactatgatcatattaactcatgtcaataaattttatttttttgtgctgtttcttgaggttaaaaatagtttctatagatttgtactactcatttaagcaaagtttttttaaataacatttttttttacatggtcaacgtttgtcaaggtacatatcttttaaaagccaagggacagtgaatttgtttccacttctctaccaagaaaccctaaaccctgatgagttcaaagtacctcatctcttccaagttgtatatgtctcaatctatcatggagaatgttcttcccatgttgtcttctatagctgtcttgattcctccaccttatgagccccctgttgccctagaagtctcacctggaacctatgaggagtgtatttgtgagccttctccatgtctggccaggtatcatataagttgttcgtcgtcccatcaatgtcggcatctccttcgtcacctatagtcaatcaaaaactacgaatatttcaaggtaaggctcctcatctctctaaaaaagtttggtaaggttcaatttctgtctctaagtcatcgccaaaacgtgtcaaccgttcttctaaaacgtttggtgtcgcctgtgtttgatgttgaaccactcagtctagaacgtcagtctccttagatatctagttcataaatccaatcctataaattttaaaaagaaagctctgcctaaaacccctgtgtccacggttgagcgatcttctattcaatgctttgtagatgccttgaaagtatctagttatcaatgttggtttggcagtcgtgacctatggtttgaacaaataattgctttagaggattttcctgagttccatgcttttttaaagattaagaattagttcacactgtctttaattggtctgcactgcatcccattttgattcgtgaattttatgcaaacttagatagatttgtgttagataaagggcattcaggttgtgttagtacatttgtcaagggttctcgtattctttttggtccctctaccattgcacacatattaaaagttaattcaatcaaaaatctaacctataggaagaaatttaattcaaatcaaactgtaataggtagagtactaactggactgaatgattatctttgagaaaagtaagagattttggccactcatttaaccccattctatagggttcttcatcagattgtattgtacaattggttcattaactcttatttgtcctaagtactcttgacatattgggaaatttatctatgatgtgggaactcatgttaccattgatctgcctctcttatatttgacaaaattatggaagcctcagaaaacactggtacaaggaacaagct

SEQ ID NO: 239701 - DNA, 1622 bp, Cannabis indica
cggtggagtggttgatggtgtactagatgcccccaggtctgaggttgaagacttgatccttttcgcacttgggctcgaagaagtctttggtgccttgcgcttagattttatggaagtttcttttgggggaaagacgagtccatctaggctatcattagaaccccctacgtttggtgtagtatcagggatcattccattcgtaggtgggacattctttaaggattattcttccatagcgacaagcacttcggaagcctcttgggaggtggcagagtctctctctccaccagccagagctgaagagcgtggaattacagatccaacttaataggaggtgtgatctcccaaacattagatgacgaaaaagtagagggaggatgcagcttctgggtcctggaagccctagtcttggtcttccccttgcctctttcttgggagctcccagctttgcccagagcagctgagatctggttgcttagagattttaacatctcaggccctagagtatctgcacacgtagcaacaatatgagcgaataaaaaagaaaattacagatcattccaatacaagaaaaaatagcaacaacaaaaagaggaatctggtaaagaaacttgtgcgttggtgcaacctaccaatgaggtgctatagggttacccacgaccaaaggaaaatatgcccctatgaccaaggaagctaccatactccttaaaatttggcagagacatagccatcaaagggtccaatttaatagtgtctgaaggtgttcctagatttctagggctcctaacgatttagtctactttgtctatgtaatccttgatggggtatctatgacaatttatgcctaagaaatatttgccaaattacctcttctcgaagtattggctcccggagtccccacattaagatacgtgacgacaaacctctctaaaatctctttttcctcaaatagaggatcgggatggcgcaacatccaatcaaagttcagggtattgtcaattttggctgctttggtaattataacgaccaagttagtggcaagagcctcctttacttccctgggggttggcgttgtcctcagaggcggagcatgtcaatgctctggaattttgtaatcaagccagatctacggaaaagttaggtcatcattaagtccccaacttttagttgttcctcagagaaggccctgtatattgagcttctttcttgactatctcctcagttctagtgctctagggggaagctctactgcaaattaggcacgttagtgggactataaaaacataacaaaatcagaaatagatgaaattcaagccaaataattagaatacctggaaaataaaagcttagacgaagagacgacaccctattggtaggaaatctggaagaaaagaaccaatactctcggaggtcatgagtgcgatctgtatggcagacagagcagtaataattcgagcgattatccaatctaaagaaccctacctttttcctgtccgtcctcatggagttagcgtttatgctgtagaagtaaaggatttcctccgaagaagggacctctagcttgtttatcttgcaaaatacgtaccacccaaccaaaagcctatatgacgaagggattaact

SEQ ID NO: 239702 - DNA, 1631 bp, Cannabis indica
gattcgtatctattttctagtaatgctacttaataaataatattataattggtgtaatttatatcgtattatttttttaagttaaagaagttacttagggatataaaatggatcattctccattgctataaggaatttatggtgcttaacactcttgtgacatgtatcgctattggtgtagctcaatatcgggtcctacttattttattttaataaatattataaaaaaaactaattaattataagactagggtcgatcctaaaatttagtaagccataaaaaaaatatttttggactctttatttaagtaaaatgtgatattttttaaattcaacaaaaaataatgcgtaattttaaaagggtgattttttttttctaggtgagttctaagcacatgcctagtgtcaaaaactatgagatagtattttactattagtttagtaatttatttttatttttataatagctattaaattaaaatatatgtaacattttatattattatgccaaataaccttttaatattctcgaatgagcaacgatctctatagagatatttaaaaatgtatattaatcaatgttttttttctttgtaatttttcttttgtttggatagatttcaattaagaaaaattacggcataaatttcaaaaaaactcatcccaaaatccttgaaaaccaactaagtaaaatatatatataattttaaatatcaatttgtgatatttttgggaacaacaaattgaaaagataaattcagtacttatggactaataggaattttgaatttggggactattatgatagttttttgagcttggagactttatatgcaccaaattgattttttaaaaaaatttatgtcgcaatttaatattaacacgtgcatggtatttttggaagtaagtaatggatctgttaaaatgaggatcgacgaacttataaaaatcttaagcttagagactattactctaattttttgaaagttaggactattaccaattaaaataaattaattttaaagactatttattttgaatatttaacaatcaaaaaaatatattttccaaaatagaaatttgaaacagacactttaagataaaaaatatcattatcattgtaaagaaatgattacttgtttctttgtatatatatatgtagctagaaaataaaagcaaaacaatacaaaaaacttcaataatgaaacttgtgaagaattgaccatcaattatatacattattagtacacgacgaaaaaacagaaattataaaagataaaaaatacaaagttttgatcataaaatccaaaagaaaatacattggtatagtcatattttttaaaaaaattaatatgaccaaaaataggatttaaacaatttattgtacacgtgtaaaatagactacttaaaccctattttcaacgtaattaaaattttcttaaatttttacaaaatttacaagatatcttaaataacaatgtagacgaccatagtaaaaaatttaacttaaatttttgtacctaaatgtacgaaacaaatagagagtgcatcggtagagggtcggtactgaggtgagatgaagaaaacggctgctttaggcccttgtcactcagggcgcccatttcgaaaaa

SEQ ID NO: 239703 - DNA, 1612 bp, Cannabis indica
gttcatctggcagagaagtcttaaaacatgataatcttgatggtttgaccttaacaacattcttttcaagatttaaatttccaatttgattggctaagtactccaacctcataagaatatcttccatattggcattccttacacgatcagttgaatttgaaggattagagaaacaacaaaataactttcttgcctttcctctagctttccttgactcatcagaattgttcggtttcatagcatcgtattcaatatcgccaaagaagtcctcagcatcatcgacagcatcgagaagatcatccagccacttctccacagcagggttttcgattctcttgttctccacttcaaactgaacagcagcaagagtattgaaggttgacttcaacttgaaaagcctctctttctcaacataaggagaagctatcttctcaagcaaaaagtcaaaattagcagagagaaaagcaccaatcacaatttcaagagccatcagtagcaagctcagttgcacagccaaagattcagaaaaggtaaagagcagaagacggaagcaaacttacaaatttgaaacattggatgactcaaattacaaaattgatatgatattaattcattagtatctatattacaacttcaattgtatataatctatgctatgattatataatataatgctgtttatgtcattgtatgtgtgtaataattggccggctgcttaaaaaaaccaaacatttcttagtaataatcaaaatgagtaacactacactactaagttaaagtacaatctaacacaatgtcaaatacttcacttagaaaatcaatgagcatatatagcaaaatgaaccgaattgtaaaataatattcgaagaacactaagttcaaatacatactaattgcaaactcttctgacaatgcttgcaactcatggcagttccaaagcatacttgttgagttgttatttgtttatggaaatttggttgatttcttttttgattaattaggataaatattactttttgatccaagggttacttatgtatgtatgtatgtgtttgaagttttgtttcatcgtttggtttgtggtctttcactgttcattgaaatgagaatgatgagaatcaagatcacactaactaaataatgaaaattaactctattgatttgagtcagcataaaattagtactatacaattcgagatttaagtctcaattatgcagtaatggtgatcaacaccaaaattacattaatcggaactgcatgatgatgaaacacacatgcgtttggaaaaatttagggagtagacttaaacatttcttaaccataataagcctattttttaacttgagcagaagatgtgttagtttcaaattcacattattaaccaataaaatctgttgtaattcagttttgttagttttctgttattttaactgttttgcaccttccttgtatttcttttgcatataaataaatgggaaatttgaatttctatgcttaaattaaagaataattttttccctaaacttaaaatggggaatattggtaaaatgggataacattttcttaattcccacaatacccccccactttgaaaccatcagccctctctct

SEQ ID NO: 239704 - DNA, 1845 bp, Cannabis indica
taaaaatgaactttacagaacacattttattttctatttttaaaattaaaaaataaaagtggttgcagaacgcgtttttgttttttaaaaataaattttttaaaagtaaaaattttactttcattttgtgattaaaaaattaaaaaacaaaatggtaccaaacggcactttcagtgtctagatttttcaaattatatatgttcaatttttacttctttatggagtccatgtgtagtagttgctttgtgccagtatggtaactgaaatgtgccatgtatgatagctgataagtgtcatgtttagtaattgattgtgccatatataatatagtagttagttctatcataattttagggtcgtcaccaaatggatctctcttttctttggttaaatagtttttattttcatatttaattagttttatagatggttaaatagagtatattaccctgtaattatttgtaatatatttttatttatttaaagggacaataatttaagttggtgtttgtttgtggtacatgtaatcttttagcatttttagtggaagctttggctctttgcatgagattgaattgtgctttcacttttggtcttcatgaccaagttaatttttggattcattttcattggtttttgcattaaataactcttatatgtacaaacaatgagttatgagttatattttctgacattagagtattatcgtctaaacttttagggcatctcttttttatgttgtcgcaatttttaatattgtgttttatagattggattagcatgctctttagctagacaataaattttttattggagttttatgcataaataaaactcaatttttatatgatcttatttactatcaataaaaatgtgaaagcatatcttaagcttgtcatatgttttgttcacatatttatttcatgattatatatttaatatataaaaactattaaatcttgaacatagagttattcgcaattatagtgatgtcatcacagtaaaagaaaattatgattatatgatttaaacttatttagtcctgaaatttttcagtgcactgaatttacactgacatgtggtttacttacactaagataagtgaatatctttttcagggtattaacaaagtaaacttgtattgaatgtaggctatacatcaaactacaccgataatgacagtggaaaaaatatcataaacttaccgttatatattttctaagtcaatatcacttagttaattatagatcaatttatctcaatcctaagatggttaagatttaacctaattgtagcattaaagttctttgacttattcgttaccgacttccgttggactagcccatacttacatcttaggaactcggtagagtaattgagtgagagtgttaatcatagatatggacatctataacttctatgtttgtctagaattgaaacgatagtttcttttgagcttgactaaatacaataaatgatagatctcttactttggtaattatattagtttaccaaaatatcatttacaatgagctaagtattttaaagataaaatacattgaaggataaaacagtaattttgttcctactcaatgtagactgtccctagaggatcattgattatcgtgatcgaaataattgattatagtgtatatatgttggatataaaaagcgttctatgtaatcaagaatacaattctaaatcaatagtggagtcacgatgaattaataagctaaaaaattactcaaaaattttctatatttactcattgggagcttgatttcataggcctttagtccccagattatctggaatatatcctcttgatgactcaatcaattgaa

SEQ ID NO: 239705 - DNA, 1416 bp, Cannabis indica
caaaagcttttgatttggaaaattcttagtaactgtctgcctctcaagtctaacttgggatttatgcataatttggataaggaatgttacctctgcaatagtgaagtggaatcggaactacacttgtttgggacctgtagttttgctagaagtctatggtttcgcgggcagtggggattgagatctaatactttaaatgtgcatagcttcgaagactttttccaacaacttgtcctcaccaaggatgagcttctagttctgtttgcggcttgtttatttgaagtagtttggcactgcagtaatgaagccagaattgggggttgtaggcctgacccggactcggctttcaaacgaatcaccctgaggtggcaggagtttagttgtttggtgggtttggaaagcgttcctgaacctgaacaactatgtgccaccccaagtccatctggtatcttgttcatggttgatgcctcggttgttggtaatgatgcaaggcttggaattgttcaggctaatgttccttgggaggttgctcttttggcccaggctttccggactgtgctgagtgttttagaagcagaatttgaagccattctgctgtgtttggaactgtgtgctgaattgcgtttggaagtggttagtattctctcggattcctggactgcagtcaaagccttgcaagcaaagtccttaccctatgcttgggggtcttatccaagttttgctaagtgtttgtctttgttaaactgttttaatcaatggtctgttgtttatattcctcggtctgaaaactcgtttacggatcagcttgctcatcacgctcgagtaaatcgtgtttgtgtgtcgtctgtttttagggaagcagctccccttgtggctgctatctagccttagcgctttgtgaaataaaagtcttgttaatacaaaaaaaaaaaaaaaatggcgctgcttaacactaaaaacttacataaactatctcgtgggtaaaatggtcattttcaatacttttccacaaatcataatttttaaatatttataactaatcttggtacctctaaactatcaaaatatgtcgctgtgatttttctgcataaaaaatattatatgccacacatataaatcataaattttttataattaaatactaatctcatatttatctattttctaatattctaatcatatgtcttaatctctaatatcatatatattattctatattttactataataccaattaattacatttccaggtctatgctgtcattacaatattattatgaaagttctttgcatgcatattgattactatcatagtggacatttttgttcaatgagagaggatgcagtgtatgtaatggcttcatcactttgaagtattcgcagtttataatttaggtagttgttagaaaaaccgaa

SEQ ID NO: 239706 - DNA, 1807 bp, Cannabis indica
atctcttgtatatgattcgttccgtgcaaacttctgggtcgataaaactatcattgctactaatttaagcttccttcgttttaatcactctgtacatcaaaaagtaatatataccttcaatactaatggtgacttgtaaaatcctcttcgattactcaactattttaccctaaattttagtagggacattaatccttgcacgaaattttattacatttacttattattgtgtttatataatattggagactttcaatattatcttcaatcatatcttgtgtgacataaaaaattatttccgcgaagtaaggtcttcatacctacaaagtacaaattttggagactttgaagttgaagtccattggcagagaaatatagagcacacatttaaagttccaaagtgggtccaaaatgtgagcatgagagaaatgtttgccaataggagtgaggcaatctcaccttatccacactcccaccacaatcttttattacactgataatcactatcacactcccttatcaaaaatccagaaccatttctttgctaaactaataacccttttctttcttcgcctttgagaaacaagagttgattattctcatcaaagttaacaaacaatcagcaatggcagccatgaactcaagcgttttggcttgtaactatgtcatctcagggcctggaatgtctgagctcagtcccaaggccgttacagttgcatcaccagttgtggctggacagaaaatgcctgtgatcagggctcagcaagccaaggtttccgagccaaaaaggagtgatggtcgccgggctgcaatgctctacctagcagccaccctcttcaccacagctgctgctgcctcaaactcttctgccaatgctggagtcattgaggaataccttgagaagagcaaggccaacaaggtatgtttgcttttgactccgattgccattgttatctgggatttcttaggactaatttgcttctttttggggtctaggaattgaatgacaagaagagattggcaacaagtggtgcaaactttgcaagagcatacacagttcaatttggcacatgcaaattcccagagaacttcactggctgccaagatcttgccaagcaaaaggtataatatttctttacacaaaagtttcacttttcttttagctattattgtcgatttgattagatgcaatttgatttggtttttgtgggatggatgcagaaagtgccatttatctctgatgatttggctttggagtgcgaaggtaaggataaatacaagtgtggttctaatgtgttctggaaatggtgaaagatctcaactctttccttctcccctacatatttattctcctcctcgtgtatttaaatttcctatcaaaagaactttatatcttcttcttgtaatcttcttttcctttttccaacttttagattttattgtttaatgcacaaacaaaaaagttagtcctccttcctaattttgtcaccatacagcaaatttgttgaggtttatgtttggaatttagattttggtgaaggaaagaaaaatgtatgaaaattatacggagaaaaaaagtaaataaataaaaaaaaaaacttaattctcatatttggtattgtaacaaacatgattcaacactagcctccatgcaaacatgaaaatttcttttattctccacaattttttttctttacacttcctttattttttccattcctcactaaaaaccacgtgagtaatcatccacctcgaatctagattaaccataaatttttaaagcccatcttgtacaaaatagatgtct

SEQ ID NO: 239707 - DNA, 1602 bp, Cannabis indica
gggcctgatgggatgtcggggatcttctttcaaacttactgggacattgtgggttctgctttttgtaaggctgttcaggagatattttgtaaaggggtgattaattctaagcttaattataccttcatttgtctcatccctaagatccataatcctgagaagattgaacagtttcgtccaatcagtttgtgtaactttctctacaaggttgtagctaagatcattgcaaataggttacgccctattatgaatgacttagtttcgcctcttcagtcggcttttattccgggaagatggatagcagaatcttctatcctgactcaagaaattgtctataagattaggaagaagaaagagaagggtggtttaatggcggtcaagcttgatatgctcaaagcatacgatagaatggaatggtccttcattgaaagagttcttatggctaatggtttcgattctaaagtttgtcatctgattatggcttgtgtgagaagcgtgtcttattctgttctgctcaatggtagtccgataaagaaaattgttcctcagcggggtttgcgtcaaggagatccattgtccccttttttattcttactttgtcaagaggttctctcaaaacttctgttgaaagctgaatctgatgggttgtttcatggaattaaaatagcttcatcggctcctcccattaatcatctcatgtttgccgatgatactattttgttctgtagggccaatgaaggggaagctgcgactattattcaatgtttgtcaacttatgaacaatggtctgggcaaaagtgtagcatgtcaaaatccagtgttcttttctcttcaaacttgaaccatacccgtaagcaatctctgctgaattgcttaaaggttactcaagttactggagacgaattgcatctggggaaccccttcgtgttcaaaagaaggaagaaggaagattacaccaagttgatgtcgagtttgacaaagcgtttggaaggttggaaattaaaactgttatcctatgcgggcaggctcactctcatcaagtcagtggctgcttccattcccgtttataggatgtcaaccaatgagattcccctttcgatctgtagaagtttggacgcgttggtgagaaagttctggtggactgggaatgtgaacaaggacagatttatggccttcaaatcctgggatatcatttgtcaaccaaaatctcatggtggcctgggaattcgaaaatttgaagacatgaacaaggctctcttatcgaaacttgcttggtgtgttgcttccaatgcccctaaaccttgggttcaatgccttttaagcaaatactgccaatattgttcattttggaatgttgatcacaaggcaaacgaatcctatgtttggaaagaaattttaaatgcaagagagcttattcttaaaggttcagttttctatggctgcaagtggggcctctattgatttttggaaacaaccttggattccttggttaagtttgagtgattttaatgatttgatgaaaaagttaagggggaaaggttttactataagatcattggctgatttatccttggagggaagatgggatcaggaagtggtatc

SEQ ID NO: 239708 - DNA, 2743 bp, Cannabis indica
caaagggagggatgccttcatcccattcatcttatccctagtgaattctcatggtctcataaatctcccgattcaaggagataagttgacttgggacaaccataggtcgggaagtaatcatgttaagtcggctttggatagaggcattgccaataaggaatggctgttgcttttttcgaaagcggttcttcgctctttccacacaagtaactctgaccatagaccgctttgcttatattttggtggtcttgaatcttatttcaaaaaaagctttaggtttgaagagggatggacccgagataacagaagcagactggtagtatctcatgcctgggactcggtggcgttcccttcggctccggctagacttttcaaaaagttaggggctactcgggttgccctcatcaaatggaataaacttcaatatggtaaggttgactccactattaaagagctcgagactaaacttgataggttgcaaagccttccaacgggtaccagagagtggaaccttgagaaagctacaagggatgcacttaatagggcagtagaaatgaagatcttctattggaagcaaagatcccgtattgattggcttaaagatggtgacaaatgctcaaattttttcttcctcttggccactattaagggaagacgtaatgctattgaaagcatcctagataaacatggcatgtgggttcattcaagggatctgatcggaaaagaatttcttgagttctttagtgggatcttctgtaagaaccgacatggaccggtccctaattgtgattatttaatccctgaccacatttccactgaggagcaagaacaacttaccagaatcccagacagtgatgaaattagaaataccctatttagtttgggaagcaacaaggctccaggtcctgatgggatgtccgcaatttttttcaaacactattggcagatagtgggggaggacttttgtgtagcaattatggatttctttgtttcgggcctgatgcacaagggagtaaatgcgaccaatttaatttttaaaaccttaaattcgaaacctgacgaggacccatcatttcagacccatctcgctctgcaatgtgtcttataaagtcatctctaagattatagcgaatagaattaaaccgctcctccctagcattatttgtccctcccaagcaaattttgtgcctggaagggatattcaaaataacaatgtgattgtgcaggaaatcatccatacttttaatcgaaaaaaggaaaacaggggttatttgccatcaaaattgatctcacaaaggcctatgatatgcttagttggcaatttgttgattaggtcatgaggggtttcagggtccctgatactttctgtaagtgggtttaccagtgcatctcaacaacgaccctaaatgtttgtttgaatggtgggaacgtgggccatatttatccctcctgtggcattcgctaaggtgaccccttttccccctacctgttcatttgggctgctgaaattctttcaagacttgtccaagatgctttgaagaagaaaaatattaaggggatcaatctaagccaggggggcaaccctctcccacatcttttttgcagacgaccttattctggttggaagggcaactgtgggggaagctagaggtatgtgggattgcctagagaaattctgtgactgattggggcaacgggtcaataagctcaaaacttctatttttttcagcaaaaatacacctgagaacttgaaattggaaatcaaaactgccctaggcattggtggtctagtgggtgcccccaaatatcttgggcttccactgttccattctaaaaataaggatgcggattttcacttcattttggataacctaacgtccaaacttcaggagtggaaggcaagagcactatctaaggctggcagggccaccctgatcaaatatgttggcctggctatgccatgcaatctaccaagctttctaaccacttgtgctcgaaaattgatggcctggtccgtgacttctggtggggtttcaaaaaaggtaatcatggaattcctagaaggcttgggacaaaatttgcctgcctaaatctcagggaggtctgggttttggaaaacaaaagagatgaaccaggcctttttggctaaatggggctggaaaatccttacaggttgtcaatctttatgttgtacaattcttgaagccaagtatcttagaggccaaaatatcctcaagtcagagctaaagtttctgattcttagttttggaaaagttcggtgaaagaaactgagatccttaggagtggggcctgtaaagtggttactgatggtaaagatacgaggatctgggaggacccttggatcatgcatggtcaagggttctacccaactacgactagtaaccaatcacagaattttactatggtgtccgaacttctgacggaaactggtgattgggacatgattaaactgaacgacttctttaatcaagaaactgttaccgccattttgaaagggggccaacccttgggccaggggagtgatcactgggtgtggaccaaagaaggaagtagtcaatttaccagtaaatcgacatacttaattccagcaatgaaacgagccccacactatgatgtggctccttctctttggaacaaaatatggaacaacaaaattctagagcgccacaaagttatgtggtggagtgtcctttcaagcactctcccaactcggggggcccta

SEQ ID NO: 239709 - DNA, 1590 bp, Cannabis indica
tttttgaacgagtggataatttcttgtacaatcacattattatcttgaatatttcttcctgggacaaaagctgctttagttagccaaatcaatctgggtgaattggtttgattctatttgtaatgattttagaaataaccttatacgtaacatcacacagatagataagcctaaactgactaatcctcctgggattcatgacttttgggataagcaccaaattagtagcattaacacccttgtgcataacaccagtcctgaagaaatccgacagtacttcacaaaaattaccccactgaatcccaatagtgtttgaaaaagagaacagacattctagggctgttcatcaaaccgctcacatcgcacaaaccgctcgctctgtaccacaccgcataaaaaatacggtttgaaatcctttgcgatgcggacgtggtttgcattttttccaaaccgcgcgtgcggtgagatttgtgggtttgaatttaataattgcggttcaaattgcaccgcactatacattataaagttaccaaattttacaatatgatttttattttttcttcatataagaataaatatatgtaatatatttcatttattttttttagagacaattcaatataatgacttaatgatagtatatatgttaatgttaaaactttaataattttgtttttgtattattaaaacttcatagattgatttttaaatttttattataatattcggtaatgatgatagtataaattgctcaaaccgcactgcaccacactgtattttcatggtgtagtttttgtagttttaagatctcacggtgcggttgcagtttaagaaattataaaaactgcatatgcagtttggtttggaaaaaaggctacaactcgcaccgcgaacacccttaagacattccatccagactaggggatttgtggctacccatcgtaaatagagtctcgcgaatgtcatcatccatcggacacttaccaacttcttcctattcttatagggaaaggcagttgcgaatgaggccatccaaacaaggtgcatgagacgagtggctgccctaaaaaatcatactccagtaattagtgaattatttcccaattaagccacatttagtgagcaaccatccattccattactttgaatattttccccaacttcaccctattttttttgtcattttttaatatcacatcattctattaccaaacatgtatttggtactttttcattgttttacttaaataccatacttatgtgatttaagaagggaaatttgactttctatacatttattgggttaaaattattttcctaaacttaagttaacctatattggtagaataggctaacaattcataaaatacaatttcacccattccatttcaaacatctaacattctctcttcctcctttatctttctcttgctctctgaactcaccccaaagactcgatccacaacccaccacccacaacctcagtcctttctctccacgaccacgacccacgagcccaacaacttctccattggtaatgttgttaaaggaataaattgtatgattaatatttgttatctgtgagtagat

SEQ ID NO: 239710 - DNA, 1178 bp, Cannabis indica
ataatttccaacaagatcaaccattgatattgatttagaaagatataacggtaagtttatgatatcttatccaagttcaatatctgtcccttccaatgtatactccatacatccgaataccaagatggatcaagaataatatatgatgtagctatgttggcagtaagatgatccatattggcagctccaattctagggaattccatattaaaatgctgataacagtgtgtttccatatgactaggtttcgaacaaagttgacatatgggacgtgagccagtggtgatagtagcaacatttgaggaagaattttgagtgttacccctaccaagtgaaggaggaggagaagagaaggaacctccacggggaggaataggatagggattccatacagaatggccacacccaaaatcaggaggcatagggtgaggattaaagttggatcgagaatctgtaggaacaagataagagggtctattgcgagaattttgatacatagcaacatttgtagagccaagatcgtgttgatgactatccatacagtgttcttgagagagaagaagagactcaatttcagctacagtgtaaggttgatttctggaatttacggagattacaaaggtatcgtactctgcaggaagacctttgaagatggcaaaaatatgttctttcacaatgacacggtgaccaattgaactaagacgattcgcaacagtcttgattctcaacaaattatatttgataggcagaactcctttcttgatagtttgtaattgattagtgaattggcaatgcatacatttgagtagagaagtatacctgaagagtgttttagacttgtgcatatgtgtgacttccaacaacatgagtaagaactttttcagtcatggatgaaaggagccaagagtagagaagctgatattgttgctcccattgagtaaacagaggattaacatatccataactcgatctcgatatgagaggaatttagctagaggaggctgatttgagatgtaatcttaaagattataaccttgaatggcggagagcacttgaggtctccagagaagaaagttattgttatcgagcttgacagagagcttgtgagagaagaacacgggatgaaaaatcacagctggagtagctggttcagatagagcattcacttacgccatgga

SEQ ID NO: 239711 - DNA, 940 bp, Cannabis indica
ttgttacaagtgtttttggggttgacatcatcttagatgatggatgttagtggtgaacatcaatcatctcatcatgtattgtctgtgttaatggctctaggaacattgattatcttggttcatgagtttaagacataggctctttgaaacatgtcaagttgatgaattttgtaggcatttggcaatattaacgtccaagttcttcaaagagtagagcttagtttaagtgagtgataagagtatgccttgagcttgaggtcatttattctcagctgtaatgaataataatgtttagattggaagaagttgtgttaatagataatacagagatggttggtcaatggtttagggttatgtgaacacccagtttgaaaatgttcgatggctgattttgttcaattgtaataaagtaattaaagttcaacagtaccagtagtgcagatgtaaattttgttcgatggactataacattaacattgtgtgcgatggctgattttgttcaattgcatcatagcattgtgtttaaatttttaactaagatattaattaaacattaaattttgatgaagtttgtaattattgcattgaaacacaatgctatgatgcatagatatgtcttaagtgatgcaaataataagtgatgtaattattgcattgaaacacaatgttaagatgattagaggtgttcataaaatacttaatccaattcgatatgcacaatcttatttgcaaagtgcaaatatcaacattttgcaaattggattggaaaatttaaaatttgaatttgtgtagataggatgttgattgacatgtaaaaataaaataatacatatttatatatacttttattatatatacaataaatattttaatgtatttaaaaacctaatacgtatgatataaatatattttaaagtatagtagattaaatgtatattcc

SEQ ID NO: 239712 - DNA, 2785 bp, Cannabis indica
acacaaccaaacaagctcttagtcattgataattttcggttgcttcaattaaagaacaacctataatttagttattttagtaagtaaaagatgtatattggtcttagtttgagcaataaacagatctatgatgaaatttacaattcaagcctcttcaaactctaattattctcccctctcctcgcaaaaaaactctttaacttatttaatttaaatagaaaaataatacaatacaatataatattaaaggcttcaatagttaaactaaaaaaatctacctgcactaagaattgtttaatgtgtatttttttttaatggtttcagtttaaaaaattagttaggtacatgcaagtatacattagataatgtgtacgggctggtcctaagatatatggggcttaagataaaattaaattttggggctcttatatatagtttaattattattaaaataatatttttaatgcttttgtgtaatggtaaaaattttaaaaactcttaagagctcaaaggctcaatctttcatatctacacattaaatattttttaaaagaaatagaaaagtagaatagggattgatttcttgaccctttaccactacaccaaacaatatttgttatactttcttcttatttaatattttatatctatatattaatatttttttttacaattttggggccgtggcgcacgcctggctcgcctaccctcagggccggccctgaatgtatacactcaaaagtcataaatatcaacagctaagaaaatgtttctatactgtaaggataaaatagggagattttttcatttttacacttcaaaataatttttcttagcatttttacgaaaattcacatagaaacacatataacaattaacggagcaacctaaattacaaccaaaatctacacatcaaacgacatagaaactaccaaagcaactcaaatcgtaaattttaaaaataaaaaataatatatagagtaattcccctaaaataagtgtatctaccataatattattctatatatattatttgagacacagatttaacattaacaaatttgcggcataaatacttaggtttaactcctggatacaaataaatatctaagtttaattttttggcagcaataatatctaagttatatttttagaactgtgtaagtatatctagttgttaagtattaagtaaattgccacgtgacaatccctgattagtccaagtaatgatttttttaaaaagaaattaatttaaatataccaataacaaaataacacgtagataatgacttgatatttaattattaggtacctacaaagtttcagaaatatagcttaaatattattatgctgaaaattaaatttaagtatttatatgcaactcagaattaaacttaaatatttataccacaaattactttttattttttataacaatatactttggactttttagttgaaataatatattattatatctttttattcatttagtaaatttaagatttcttatagtgcaaatagagataatatgtcatgatatgaatttatagttatcaataatactaaaattttataaattgttgatattaatattattatatattaaacaaacctgatttacctttagcttcaggagaaatgtcaattgaaatggcatggtttttgactatatttggtacaataagtgggctcatattaacaattacaatgaagtcaggcccactctttccttttctatactgtggttctatttttgtggggggttttctctattctatttctgctcctccattcagattcaagaacaatcattttacagcacttttgtgtaattatgcggtatatatagttattaatattactacaattaataactactattttaaaatatatgttacacttaaaaaatgttaattattaatttataagaaattatacagttgtatgttggcacaactcctgggttctattatgcttgcaaggctggtcttggacttccagtgggctggaggtgagttattatgttaaaggataatattaaaggaatatccagtcgtctttctgctaaacaacaatatgtattgaattcataatttattagagactttttatgaatgtcaactaattatttgataactagagtctttctttgataaatgattactatgagtcagactcaataaaatttggacaattctttttttttttttttttgtcgttaaagagcactctttctttatcatcagtccaactattgttcgagacttagaattctattttattatcaatccaatcactgttcgagacccaaaattctattttattatcaatccaatcactgttcaattttttttttttttcaaattcaaacattatattgatacatttttcataatgagtgattcattagctattttgagtctcaatttcatagtaagatgcaatgcaggactagtcctgaaatttagtggtctaacccgtctatactaaggtcgggcctgatgtaatgagtttctcttcttattatatattaattggtattgaaataaaacttcatataccatacagcaaacattttgtggatgatgtttaataatggttttgtattatgaattgtgattgtccagccctgctttttgtttggctcttttggtttgttttcattgtttgctgtacccatctccatcagcaaagatcttccagatattgaaggtgaccgcaagtaagtttataacaattaattaatttactttttgtgtattattattttttcttttattat

SEQ ID NO: 239713 - DNA, 1228 bp, Cannabis indica
tctctctctaccttagccgccaccctctctctcttcctaaactttatatgtgtttacttcatcgttttagaaagttcatatttagggtgttaattaacatacttgtgagtagatctaagatcctggtaaaataatttccaacagaattttccacaccaaagcttgatctctagcattgagcacatcagcaataacttctccatcccattcaaccagatcaactttcattaaagagttgacagccttccccaccagtcctggatggacagattcaatgaaagggttcatctcatcaggaagccaaggctcagatagaatattgatggtagaactatcacccacaaatctccgaaccccagcccacactaactccattcaaacacacttctccaaatataacttgggttacttcccaacgtcgatgtaaggaaagaccctgtagaaaagtatctagctttgaaaattttccccatcaagctatcaccacaagtcaaaagcctccatccttgcttagctagtagagctagattgaagtcccttaaatctcaaaatcccatgcgacccttgctcttgtgttccgtgagcttgtcccagcttagccagtgtatgcctttattcttgttcgacctccaccaaaacttggtagtggttctatcaatgtcctcacaaattcctacaggaataagaaacacattcattgtataggccggaagtgattgaaaaactgattttataagaacttcatttcctgcaggagataggaatttattgtcccaagactggatccgcttctgcactttgtcttttaaataatcgaaaatgacatttttattcctacccacagtactcggcagccccaagtacttactatgctcagtcacttcctgaattccaagagtagtacagatggtccgccgcatatcagatgaagtattagtgctaaaaaaagacaaaagacttcccaaaattaacacgttcccgttgcagtagcaaacatccaaagtaactgaagaactcgattcatctctccattagtcgccttacaatacagaaaactatcatccgcaaagagcatatgagagacactaggcgccccattagccactttacacccattcaaccacttcctctcttcaaatttacgaataagactagaaaaagcttcagcacacaccaaaaacagatatggtgatatcgggtctccttgtcgaaggcctctactaggcac

SEQ ID NO: 239714 - DNA, 1920 bp, Cannabis indica
aaaaaaaacagataaattatctatcatctacaatataaacttatatatataaaagttgagttacaattggtttgacactttgtaaatattagagttattatacacatcttcttgactgaggaatgaggatgcttgtaatttgtacaaattatttttagaataatgaaaattatctgattcataaaaaaaaagttacaatttatttaaaatcttaaaacatgcctatttttttaaaattaattatacgtactcacgcggaataagttaattgaatcgtgatttcaacatcaaaatattttttaacttttaaaaaaaaatgtgaaaattaaaacttattttataataaattaagaaattttattaattaacaattagctaaaataataacttccaatcaatatatctcacctgttggaaatccgactaagattataattaaaaaaatgagtgaaataattaatcatttaattcttagatcgtttgataaaaaaattaaaataaaatcaaatgaaaaaaattacagcatcacaattaatcttaagaatacttatattctgttttatgcaccgcttaaagacacacacacatgtagaaactgttgcagcaagtttattcaaccgcatagctagcttcagcactcaattattgcgtaaggtacgtaacttcactactaacaaccctttcatgagtcgtagacttgttattctcaactatgtactaacaacgatttaatggtgagtcattgaaaaaaaaatcaacaacgaaacaaaataaaataaaatcatgtcacacagacaaaagttaaaacactcaaatctatattacaaaaataaaaccataagacactactcaaaactatattgcataaaaataaaattaatcgccctagtaaaaatcgaattgcagtaacaaaacgcaatctcaacaaaactaagcctaaatccaaaaaaaacccacttggccggagcaaaaagatttatgaataagaaaaaccctcaattttttcacacttattccaccgatcaaaacaggatatataatattggacacttctagagtacacacccctaaaacagatatattggtgtgaccccttaatattgcagtgtaattcgtcgaagtgttaggatacactgtatttttgtggggtgtagaacattaaaataaaattactattttcaaatttattattttttttaaaaaaaaatgaaaatactgaaatctaagagtcatggaaactgtttcatttcacttaattatctaatcaacttgaattttaaaaaataaaatagaagtgtaacttttttcttcttcttgagaactttgaagtaagaacaccattgttcctacgtccacccatcgattctaaactatctcgtctccctctttttacatttttcatatgtggggctttttcttagtgctctttgggcaatattatggattttgagcccaacaattttttttgtttgggatttgaagaatatatcttgattcccttgttaatctttttgctgctgctatacttgaagtattcaatcaaataatacacatacatgtttatattgtgtttacgcgtagtaatttttcgatagcatgttttcaatcgaattagaatttctgctgttaaaaagaaattggagaatttaaattgatggatgccctaaactgggtttttaagatagagggtcaatcaattggagagttctcgaaggagtaaattgtttactatgggattgaagaggtgttgagacgaggttgaaaatggttatacttcgtagacaggtgtaccaataataagaaactttatgagtcacactggtgcaccctctttttaacagcagaagatctaatacaacatgtatcacataagactagtcccacagaaacaataatagccaataacaacaaaggattttg

SEQ ID NO: 239715 - DNA, 2950 bp, Cannabis indica
aaattcagtatttctttttaatatttttatatggtttttttactaaaaaaaatcattattttagtttgatttggttagataatgtcatatttagtggcatttacttttcatgccatatttatcgtaaccttaataatttttcccatattttttaaaatagcatttacaaatgaaattagtttaaaagaaagctcttccactaattaaaaaaatttacaaaggccatatgatagacctgaccaacataaagctgaccaacataaagctgaccaacataaagctgaataagtcacataggaggaaatcagactatatcttttttatattgttctcttttatttttaccttcttttttaaaatctattatttttaccttttttttaaatactttactaattttgctcctgtcactttaatatactctctgtgtgattcttttatgttaggatattatgggtacagtgcatatagaaagaggtatgttttaatcaaacataaattagaggtggatttgattaattgataaataaaaaaggtatttttcaaattaccacatactaacatgtatacagggagacacagatttgattgtagattggaatgaagtatggggcttatgccagagattaggcccactataagtttccaggcccaatgtatatccaaggagatcaataatagtacatgtacaacaagtggtatattacagtattactattgtaagtaacggaattgatgtataggatgatatggtatagactatagaggttatattagtacttagttgcactatgactgacttttttattcaggtaaatagaaacttcagaaatctatagactatatatcactctcttttacactgcgtatagtcaactagattccattgtatatacaatgtatacatttatacacacatctagtcatataggtaggtaggtggtatctcccaccaatctaagattcggctaaagtaaaaagctacaatacaagataccatattttagccaaaattttatggaaatatattaatgatatgtgattttctagagaccttaaatatcaccaaaattatgattataataagacttgtcaattatcggtgcattggaaaattaataatatactacttattttcttttcagcttgtctaataaccttttctttattataaaataatacttttgatacacgattagaagatcacttaaagaaaagagaaatgctaaattttaaggtgttaaccactattaaagttaataaattataatttgacattagttttcatactttttaatttaataaattctaatcattccatacgccacattgatatagttttggacactttaaaatatttaataaagttgctcttaagaaaaaatatcattaagaaaaatgagtaatcaattagtataaatatttgttgttacatttatcatattacagatattgctacttagttacaaatactattttttttctcaaataaaaaggtttataaactaaaacgaatgctagtgtatataaaggaatccaccttccttagatgaatgttttcattagtattcataaacgctgcccaagcagcgacatgatgaacaactctattattagcccttagaatccaaacaacacgaatattatcaaaagcttctaatgaattaaagagatcaaagaacacaatgtaaagattccaaggaaccttacaagaagctatagccaaagccacaacttagcgatttgtgaagaaacaaataccagaagtggaagggttcctattgtagaatttaattgcacgaagaagggtcaatgcttcaacttcaagaggcgaggagcaatagaccttagttgttgtaatatcattaatggctctaccacgcccccaacataaccgcagcactaatagcccaatgacctcaaacaatggcattgacaaatatcaaggtgcaactaacatatcccacaagagagaaagggctaagggtgggacttccctcatgtgtatgactagataagatgcattgttgaagcaccaacacccttcattagccatcttagaaatagtggacacagtccaaaaggtaccttcatgaaagtccttattcctaacaaactacaagttgcagcacaacatagccccaaattgaacaaagtgggtcagctctgagttagacaagcctagaataggcgtcgaggagaccagccactcaataagctctaccccaaacatgagtaaaaggaggtcacttctcacagaccactgcttgtaaaccaaagttgtctcataaaatgactgtaataatcgtatatttagcatagaaattaacaacttattagtaatttaattactatttttagatatatgtgcattaatacgaaatgatcgtgggactatctatgtcaactaaaaagctcaagaggtctggggtttaggcgtttcgaggatatgaataggaccttgttggctaagcttaattggagtcttgcaaatgaagatcgaaagccctgggtcatttgtttgttgaagaagtactgtcgtcgggatagtttctgggcagttaatcaaaagagttttgactctttcttgtggaaaaacttgattgaaaataggagtttactgtgcaaagggtcttgtactctagtcagcagaggtgataaggttgttgtcaaacaccaaccatggattttgtggctgaattacagcgagtttatggatcttatgagtaggcatttgaaccttttccctcacctgaattcagtggcaaatttatccttgggcaattggtggaatgagggactggtaatctctatttttggagggaatttgggacgcagaatactggagattccaaaattaccaacctcaacatcgaataagattatttggaagccgaagaagaatgcggtattctctgttaagtcagcttatgtagaggacaaaaaatct

SEQ ID NO: 239716 - DNA, 1914 bp, Cannabis indica
attaatataataataaggaatatgttttagtaaaatttttggtgttgcggagtaaaaataatttttgacagtgtaacactaaatttggtgtaaccgctgtcaaaaagttgttgcgggagaacagaagagtaagaatggggcctttggcgcttaatctacactccttgtccttgggagtacagatctgaaatcggaagcttattcatccattaccttaccagttactgccatggatcgcctcctcaaagctgccagagcttccggttccctcaacctctcaaatcgctctctcaggtatgttatttctctcctccattttaaaccgtcagatttcgatttaattgacctaactgtatttcaattcgattttcagagaaattccgaacgaggtctaccggagcttggattcagttgaggacggcgagaagtggtgggaggtagatctccaaaattttcttaaaatatacattttataaatgttggtggcagatgtttgaagtgtttcacggtcatcacataatatcatggaattaatggctttgttcttcctattcttcaggctgtggagcttcaaaaactcattgtagctcacaacaatattaaagttttgaaggaagatttgagaaatttgcctcaactcacagtcttaaatgtcagccacaacaaacttacggagcttccagctgccattggagagtgagttttctatttctcgacgttttgtttgccttaagcatgcagtttctctaattaacacagaacacctattggtacataaatctttataacatttttaaaattgttaaaggcttcccgcgctaaaatcattggatgtgtcctttaactcgatacaacaattacccgacgaaatcgggtctgcaatatcacttgtcaagtaagtgctctctcttcttaacacaatccaacaaaacatgaagatatacgcacctgatctcgcacaggcaactaaccacttgcgcaagtggcgttagttagtttttatgagtggcgttattgcttcacttatctctgtggctttgtgctgtagaaaaacaagtatgcttaatctttttactgatttatcgatgtaattttcgagattacatgaaactcatgtgttttgttgagtagttaccacccttgttaagcgttgtgcttgcattatgtgatggtaaatggcaacatatagataggatacagctgtttgaagttgattttgtttcttcttcaatataatgttcttggtgttcttgtctctgctattaaatttaggagtaaacttaatttaaattgttatttatacaattttaatatgtgttgattctagaattgattgttcacacaatcagctcacggaactcccgacctcacttggaagatgtgtgggcttatcagacttgaaggtgagcttttttctgctaggatgataaatgtagaattctaattatggcatggccatcccactttaacacacgagttcttctcattttggatcttagtataaatgcaagatttggaagatagaattgatattggcctgttgtcatcagcctttgcaataattgtattgctttatacaccagagttcttaaatttacttctggctagctttagaaaaggaattttttttactttgcctttctgttttttactgtctacaacaaaagctgccctttttcaggcatcaaacaacagcatcaccagtttgccagaagatatggtgaattgttcaaaattgagtaaactagatgtggaggttagtaatttctgtagcgttagcacttaatcactgcttataggattgtttatatgctagagaagcaattgggaatgacatatttggggctcaaaaatgtgaattgtattatttgtctatgccaggcaaacaagataactatgctatctgataatttg

SEQ ID NO: 239717 - DNA, 1377 bp, Cannabis indica
aaaaaagttttaattatatataaaagtgtatgagaaaatgataataagtttttttgcacatattttgtaattaattaaaataatgtatacaaaattgtaaaatgcccaataacttagccatatatttgttcttagccatatattttgaaaaatatatctaaattttgttacttaaaattaaaaaaaaaaaaacaaagttacatttttcaaattattcatattaattttataaacttcattaatttattttagtgaaaattatataagaatttatattatattcttgtcccttcttaatatattataactcataattgttttcatttagaaaatacaccaatgcacaatacatatatctcaatatcctctccaacatactcgtaatatttctcatctctatcatcaatgtacttaggatccaccaattccaatttacctgaaaaatataccacgaattcagatatgctacaaattaatacaaaatatatattagataaacattttacttgatttgaagttaacaatcaatcattaatttatattatatgtttttaattttatctcatgcaacctacttgagtgtcacattcaacaagctccacaacggtactgattctttagatttttcaaattttgttggatttgaaattgatcataaatcatcgacagaaaatttgagaagacaacacaacttagaatgatttatattgttgcaaagtgacaccctccccaaatgttgaatgcataatcaccattttcaattgtcattgaagttccctaactagcgtaaacatttttctcaaatgaattgccctccaagcagaacgatactgtttctgaaattcagagagctagtaaagatacaaaagagatactgagtttccaattagggatcagaggtgtccatttcgaactaaacatggtcatgaataggtattgtagaaacgacttagccatatatttgttcttgtcatatatttgaaaaaaaaatatatctaaaatttgttcttaattttatttttttaaaaatagaattatgttttccccatttttaaatttattttttttataaaatgtattaatttattttactaaaaattatataagaatttatttctccttctccttactttttaatatattttaactcataattatttttttttttaagaaattatacaccaatacacagtacatatatctcaatgagtgcactcttaatgggtattacctatgaatgggtaaaattagaaaaaattgagtttctatgcttaatttttctatctaattagaaaatctctcacttttacatcatataggctgatattattctatcggttgaaaaaaaaattataaaaaaaagagataagtaaaagt

SEQ ID NO: 239718 - DNA, 1002 bp, Cannabis indica
ttttttttttttttaaaaagtatgcttttacatattagtaagagtaacttgtggcgaatcatatacctatcattctacttcttttctttatttatttatttttgtttttctaaagaagttattttatggtgaatcttacataatatacaattatatttcatcttcttttcaatcttcttcttaattatataatcaggttattcactcaactttgccattggaacctatctcagccatcttagttcctaaaaaaggaaattacgatagttaaagagaagtttattgtaacttttaatactaataataatagttagtttttttttttaagtgaggtatatagttagtttagttttgagcatttattctaattattattattattattattattattaattaaagttatttcaaaattaataagtatttacttatatgtgtttagcaaaaataaatatttatattaattggcttataagagaaacaagtgttttactactgacaattattttttctgatggttttggttaattggaaaaattataatttattggttattagagttgtaaagttattaagttattcaagttattaaattattaaaaatatattgttttaggatctatagctggtatcaattgcatttgacaggataagttttttatatttttaattaaacttattgttacaatttatcaatatagtttattaatttgtagtgaaaatattttgtaatttttttatataattatttattatgattattattttttatttctatattttccttattaatgcatattttttattttgcagtacaaacatttttttcttttttgagagagtttttcttcacaagcacaagattctctctatcatgcaattaagacgatcctctcctacccaaagtactcaactttgccataggaacctatctcagccatcgatcaatccctaaaaaaggaaattacgatagttaaaaataagtttattattattattatt

SEQ ID NO: 239719 - DNA, 784 bp, Cannabis indica
tctctcaatatcatatcactatatacacatctaatcttatatatatatatgtatttattatttgtgatgatgatcatgagtacttattatatatatttgctctgagtatacatcaagcttctaatcatcatcatatctatctctatacatgtaattcatatataccatatctctctctctctctctctttgatctctcttccaattattaattatatataataataataatgaagaataagatgaacttgttattaaggaaatgcaagagcttatcaagacaactagggagatcttcttcttatagtaatctcagatcaaattcaacccgagaagatttctgggtcactaataatcaagatcaagatcaacatcatcatcaaactatttcatcatcttcttctaataatgctacaatttttgtgggaaactcaagaaaaaggtatgtgataagcacaaagtatttgagtcatcctttgttagcaactctaatagacaagtctaataaagctggtggtggtgctcaaaacgatgacgttttggtattggtcaactgtgaagtggttctctttgaccaccttctatggatgttggagaatgcagatccaattaatactcttggctctgactcattagaggaattagcagccctttatgttctttaattaattaatttcttttttctttttttttatattataatttcttatctaattaagctaataattaactcattgttataaattgcttcattttaattaatggagtactaataagtacttcat

SEQ ID NO: 239720 - DNA, 1492 bp, Cannabis indica
ctttttattttacagcttttattttttctgtgtgagattgtcacttttaggcacaaatttggttaacgaaaatatgcgttaacagagtgtgaggcatgcgtagaaatatcttgaaaaaagctttccgaatcacttgtaattgcattaatcgaagatattgaatgagttatggttgtttcactgaaggatatttagcacctgatacccaggttgacaatcctgcgattgagaagttgtccgacatcaacctgagcgctagaaaattggggaatcgttccaaaactagattttttaaaatctaagtgatatgttaacatcactagccaattttattgagcttggtgaagtcgtttaccaattctctaaggttttgtacttttgcagaattgagagactcgaaactactcaattttcaactattatgtcaatattttacatgaaaatgtgagatatcaaagtgtgaatttaacttgtcacaagttgtaggtcttgtttactacgaaaaaaatagcaagatgctcaaaacaaaactagaatcggataagcataacccagcgcaccaggtcatatgtcaacttaggcactcgagatcgcaaagagtctcctacaccattttgaactaagataagtacaattcccagagcaaaattcatgtttgagcaatagaaccatgcgaactaggttgaatgtcaacctgggcgcaggttcagccccaatgtcaacctgggcactgggtccttattttggcccccaaatgatcttgtttgcttctcgagaacacttgtatcttcattattgattataacataaaaaatgcccaagagacttccaaggaaaaattcttggaattggcctaggttaaaatgttaacttgggggttgagtcttctttttggtcatcagatggctctgtctatttcccagaagcacccatatcacaattatcaatgaaggcggagaatattcctaaaagactattgggaatattttaccaggatctaaatttactaacaagtatgttgattaacatcctaaatatgaatatctctataacaataaaattaaacacataaggccttagaaaatcttacattggttgcagcggaatataatgactcctttcgctcagatctctaactcttgttctattctatcgcagaatattatcaagatctgagcttggatctctttctctccttcgggtttggttactaccgtcttactcactatgattaagtacacgacttgctattgtgggcatggcactctatcactcaaggtttcggaaatggtgaagaacaatgaaggaggtgaaatcattatagaaggaactctctcatctactagttgtctgacagaaaactaggtttgatttggttgaaggcatcaagtggataagtgagagcatcatgttccttttatagtattttaactagggcttagggctgaattatatgaataaaaaaagaataaaatattgggtaaaaataact

SEQ ID NO: 239721 - DNA, 653 bp, Cannabis indica
tacacatactttctatccctactataacatcacaattttgattgagccaatcttgaggaggacaccattcatccaacaagatcagagtaggagtagagataagagaagctctataatctacataagagtaataaatgaagtcaatgtattattttatattatccagattattattttgtaccttatcatttcggacctgccaaatgacatcgataacaatggaagcataaagaaagacctaatttgcatcaatgcctttgttttcttaagctcaagatgaattcaacctagtcccacatgcaaatacatgttccacagacaggaaagataccctacaaggaggaccgtcacaaatgaaaagccaagttgcaagtgaggaacaagtgctccatagatttgtcctcaacctcacaaataggacaccccacatcatcaatacgaaatctcttatttagaatatatcgaattgggagggcattagacaagatgctccaccaaaggatcttatagcgctctaagattttgctgttccagagcttgttccgaagggagggccaacctcacaaagaggggcctgtgcaaagcttggataagataagccgatttgctagacaatcgcccattaattttctttgtccagacccaattatctt

SEQ ID NO: 239722 - DNA, 1802 bp, Cannabis indica
aatatttatttacgtggaccaataaaattgtgccacgtgtacattgtgtacacatagacattctaccatggtagctaacaactaaaaatggataaaaatgttaaatttctaacacaacacgagtttaggggttttaccaccaaaactttagaattagggattaattgcaaaaatctggccagttaagaaggttgtgccgcaaataactctatttattaatgcatatgttattttattgttcattattacactttatgtaatacaaccatcaatatatatatatatatattaataatgaaaaatgtaagactttccaccacgataatttcaagctttaaatttttataatataaaaattgttctatatattattgtttaaaataatcaaattaatttaaaaattaaataaaataaatcatgtccttacaagagtaacaattcgatcgtttagtacgtttgaaatatctcatattatcaaaagttgtcatacactacattaaatttagatgagactatttagatatttttttagtgtaaaaatttttgtccatttattatgtattttttgacaaaatttatattcaattttatataatcataacttattattattattattattattgttgtagttgcatgcattatttatttaattgttcaatgttataatgtatgcataacaaagaaaatttgtttctttgaaaacttcttgctgcaataattattttatttttaatttttctgttaataaaattaaaaattagtgctaaaatttatataattatttattagttaaatatatgatgtaatgatttgaagaataagtcaagtcactaagactaacttagactgagggaggggtgggaaaaaagaagaggatgtcagtttgaacttaagattcctaagctattagttgatatgtaattgcattaggctacattcaaaaaaaatgaagaataagtaatatatttataaatgggtgactacttaatggttatatttttattgtaattatcatggttacattttttttagagagtgatttgaatcacactatgacaatcgtcgacgcggaggagcttccagtcaacaagctaattgtctagccaaagatatacaaagtcagaatatgagtctctccaagcaaagcaacttatataagaccgagttatctcgaaaatttagacaaaacaacttgagatcaccttcaagaggcatctgatataaacaaccaattggaccaaaactacctacaaaatagatagatataaaaatgtggattagcacactatacaacgataataatgtaaatttttaaattaagaataaaacacaattattattttaacgagaaaacttatctttgaagtcttttttcactcagcatgtcaccattatatagaaactaatttattatgtccaactattagagcaaagtcttctaaggtagaaatacactagtcgattaaatctgcaccatacataaatttgagagattaatcaatttaataaatcaaatctcaactaaaattaactattttgctaaacaagataacaaactcaattagctagcaaaaatgataaaattaatgatataaaataaaataaaaaaaaaaagtaaattcctcaaaattattaaatataattaaaagtaagatttaaaacttatctgtgaaaatttgtagtagcactctttgaggttgtattcactatcaaacgagccaacaatatagagtaaaatagccaaataatatgacacaagaagccaaataaaatggtacaaactaaccaaaaaatatggc

SEQ ID NO: 239723 - DNA, 1033 bp, Cannabis indica
ttataacatatatttttttttaattaattttgttatagatttttacaaatgtttacatttttatggtttaaaatataccgtatttttgtaataaaacttttaaatactatattttataatttttcttgtgtttctccctttctgtcaaacttgaaccaaccatgaggtctgatctctcatcggaattctagattcagcttattccgattgtgtcgcatccaaatgcgccatttatgcgctctgcgaactcaccataaatggtacgatttttatgctgaccattaagctaaggttttcgtcataccgtcggcggctctctagtcatcaaagccttagatgcgacgaagttgagggattgtggagcagcggcggtcgctcaagctaagaatttggagagattatggttggcgaggtgtacaatgatcacagatttggggattgggtgtaggatgcttaagttgattagcttgaaatggtgttagggttggggattttacggtgggattgattgttgttaaatgtaaataaattcgtagtttggatctctctttcttgtcggtaatttcatcctttttttggttgagatttaaatttaaattagtgaattataatgatatttggaagaaaatggcgagttgattaatgttttttttgtcacagatcaccgatgaatgcttaccatcgatcttgagattacaatattttgaaaattgttggattttgtgccataaataaaacttatttcaatataatcagatttactaattaataaaagataagaaatcattttatgttgcatggttcatatgctttatttcatgattatatacttaatgtataaattttattaaattcaaaatatatatttattcatgattatagtgatgtcaacacagtggaatataatcatgattatatgttcaaaagtttaagtctcatgatttgtcagtacactggatttagactgatatgattatcaacgataaggtatacttacaccttggataagagttatgtcatttccagggtattg

SEQ ID NO: 239724 - DNA, 2576 bp, Cannabis indica
atagaaaacaagcgcaattctgtcctaaaaacctacaaaaaaaaaaaaacgaacataatagtgatccagaacataggctagaaatagcctaacaacttcactaagtatagctggatataccctatgaaaaataaaacagagggtgtccccatctttctcacattcaaagtatttgttgagaaccaatttgattttaaaataaaaggtatgcaaaccgattggggatgagagtatagaaagttgcaacctattcttcaaaatctaggcattctattcagacatccatgcccacatactcatcctcaacaaagaagagtagaaagaaaatatcgccatgtcacagaaatgggtctaactatgttagccaaagccaacacgccacttaaattctggtgggatgcctttgtttcagttgtcttccttattaacaggcttcccactatagttaatcagtacaaatccccatatgaaagcctgtataaaatcataccagattatcaattccttaaaacatttggatgtgcttgctttccctaccttagaccatacaatacacataaatttgaatttaaaacctccaaatgtgtctttcttagttacaacccatttcacaaaggttatagatgcctacacttaacaggtcgaacttatatagctaggagagtcaattttaatgaatctaaatttccatactcctccatgttctctatcaaacaatagtcctctgttcacatgcacaaaaatcttttagcaccaacatttgttattccagtcttgcataatgatcccccatcattcccacctattcaatttggttccctccctatacaaaccaatgacacagaatatgagcaacatgatcctcacagtcctacaccacaacctcatgttcataacaatcccaccccatcagctcatagcaatcaaagcaattttcagtcaaatgaattgtctgctgaatccctcatacctactgtccatattccccatttaccacccccattgcctcaaagacatcatatgcaaacaagatcaaaatctggtatttacaaaccaaaagtttatatggtaacagccacccaacatcaggtttatgatactctaagaactgttaaacatgctctaagtttgcctcaatggaagaatgcaatggatcgagagaatattgctctcaaaaagaaaagacctagatattggtgctttactctcctaacatgaatctattaaccaataagttgatttttagagtcaatatcacaaagatggaagcctagataaattcaaggacaggttagttgcaaggggttttcaacaaactcctagccttgactttagagatacattcagtcctgtcataaaagcatccacaatacgaattatttttagtttagttgtcacttttcaatgggacattcgtcatattgatgtgaataatgtatttttgaatggcgaacttcaagaaaaagtttacatgaagcaaccagtaggttatgaagatctagaaaaaccagctcatgtttgtttgctccaaaggtctctctatggtttaagacaagctccacgtgcctggtttgacaagcttaaaatagaattgatttaatggggttttgactgaatctgtatctgatacttctctgttctatatgaacatacaaggcaacttactactagctctagtgtatgtagatgatcttttaattactagaggtgattccactgctgtatccaaacttatctcagatctccacactcaatttgcactaaaatctcttggttaagtaagctactttctgggttttaaagtgtacataaattctttagggttgtatcttactcagtctaaatatgttgctgttctccttgataaaactcagtttgatgatgcaaaagcttgctcaactccaatgatacaagccaataaactggctcttgatgacaatccgtattttgatagccctgccttatatagaagcaccattggagcacttcaatatctcacattaactaggccagaccttgcatattgtataaacaagctcagtcaatttttaaaggcaccaacaaccaatcactggaattcttgtaaacgggtcctcggatatatcaagggcaccacacatcttggtttacatttcaggccttcaaacatgcttcatatagaagcatattctgatgctgactgggcctccagtttagatgacagaaagtcgacatctggtttctgtctatttttgggtggaaatcttgtcaactagagttctagaaaacaacaagctgtttctcgatcgagcacataatccgaatatcgtgccttagcttcagcaactactgaacttgtgtggataacatctttacttacagaaataggaatacaattgcataaacaacctcctaccctttggtgcgataatcaaagtgctcgagcactagctttaaatccagtgtttcacactagaaccaaacatattgagttggatgttcactacatcagatctcaaattgcaaaaaagaaacttcaagtctgctacattccaaaagaagatcaaacaactaatctctttaccaaacctctgtca

SEQ ID NO: 239725 - DNA, 2718 bp, Cannabis indica
tttctaagtatagaaaatcaaatttccctattacgtggctatataataagatgatgtaatattattttaaatgatgtgtcatgtcatctagtgtctattgtgcaagataacagcaagttacttataaaatatctaaaagtgtaacagaaagtatttatgcggccaaattttaatttaggtattaaattgtaaaaaaataaatttagatatttatgccataaattattttactaattataaaaaagaagaaattaaagaaattaaggtaatatgagtttaaagtaatcttagagcgttaatcctttatacttcaactttatatatagatgattggattggatcggataacaatatctaatattcaataaataattaaattggattaaattttgaatgtgatccgatgaacatatatattgatttaaagtaacgttggaaagttagttgaataacataagaaaataattatacaattacaaataaaaataactaaaaaatatataataaattaaaatataatacagttttgtgttcgctcattgcagcgaccaaagttttctcagccattgtcttcttcatcttcctcaggtaatgtctcttgccactttatgtattattttttttcaattcacgttgaggttttctctctaataatcaaactaaccctaatcaaatttcaggtttctgttgatcactttttctgttttcttcaaaaattaagcttagtctgatagaatttttttcttattgccttgtccttcgacagagaggaattcggatttaaaaagatcgcgttcagttgtgattttgctttgtaaagagagagatagagagatgagcgtggtgggatttgatattgggaacgagaattgcgtaattgctgtggtgaagcaaagaggtattgatgtttgttgaacgatgaatcgaaacgcgaaacccctgctatagtttgtttcggggagaaacagcggtttctgggttctgctggtgctgcttcggcggtcatgaaccccaagtcaacagtctctcaggtgaagagactcattggtaggaagtttagtgaacctgagattcaaagggagctcaaaatgttccccgttgaaacttctgaggcctcagatggtggcattttgattcacctaaggtacttaggtggcactcatagctttaccccagttcagattatggctatgcttttcgcccatttgaaagatttagcagagaagagtttggagatgccggtttcggattgtgttattgggatcccttcatactttactgaattgcagagacgtgcttatttggatgctgcagctatttcggggttgaagccttttagattgatgcatgattgtactgcaactgcacttagttatgggatttacaagacggatttctccagtagtggacagacctgtggcatttgttgacattggtcaatgtgatactcaagtctctattgcatcgtttgaagctggtcacatgaagatcctttctcatacatttgatagaagtgtgggagggagggactttgatgaggttttgtttcatcattttgctgcactgtttaaggatcagtaccacattgatgtgtactctaatgtcagggcatgtatcaggctgcgagctgcctgtgagaagctgaagaaagttttaagtgcaaatgcagaggcaccattgaatatcgaatgtttaatggatgagaaagatgttaggggattcattaaaagggaagaatttgagaagctaacttggggattgttagagaggattgttgttccttgcaaaaaggctttagctgatgctaggttgactgtggacaagattcattctgtggaacttgttgggtcaggttctagaatcccagctattaccaggtcattagcttctctcttcaaaagagagcccagccgaaaattgaatgcaagtgagtgtgtagcacgtggatgtgctcttcagggtgcaatgttaagtcctgcttttcgtgtcagagaatatgaggtgtgtatattggaacaaattagtattctgtatatacttagcgaccaattttttggctgtttttctgttcttcttttcaatttaactttacagtattctgtatatactcagctccaaacattgatcatattgttactgttctaaaaactttaggcaatcacctatatcctgattatttgtataaatcgtataattgtgtcgagttaatgtaacttcgttgtatgcctctatgttcaggttcaagattcactctctttttcaataaggttattagtggatggtagtcctattagcactggggcaaatggaatcctgttcccaaaaggccaacctatcccaagtattaaagttttgacatttcatcgaagcaattcatttatattggaagctatttatgcttaccttgatgagctgcctccgggcacatctcttaacattagttgtttcaaggtaatacccctttttatttaattttttcactttgctaatttacttgctcgtttacatagcacctatgtacattctacagtttcttgtctttaaaatccattggtagattctactttgttgatgaaatgccattatacagattgggccattccaaggttcccaaagtgaaaagacaaggattaaggttaaaattcatttaaacctccatggcattgtcagggttgaatcagccacggtaagtatgattttttcaatttttcttttttt

SEQ ID NO: 239726 - DNA, 1619 bp, Cannabis indica
ctctctctctctctctctctctctctctctctctctctctcaacatcacattgaatctgtgttcataatctgtgaaaaaagcttgaatttaaaagtgttttggagttgatttcttgaagggaattattgttcaagctgtggaaaaacacttgaggtagtttttcctttaatcatttgttgtctttagttctgaaattgaattgtatttggttgttgcatgttgtgtttttggatgaagatcataggtgaagattaggtctttcttggtaagtatgccatgtaattcttaaatctaaacttgggttggttatttattatgtttatgttttgagtgagtaaatagtgagcatgagaatgaatttctggtcattctttgtttgttgttgtgattttgggtagtttgatgagatgaacatgaatattctagttttgtgttcttgagttttagaagcatgatttggtgtaattgaatcttgtttgtttatagtgtttgagcatgtattttgatgtttgtgatgcttagaaaaactttgatttagtgtataaattaattgtttatgatttggtaagtttggggttaatttggcctaagttcaaattaggcaaaatttagttttttttggatattttttgggttttgaatccaatggtttttaccagacttgtggtggtcgcgaccaggctcaaaaccaaagaaggtgagcccctccctaggctctgatcatgacgggctttagtctggtggcgaccagatggtagtgtcagtttaattttttttgctattttgttttgagcattacttttgactccaaactttgttttggacgttctatatattgttggaaatctcattttgagctctattatttggtccagtattagagtcttaattgtgaatattatgaatgttatttttgggggattaaccctagtttataaaacctaaaattgtgactaggattactggtgcttagtcagaatcacctatggatcgatatttctcctcatacattggaaatcacgtaagacaacaaactaagcacatagaatatagcacgttggcacagtaatacaatatttgattattattgtgaattcatgacctagggttattaccttaactgcgtattactataagtgtgcaataatttattaattgaatatctgagtagagttatgcatctacagtttaaccaggttagactcggcgattgtaattgagacaaactctagtaaggccttaaatataaaaagacatgtgagtgtaacacgtaggtctatgctacatagacatttattatagtgacattattatgctgagtaatataatataaagtgcggtggcatagtatagatacacagcagcatattgtatgaagtgtaattattattataattatcatactgtattattttctgtcttgatgggccttgtctcacaggtgctctattatgcaggcaagggtaaagtagtgtcagattagtcattgttgggttttgtaccctaaataaaacccattttaaaataattagattttctaattaataaagatcagaaatcattttttgttgcatggttcacatgatttatttcatgattatatttaatgtataaattc

SEQ ID NO: 239727 - DNA, 2393 bp, Cannabis indica
gagaaaactgcaaagagttataagaaaccgaatacatctgttaactcatagccaaaatctgcaacggcagttttcatcataaggataagctggttttgcaataatttccttataactctttcacaggaaacttaacatgaaaaatatatctaaaacaaagtagaattcgtgcatgatatcaaatccttaatgcctgtattacactatatgcaaacaatcttagctttgttccttcttgcattatgtctagccaaacaaaccttgcatgctgaacagaaatcttcagaaagatttgatatctgtgataatggaacagtagcatttatgcaagaaactcttttaaattcctccctctttccagcgattcgttcttttagtgcttcgaactcacgctccgccaagtgctttttgtgatcctaatgacacttgacaaggaaaatataccatcagcatatcacaatctctttcaataatcagaaaatgcttctctgctcatgtagagagattctctataacaaacacagcctagaattgcataatcatctttaaggtaactaaatattttatgcagaaaaagaaagagtaaacttaaaccattaaccatttatgaactttttttcttccatctgtttttcttttttcttttcaaaatgctacatctcaacaccctcccctgatgttaatcatccacaagcttagaaaaacaaaaaatgcatccattttcttctaaacaacccaaatctttgatcaatcactcaaaaacaaaatacaaggtattagcttttctaaatcttagagcatctccaatcaagatacaaactggtaatgcattgttaaaatatggcttactttgcaaacaaattagctctaatagtgtcttaaaagttgtactaaatttagcacataacaaaagttgtgtcaaatttaacgcgcaatataacattatacaaaatcacatcacaataaatatttaatttttatatttactacttttattattttataattatatttagctatatactaataaaataaaatattattattggatactaggtggattattacaattagttagctatattctctaaaaattattgtctaagttatataggactcgatacttaattaggcggtataatatcggcggttgagctagtgttcattttagcttttctcaataaaatattaaaggagcattaatgaaaaattaaatcttgaattaatagtacaacaaagttatttttctttactaaagatagcacaatatagtcttaccataaataaataaaaaaaaatatatgaaaaaaaaaaaacagaaatgattaaaccattgttctttctaagaaaattactatcctagatatatatttcctgttgaaattttgcttcattttcctatttaagattaaaaaacaaagaattgactgtaatttggaaagtaatttaaaaaatatatacatgaaaataaagtgattatatggaagtaggaaaatgaataataacagaataaacagttaattttcctttccgagaaaaaaacaaaacaaaacaacaataatttaatttctctctccccatattttttctgagcaaccaaacagaaagaaagaaaaattataatataaagagcaaagagagactaacttcgatacgaaatgaggctgccttgaaatcataaaaggatcgaacacggagagaagcagtggcccagagctggtcctcggagaaagcctctgcgacggagacggcggagtggtcgatcgtgaagggaggaatggtctggttatcggtacagacggcgacgatagagccgagacgacggcggtggcggcaacgagcggcggaaggtaatgagatggtgaagggagaaggggttgttgtacaagtccatgatcggtttgggattgggagtggaggagttgaagaaagaagcgccattgttgttgttgaaaattaaacaaaatattatcctatttatttatctaacaaaatagactttttaaggctcacatttattcttttcttattttccacgttcaattattttttttttttgaaaatttatttattaatgacttatttattagtcacaataaatagttagatagaagacacccaccatgtgaatttgaatattgttaaatagaaaccaaacagaataagttttggtaattaggtaaatattctgtttgctgtgtgtaattatgtgtgattgatttgttgggtttttatataataaataaactataattatgtaaatgttgtatttagtgtgattagaaactattaatataaacaaatcttaataccaaactatacaattataaggaagatatgattgattggtttgtgattcaaaaattgtgttttttaaaaatgtgttttggaaa

SEQ ID NO: 239728 - DNA, 2998 bp, Cannabis indica
cttatcgggatattacaaccataatcctcccaaattactcatctctctagaataaaacattatgttattttcacattatgctattacaaccatgtcccagcccaagttgacatttcaactagggtttttagtttttggatccgtcttagtgtaaatggctaaactttgtactgggacatgaattagacaaagcacgaacatatttgaggcaatagaatcagaatcggagtactttcaattttgagcaccccagtcacccagcatccaggttgacgataaacgagatttatactcgtttattagggtagtttagaagtttagagtcttttatgttaatttggtttagtttgacgcttaatttccttttttttcagagaaaatattaaaaaaattataaaaaaaaagaaataagctaaatttgtgtaaaagcgggcttaaatttagttatttttttttatcttggtgagtttggcgatgttcgagagcaagaatggagcaaaaaggcaaaaattaaaaactagtcagtcaggaccatggcttcgaaatctggagccatggctccagaaaagaaaaatagcagaatggaccaggggctgcggctccttaagcaaaaatttgaaaaaaaaaagataaaaagatcgtgaaaaaaagatgactttctcaagtggagttgcgacttcggtacctcgagctgcagctcctgaggacatttttatcttctcaagtttaaattccaaatatttttagtatcttttagggagctttattagcctatacaaactcattattattagtgattttagtacgtttttcagagctctaaactcaaaactcttaattagcaactacttagtatttttcatcaacttcttcttcttctttaattttgtttatgaacttattttttattatgaatgtaatggttatgaatataattttcatgcatccaataatttttttatctagaggttaattgattcactttaatttctattttattttgctatgatgttctattgatttcgtcctctttattttaatctatatgattaatacttaatacttataaatacttaatcactatttgcatgtttttatgatttcaattcaagatttgagaggtgagagttgaatatgctatagttatatagacataggttacatattgagcgacagtacccgtataacttgtgtagcaaataggattttcattcttaatgtatatgttgaaacttattacaaatactaaaaaaaatttgcagatggattgaagtcttatatcttgaaaaagaataggttttattttagttaacccactattaaaattggaagaaaaaattgtagaacagattagtaaaataaataaattaacaagttgataaaattaataccctaagtttcattcattaattttcataatcattggttgcttattttaattttcttagttttaaaaatattacctaaatttttgtttgccaaatagaaagtagaaaaataattattagtacttggtaatagccttcatggaacgatactcgtgcttatgcactattattacttgaaacaaaatgtatgcttgtgttataatttttttcctgtcaaatttttggtgctgttatcggagactaaattactattatcaaaattaattattttttgttcttttgtttattttaacatgttctatttggtttgcttcttacttcttaaattttggaattaataaaagtttttgcgacaacaaggtttggagtcactagtgcctcttgatcctaaaattgaaaaaacttgtaggtgaaataaaaaaaaatggttgcccatggagataataaccttcagaataacaacaataatgtggttgatcaccctaatttagccaatgccgccaatgctaaaaaagcagctcaagctaatattcttttgagagattatgtactctcaattgtcacgagggttcactcatgtattcgtccacctgctgtagaggcaaataacattgaaatcaagtctgccataattcagatagtgtaaaattgtgttcaggaggctgcctaatgaagatctaaatatacatatcactaattttctagagttatgtgccacattcagaatgaacagagtaagtaatgatgcaatctgtttgaagctttttccattctcaaggctatttagctcaatacaactaattcgtagactaagattcattaatacccaagtcacgtaaaaaccttcatttctattttcttctatttgatatattttcttaattcttattttattatattgagtttctaaagatattggtaaacaaacgacacaacactaagcatgaatagattacccaaaaaaacacaatatattaaaaattattgtaatttgataatccatctatctatatacttatataatgctgttgttaaggtatgtgaggtggcagtaccaataattttctttccctattctttgctctctcatttttcttaattttaaaattttggttaatttgtagtactcactaaattaatgtaatatattgatttatgataagcgtataaacattaattaattcattatataccctattttaaactgatatatgataaacgtataaacattaattaattcattatataccatattttaattctaatacaaaattcaaaagtcacatgttattaaagatttggtcattattacttatgactaaaaatatcattaatacaataaaagaattagtaatgcctacagtaatatataaaatgctttttctattctttcttctatccttaatatattttactataaataatatacagtaagacattcaattatacatattgcccataaaattatattcaataaaaaatatgtactctgatccaattatggaggtagaaatgaagggcttattttgagagctaaacttatattactaacaggtgctgctgattttactcttttctaaatgtttgggtttatttgattataatggttg

SEQ ID NO: 239729 - DNA, 734 bp, Cannabis indica
tttttttttgtattttttcattttaccaacattttcacaaatcaatatttctgactcccttttgtaagttaattaaaaaagaaaatagttctaaccaagttaattctacctatataatcataatattcattggaaaataagtctttttttcacatatatgattactagaaagataattacaattaaaaatcaaacgagaaagaaattttctaactaagcgaatttatttttgataacaaatgtaaattacaaaagccaagatacattttcagaaacacatgtatatgattaatttcaaaaataaaaaatcactcttagtatgaaaactcatttaatgaataatgtatgtacaacaatagtatgtatatgtaagaaaaagcaccacactattcttcaacatgaaaatcaaccccatccaatttgtacagtccaacaaaaagtggatatgaaagtatctaaaacaaaatagaaatagaacatgtatcacttaggggtgtttccggttcaggtggtacagtttttaattattttttcaaaccaatccgcatatgtagctttttcaatttctcaaaccgcactcgtactgcgaaactaaaaaactgcaaaaatcacaccgcaaaaaatggtgcggtacggtttatgtggtttttgcagtttggactatcattaaataattaaactatcacaaatacaacaaagtttttgcagttttttcaagtttcaacatgagcatt

SEQ ID NO: 239730 - DNA, 1867 bp, Cannabis indica
tatttttgccatttttgttatttggtttccgtgttgtgattgtgtgcagggacgtgatcgaattagtgttggtaaattccaacagtggtatcagagctccatgtgatgggagaaagaactcaatcaatgatgatcaagaacattttttaaaggagaagaaggaatcgatggacagacttgaagctgtactaatttgggaagatgacgagtgttaaggtcgtgaatgggaattagctcactgggaaaaataacttttgtctttagcacgagaagatgagagctcgtcttggtaattttggattggttgaagctctatcaatggatgccaagaaacctggtggaattgaataaaaatactggaattggaatacattcatcttatgtctcgaagatgtgatccttaaaactgtggttaaaaaaaccacgacctctacaatttggaataggcttaagcaaatgttcatgactaagagtatgccaggtcgtatttacttgaagtagaaattctatggcttctaaatggactaaggtaaatctcttgatgacaatacgaatgaattttacaaaatgggatttgatcttagtagtttggaggttaaaatcaaagaggaagacaaagtgatttatttgcactactacaaaaaggggtgtttacgatagtcctaaaaatactattttggagaaccatcgctaaaacaattaagcgagtgtttaaaatcgtcaagaaaaataaggtattctcaatggttttaaactattcgaaggtataggcgacagtttttaaacgtgccttaaaagattctgtcaatttttaaattggaattatcccatgcttaaacttaacgcgtttcagatttaaaattttatttctcgaatcttaaattttatttctcgcctcttaagatataactcccctaaaaaaaatcagatctcattttttttaaagttatttgtaatttttattttattttctagctctctctcctttgcaaccacgagtcgtgccatgcctctcctccactctctctcaatccatccttctcctctgctctctcttggaaggttggcactacaatggtaagcataataatctcttatttagtgtttaaatttttattagccatgatttggtttgttgatcttgatctgtatgtgtgcgaatgaaattcgaagcttgcaatctaaaaaaagtttcaaggatcgtcaagtgaaaagcaatttgaagcattgtaaaagaaaatttaaagaaggatgaagacgagcacaaagacgatggagaaggatgaagcttgtaaatgttttggagtggctggggcatatgcgagaagtagttttgaggaggctaaagacaatgattttttttaggggggggggggggatccactatagtgatggtttaaaatcgccgcttatactatagccaagggttttaaatcgtggtttatagtatcgactatagccgacgattttaaactgtcgataattcttttccttgatatttttccaacatcgcctattctgctcagtattcgtgacggtcttataggtaacagttttatagaccgtcaagaattctttacccaatagtgtaaaaatgttaggaattctaggttgttagtagtgttgcttaatttgttgccatctcaataccagcaattcaaagatacaatcatatactcgaaggagctatctttgaagcaagcaggcaaggttcagaagaacaatttagaggcccactattctttaggaagaaataattacagaggcaataacttaaatgaaaattactcacatggaaggaaaggaagaagtcaaagtgctaagggaatgggtcgatctcaatcaaagggatccaagaccgacaata

SEQ ID NO: 239731 - DNA, 4537 bp, Cannabis indica
tcgtaaaataaaaaccgtaaccgaccggtcggttataaaattgtaaaaaccgaccataaccgaccaattttcacccctactggaaagaacgacttcgatttatggcgtgtgaagatgagggccatgttggttcagcaagggcttcaagcagccttgctagaagaaaaagacttgccaacttcgatgacagcaaaggagaagatcgagatgctcgaaaaggctcacagtgctatgattctcagtcttggtgacaaggtgttgcgtgaagttttgaaggagaaaacggcttctggagtctggaagaaattggaaagcctatatatgaccaagtcactcacaaacagactattcttgaagcagaaactgtatgcattcaagatgttagcaaagaaaagtgtggaggatcacttggatgaattcaataagatcattcttgatcttgagaatattggaattaagatcaaagacgaagatcaagctatcattgttctgaattcattgcccattgaatcatatgaacattttgtggatacaatgatgtttggaaaggaatcatggactcttgaagaagttcagaatgccttgatgtcaaaagagttaaaaaataaatctgagctaaaagatgaagttgatggagatggcttattttttcgaggaaagaattctaagaaagggcgcaaggaccacactggacagaacaaagatcaagggaaattgaattcaaagtttaaaagaaagtgcttcatctacaacaagactactcctcttagaaaagattgtccaattctgaaaagctacaaccagaatcgattaggtgaggcaagattgatttctgatggtgatgacagtgatggatatggtaatgctggagttcttctagtctcagattcaaattcaagaactggatgggtgatggactctggatgttcatttcatgtatgtctagatgaatcacaattcagtgaatatcaagcaatggaaggagggactataagattaggagataatagatcatgtcctatcactagtttgggggaaaatcaagctacaacttcatggtggaggtgttgcaaaattgaagcaagtgagacatgttcctgagttaaaaagaaatttaatttctgtggctatgttagatcaagaagggtacactattcgaattgaaagtgggataatgaaggtgattataggatcaaggatggtaatgaaaggagtcaaggaccatgggatctacatactacaaggaaaaaccctaagcagtcaagtcaatgttgcagcctgtgatgtcaaaagaaacacaaaaatctggcacaggagattggggcacatcagcaatggaggtctcaaaattctagagaaaaagggtgtctttgggaaggacaaactataagatctagagttctgtgatcagtgtctgctaggaaaatcaactaaagtcaagtttggtacaggaaagcacacatccaagggcatctaagactacatacattcaagcttgtgggggccatctaggaccatttccagaggtggtgcaaggtatttctttacactcatagataatttttcaagatatgtttgggtacacattttcaaaaacaagaatgatgtcctaactaagttcaaggaatggaaaaccctgcttgaaactcaaattggaagaaaggttaagaatttgagaacagacaatggaatggaatcttgtttagatttgttaacaaaattttgtaggaaagttggcataaggagacacaaaacagttcccaaaaactctcaacaaaatggtctggcagagagaatgaatagatctattttggaaagggtaagacgtatgttgatataggctgggttatcaaagaatttttggggagaagctgttaacacaacctgctacttaataaacagatgttcttcatctgcaattcagttcaaagctcctatagaagcatggatagggaagaatgccaattatgaccatttcagagtatttggttgtgttgcatttgctcacattaggcaagacaagttagaaccaagagccagaaaatgcatctttcttggctatctagatggagtaaaaggttacaagatgtggagtattgaagagggaaatcaccaaaaatacttcacaagcagagatgtaacctttgatgaatgcagaatatacaaagatactctcaaaagcaaccctgcaactgatcatttgacaaatgacagtgaatcacagtttaaggtggagccatatcagaataaggaagatgaagaacaaagagaaagagaagagacatttgaagaagaattagaggaaagaatgagtgatgatgaagatcatgagagggaggactatcaacttgtaagagatagaaaaagaagagccataaaaccaccaaacaggtttagttttgcagatgttatatactatgccctgaatgtttctgaaggagatgagcctgcatcctacaaggaagctataaagtcagcaaacaagcatcaatgagggcaagctatggatagtgagatggactccctcagaagaaacaagacctggatagttgttaaattacctgcaggaagaagagttgtgagctgcaaatgggtttataggcacaaggatgagattccagggattgaaccagctagatttaaagccagactagtggcaaagggcttcacacaaagggaaggtattgattaccatgaaatattttcccttgctgtgaagcacacctctatcagactgcttctcagcttagtggcctataatgatttagaacttgaacaactagatgtcaaaacaacctttctacatggagatttggaagaggagatctatatgagacaaccagaagggtatgaggagaaaggaaaggaagatcatgtttgtctattgaagagatctctctatggcctaaagcaatcacctagacaatggtataggaggtttgatgattttaaaaccaaaatagggttcaaaaggagtgcctatgacaattgtgtctatgtgagaaaggccaaaggattggtgtatctgctgctatatgttgatgatatgctaatagctagcaaggataagggggaaataaacaagatcaagaagttattgagtaaagaatttgacatgaaagatttgggggttgctaagaaaattttgggaattgagatcaacaggaatagagaactaagatcccttaagctatctcagcatagctacattgcaaagatcctgaaggaatttaatttccttgattgcaaaccagtaagcacaccccttggcctgcaattcagactcaatagctctcgatcttcctgtacagatgaagataacaggtacatggagactataccatattctaatgtggtaggcatcataatgtaccttatggtgtgatctagaccaaatctcagtcatgcagtgagtactgtcagctggtttatgggaaatttaggcattgaacattggagtgctgtgaagtggttactagtatttaaggggtacaatggacataggcctaatctatggtccaaacacaactaacactgagataaaagggtttgtggactcggattatgtaggagatttagactcaagaaagtcacaaactggttttgtgttcagaatgtacaacaacacaatcagttggaaggctaatctacaaactgttgtagctctttcaacaactgaagcaaaatatattgtttgtactgaggctgttaaagaagcactctggctcaagggaatcaccaaggaacttagtatcgaccaaaagactgttgtcatccactgtgacagctagagtgcactccatctaagcaagaatcaggtcttccatgagaggaccaaacacatagatgtgagatatcacttcattcgagacacaatagctgaaggaaaagtcaagttccagaaaatttcaacacacgaaaacccctctgacatgctcaccaaaccacttcccacagcaaaatttagtcattgtttagacttactacaaatcacaacttagcatattatttttggtttgatcttttgttgtaagtatgtaatttttttgagtgtttttcattcttgtacattaggttcctaggtggagatttgtaatattgttagtttcctaatatacacgtgttagttatagtcaggtattgttcggtaagttagttatgttaactaactcctagctagttctaggatatatatataagtgcctaattaatactgcattgtaattgtaacaatgcacactcataatatacaatacaatattcttttactgttataaaacttggtgttcaatggccaatcggcctatgtccatgtaaattgatcttgagtggttgagagagatcaatgctagactttgcataacattctttacaaagagaaacatgccaatatccacttagaagtgggtccatctatctttggacatagggatgcacattcaggggtgaatatgagttgtcgttaaattcttagatgattactctaaaatataccttatgcaaagaaatttgaaatatttgagaaatttcatgaatt

SEQ ID NO: 239732 - DNA, 1203 bp, Cannabis indica
ctagatatcttgtattgctggaaaacaacagttattagtcactgaaggctaatcattttagcttaggggaaaaataaatgtcaaatagacaaacctttagaatttgggcttggtctgctctgactcccaattcctccaagtcaatctgcttcccattgataagtttctctatgcctttcatctagtgtgatagcaaatattataatggcttggctaatattttacatacttctaaagcaattcaaggtttgatacagtaaatctcatattctcacctcatcaggagaagcattgaaacgagcagcaagcacataagatgagctttcagagatgccacatcttttcaaggattctgtaatctgtcattgaaactcaatggttatacaataggtatccataagcaagttatcaatagaccagcatagttgagtggatgaagtttttacatgcttagatcctgagtaattgtaaacaagctctgaatgaagagtgcgcgttgtcagtgactcccgcgatttggcaactatggtcttatgtgcagctgctaatagagggaaaacatctgggatctgttgaattcaagaaagctcagaaatgtcagtttagtaaagttaataagtgaaactaaatgaaagagatcaagtgagtattattgtacaagagaagcattgagaaatgcaacttctggttccaatgttccagcttgcatagaatcctggagttccctggaaaacaatgaattgtcattaagactttcagcaaacagtataaactaattattaagcccttcagttctcacataactttcttgaaatgttcctccttgttgaaacacttatcaacagtattgaagtactatttgcattataacttatccttttcatgaaaagacctcaaaaaccatcaattgtattgtgcccacaattcctagtggaaatcagtagataaagcaataaaaacttgcttatcttcaccattctaaggtacataagatgcagctattgctaagctaaactttgctcctaagtcataactcacccaaccaataccctatataaccaaaaaaacattagctaattaaaaagggtcttagacataatgagtttaagctatgttatcacacaataaatacaaaacaaatctctatgtagcccagaaaattgcaagagaaacttataaagtaattcagcacaaactcattat

SEQ ID NO: 239733 - DNA, 1165 bp, Cannabis indica
atattacaaaataatatatattatatataatatagatgttcggttggttctcggtttaatcggtcggttttccattgacactgaaaccgaccatgttaaggcggttttaacgaaggcgattttttcggtttttgtttttttggtgtttgtttttccggtattcggacggtcggtgtattccatttggtcggttttttggatttttcgctcacccctacccaaaggattacaacttattctaaccattggatcagtaataaatataaacgaacatgatttcaccattaaaatttttatcaaccatttgattgaattactggtcaggattaatagacggaagaatatctactttctgtactgagcgggattgaatcactaccctattttacaatatatatatatatgtgtggcgtctgatttcaatacgatgtgtacggaggcgaaatgtgttacgcgtgagtattaatttatgtgttatctgacataagttttaaataattagtattttcaattctatggagtatttggagatagaggaataaagagcgccatggtaccaaaccaaaaccatatgatgttattctctactttgctctttcgtatctgtaagaatttaaagctgctcgatcaaaagctcatgtagttaactgcattgtaggaaccgtctcctctctagctgctactaaagatgctctttggctaaatcctccttcagtccgactgaaatttaatactgatgcagccattgatgctatttcgaagacctatggctttggagctgttctacggaatagttatggtgatgttgtggctgctatggctgctccttaccgcgtctgtttctctcctcaagtaatggaagtgttggctcttatgcatagtctccaatggctaagagaacttcaactactcgtgcatctcattgagacagactcactcttagtagttaaaggattactctcttcacaagagcttacttctgattttcattgcttgttaaataatactaatcatttagttttcaattttcttggagctcaagtctctcatgtttatatatctgctaatattgctgcccatttacaggcaaagtttgctctctcggtggatactaaatgtacatggttagagaaaatgcctctgcctttaatgccctttgtatttt

SEQ ID NO: 239734 - DNA, 1204 bp, Cannabis indica
tcacatggtatcagagcaattttcgttcatcaatggaaactcttcggataacagcaatggaggttcatctcacactcaacaacccgcatcaactggtacttctcttcccaaaacatctccggtcactttttctcattctctgtcagtacgattagacgaacataattaccttccatggaagcatcaggtgtatgctgccattaaaggaagcaggttgcaaaaatttcttgatcctacactcacccccctaaattcatcactgacaaagacagggctgctaatcgcatcaattcagaatttgaagattgggatcaacaagatagcattttggtatcatggcttctctcctccatgtctgaaaagatcctcactcgaatggtgggatgtgaaaccgcagctcaaatctggcttaatctgaaagaatactatacagccctcaattgtgccaatataagccaataccgaacactccttcgcaacactaaaatgcaaggttctctgggtgatttcttgctcaagatcaagcgtactgttgatactcttgcatccattggacatcgaatgccagctcaagatcacattgaagccatttttaatggtcttccaagtgagtatgatgtctttatcacctctgttaatacgagattggatacatattcggttgccaaaattgaagctcttttgatggctcaagaagttcggttggataaaggagccaaagatcttgatatcagtaaaccagaagcaaatcttgctaatcttggtcacactaaaccatatcatggaaatagaggtaccttttcttctcccactattccccacatttctggttaattaccctgctgctatggctagaggcacttcaattggtggagcttcctatcctgggatgtactcggcccatcatccccctccaggatttggtccatcactcaatcatcataattctcgtgccactgcaccacacagaggacaagcatcggcagtcgtgggagaggacagtactctgcttggggcaaaaacctcaatgccaattatgccacaagcttgggcacactatcactcagtgtttttacagatttgacaaatcgtttttgggtccagcttctcttcaaaactttacagggagtgccaaccttgcagaaatgccatcacaatatgcaaattctgacactgttgccgatcaatcttggtaccccgactc

SEQ ID NO: 239735 - DNA, 1672 bp, Cannabis indica
ttcacagtgtcaagtaatggaatcctactttataaaactcgagtttgtgtttcaaatagtgtggaacttagaaagaaaattctcgatgaagcacataccactccctattcattacaccctgcactaccaaaatatatcaggacttaaaacccttttattggtagtgcggtatgaaaaagcatgtgagagaatacatatctcgatgcttgacttgtcaatagagtaaagttgaacaccagagacctgtaggattgttgcagcctttgactcttcctaagtggaagtgggaggatgtcaccatggatttcatggttgcatttcttagaaccacaagtatgttcaattccatatgggtagttacggacagatttatcatgttagtacactttctaccagtgaaaacaatgtacatagtagattagtatgtagaactctatgtaaaggaaatagtaagattgtatggggctccaaagtctattgtatcaagcagggatctgaagtttagttccatgttttgagaaagtctctagagagccatgggtaaaaactgaagttcaggacaaccttttatctctaaacaaatcgtcagtctgagaggataatataaatattaaaagatatgttacgagcttgtgcgatggattttgaaggctcttggaataagtatttacctttgatagaatttttatacaacaatagttatcaaagtatcgttgggatggctccataagaaatgttgtgtggtagaaaatgtagatctccaattcactgtgatgaaactggagaacaaaagtctttgggtccaaaatcagtttagcggaccaataaggcaatagagaagatcaatgccatgatgctcacctctcaaagtaggcaaaagagtgatgaagatccaaaatgcaaaaatatagagtttcaggtaggagatcatgtattcctacgagtatctccaatgaaaaggattaaacatttcagaaaaaatggcaagttatgccctagatttataaggccttttgagattcttgaaaaggttggattaatttcatatcatctagccttgccttaagcattgtaagcagttcataatgtatttcctatttctacgttatgaaaatacatctcaaacccactcatgtgttgagttaataaaacttagagctccaaccagatttttcatatgaggagcaaacagtttagatccttgatagaaaaaatgaaaccctttggaataaaactacagtgctagtcaaggtaattaggggaaacagtaaggtgaaggaagctacttggcagttggagtctgaaatgggggctcaatatccagaattgttcaggttagatttcgaggataaaattcttttaacggggggataattataatgatcgcttagcttgattatgtaaattataatataattagggcttaattttggaattagacttttgattattatttatgcaattagggagatatattcaaattttaggtgtattaaatatgatatatgtgaaatttatgttatatattcttatgcccactaacagaggattgcaacgtttggcctataaagtcacctagacaaggtttagtatcttggttttagtgggctaatgcttttagacatttggaatgttaggagtatataagattatgagtttggaccatattacc

SEQ ID NO: 239736 - DNA, 1791 bp, Cannabis indica
agaaataaaaactaaatattcattttcgaatgcaaaactatttgttgtttctagcattgttattaatcattagtagcgtttagaaccttttataagttctataagtgatgtcttacaattatattagtgatatttcttaaaaattattttcataaaaattattagtgtttcgcattacttaattacatcaattacgatataacaccgaaaaatatacttttcaaacactatagatggttaataattttatgtaatagttattatacctaaattttaaaaatcaataaaaataattaacctttcacaacaattacttgacctttcaagtattatttcttgattatcattgttaattattgttttacctatatctatatatgtaattgttaactatatccattttaatagagacccaataactaaccaaatcttctaatttaacattttaagtataacaataatagtaattttaaatgaactataattatataaaacaaaggtctaaacacatcaaaatggctattgaatcttcaaaaacaaagtacaaatgaaagaaaataacgacataatataattatctaagtatgatcaccaagatgatgaggttgagatggaatgaagaaatcaagttcttgatgggaacgataaacggttgtgatgatgacacgtcgacaagatcaacatagaaaacaataacatctccacctttaaggccacgaagatcaaccaattgggaccaattttcaccaaacaaaaccacaccatcatctctcattttcaacttagtctcaatctgaattcccccaatgttttgatccctaacaacaatcccaaaatcatcacctttcaagaattcaatcaaatcctctgcttcttccattaccatttctccaatctctttaggcatttcaatttgatgatgatcacttctcaaatcagccacactcagtttcttcacacacaaaaatggttttatttcaaaacccaaattaagatcaagatctttatgatcatgatgaacattattttgttggggtttaggaggagtgatcaaaattgggttattttgggggtttattctaaataatgtgacattgattatgtaaggaatgttgtaaataattctcaagagaagaacatctccaactcgaataccgcgctcactgacaaatgtgtcccattcttgtccttcgattttgacacggccgtcaagcaagaacaccgttttaaggattcgaatatcgcctatgcccatagctcggtcgcttatgtaaatggtggttttttggagatttgagagggctttaagggaagttgctagtggatttgggaggaagaaggtgttggtgtccttcactacatttccaaacaatgaattgttattattatcctccattgttcttgaagattaataagatggaaaatgagggaaaattggagtgttttttctgagaaagtgaaagggaaaattggagagtggtgtgtttggtttatatatatggtgttctttggaattgtctttaacggattttggcgccaattctttcattatattacctaacttattataactgacatttgatttgaccgttatgttagttatgtttggagtttaatgaatagtgaaggaaaaggaaagaaagggaaaaagaaagtggaagagagagaaagggaagaaaatgaagagttgtgtgtttagtttttatattaccgttatgttagttattgtttggattttggcgccaaattgtgtaatcatattaccgttgtatatggtcgttatgttagtta

SEQ ID NO: 239737 - DNA, 2711 bp, Cannabis indica
ttttgatcaccgcgtacaaaaaaaaaaaaaaaaaattagtgttaatagtttggtaaattcaaattctttagttcaaaacggttttagaattttcgcaagtagtttaaacaaaactaaacaacctaattcttttatatatacttactatttttatttatttcttttatgaagtattgataatttggaccaaactttaagtaatgtatttgcctagctgttacataatattattttgaaaaatatgttgttatgtattataaacttagaaaagtaagaaaaatagaaccgttaccaaatacaattatgatttcaaacaaaatcaatttgttctcgagtgaatagttttatttggttttgaacttttaaaaaactgcatactctttaggtttggaaaaattgataaaatgtgccaaatgcaaaaagccctgaatggacttaaaatgataaatacttaatttgtataacactaaacaagcattgtggctgtagtttagtggtgagaattccacgttgtggccgtggagacctgggctcgaatcccagcagccacacttttcataatttctatgatcatttttcataatatatttatttatttattttgaaatgattattattaataaatttatttttgataaaattaatctcgagaatcaacatgcattaatttgaatatgagatcctttttttttccattttttttacataatgattaaacctactaaaagaaattaataatgacattgaaaaccaagatatactttgctgaccatgagttgcaaaaataataaagctacatgggacaaaacaaacaccaaaaaataaattatattaaaatgacaatctacaaattattataaaataatatagaatagataaagaaataagaaaagagaatgaacaaagaaaaaaaaatagaaggttcgagaacctttttgttttttattttttattttaaaaatttcacttaacaaaatcttgtagtttgttcatggtttttgattaattaattagaaaattgattttttttttttaatggttaccgaacaataccaaaatgagagaatgaatgcaatttttctaagtaatttattttaatagaagtggtcccatatttatacaaaaatgagtcatagattaggaaactaataaagagagaaatagtaattacaattaatggtaatttaattgaaaagatttaggtaaattggacatccatatatatatacataatattttataacactctcttccatagtaactgtcccattaaaaaccttgtcagaaatcctaagacaaaaatttggccaaaggaaaaagagtgcaatgtgaaataaatcctccttatttagacatttgtggagatcttctaattgacgaattccaatcttgcgcgccatcttctcaaatattgatattggtaatgactttgtgaataagtctgcaagattgatacttgattgaatatgttggacaccaatatgaattctctggaaatgtacaaaaaagaatttggcgaaatgtgttttaattatatctccttcaatgtactctccttttagttgaacgatgcaagcaatattatcttcatagagaactgctagtgttgaaacttttttattgagtgtaatccatatgtttcccgaatatgttatatcatgatctcactctcacacattctctacttaatacataaaaatcttctaaattttgtcttgttaaaaatcttgccaaaaaaactcaatgggacaaaacttaagctaagggaaaaagagtgcaacatgaatatatatctccctcatgcacacatgattcataattattttggtgataatatacctcataaaattattgttatcactttgaaatcatcaccgtatattatctatgaccatatatttactataactctttcagagtgtgtatgtacacttctaaattatggatgaggacttcctacatattaaaatttaattaactaatcgaatcattcatgtgtgtatacaactttattcataccaaagtttaaaattttcaagtagatatgaacataacacataatgataatataaattttcatttgcgataatattggtactccaagatcatatatatatttcatttttgtggtatgatcttaatttctatatcaaatgatcatatatctataattcttaatgcatatgaaatacttcaggacttctctactaatgaacaaattatatacatttaatatttctcaatccacaaaaagaaataaaagtttgttcttcaatcatttatactataatcaaaaactcttcaagagtctatcacaacgtataatttacgaatttatattgcatagacaatgatacatatttttcaaataataatttaattaaatttctttatttcatacaaaaaattttgttatatagtgcgtgcaactttgaatttatgtcacttaagacatgtattgaattcttctaaaattttttgataagacatatctcaaatttttactatataagaaactctaataacttttgttgcaatatttatgtgacacttaaaaatcatcataaaatatattccagacttaatcaaatcatgattatatttcttaatatttaagccttatttcaatcaatcacatgtctatgaaagttttgtacaataattcattttgtgtacaaatacatgtaacgtccccgcttcaagcctctatt

SEQ ID NO: 239738 - DNA, 2611 bp, Cannabis indica
caactatagaaaatattgtggactagaaaactcttgtttctataatggaaagcctcctcatggagctagaactcattggttcatgcatgagtacactcttaacttttgatccacaacaggtatatatacatatcataaatatataatattattaatgttaattatttattatgcatatattaacgttttttttttttttttttcattgtatgtacagattagtcagaaccaaataagtacagatcaaaataattgggtactatgtcgaatattttataaggaaagaacatcaaagaaagatgttgaggatgatcatcatcatcagaataataataataataacatttttgagcctaaaatgtttgatcttgttatggggtgtaatattaattacaataataatatggggactactgtagtatcatcatcatcatcttcaaactcttcttcttcaagctccagtaattattttaatgatgtatcttcaagtaataataataatgctacttataattattaatgcattatatatatatatgcatggcatattattggttgcatgcaacaatttctgagatatatataatgatgtattttcttcattaatgcaacaatttgtatcagcaaaaaatctcccaaaaaaatagcaatttttttttcgggggaagagaaatatttttgtggccgttaatatatatataggggatgtttataataattagttatatataatgtatatattattagagattaatattttaataattaattaggggcgtgatgcctaataacactattttatatgtgatatgataattgaggcaattaatattttaatatcacatggtcatatatatatatatattaatgtgcagtgttaggcaacataacaattaatgttcttgaatatttcattactagtaataattatttaaataatttctaagtaccttaacaaaaaaaaataattttcacgtacatatatatgtaaaatattaagaaaaattaattcaaaggaaacataattaaccaactaaacggattaacaattccttatgtgcctcttcaaaaaaaaaaaaaaaaaaacaaatccttatgtgcattggtaattaaattctgctgtaagtaatataatgctaagagcatcatctctaaattggtgatttatttctaaaatatatattttatattttatatggtaaaaggttatttactttaatttagtgccaaaaaatgattgaaattttacgtatagtgaaaattgattcaaatttagattacaattattaatatactacttttatgtcattttaatatagttttttttaaactttgttattgcattaaattataaacatttgacatttattttttattgttttatatgataaaattaatgataaagttattattattttatatttttaataaaataattaatcaaacatcaaattttgcatcaagttttgtaattgtgtattgaagcacaatactaaaaattaatgtaattaaatatatcacaaacttacttttttgtgtgaagtataaaacaatttttacagcacctattaaatatggtctaattattgaattgtttctctattaaattttctcgaaatgatcatatggaattaattattaattttacagcttatatttgtttttaatttccacactattaaacagtagtattattagatactattggtatttagtacttttaaatgtgttaataattataattgtaactggttaacgatactcaaaagttattttcattaaagtatatagaacctgatatttagtttgactaacaatacgaacatatgtagaaaaatatttgacactctaatatattttaacatttctctaatatattaactaatcccattattttcaagcaaaaaataaaaaataattaactgatcccaagaatgcctaatcgtccatgttggataattaaataaataaattcccctaaaaatagtaataataacacacatgaataaaaatgatacgttaattaaatactaaacattcatttgtacatttttgtagtatagtagtattattttgctaaatatttatagatagatatatatatgcatgaaagctagctagcactcataaaagaatctttatcttttcacaataaaaggctttaatttattaaaattaattattatttattttattttattttatttttggtgaaagaaattaatgattatatttatatttgaaggtatggtaagagagaagagtgaaaaggagaggcgcaaagcattcgcatcaagaaatttctttataattaattgagacaacaatgtaccaaaatgaaaagttactttttgttaggaatgtggggttcacttcaactcttttgttgtttttagaaaacaacctcaatttatagagagaaaattattagtaaacaaaaaaacacaatgagagggattaaaaattaatataatgacttaaaagtcaattccttttttttttttttagataaaaacgtttaaaaataaataaaataagagttagactttccggttattacataagatgttttctagtatagaagaaaactcaatcgtaccagttgcttttt

SEQ ID NO: 239739 - DNA, 1008 bp, Cannabis indica
gaatttggatgtcgtttttgtgttgttgacagttatgtagttttcgttttgatgacactaaccaacgacatcatattttaagtcgtttaccgttatttagtagaaattaaatatattttttactttgaagtttgaactatcaacttttagaattttacatattttcttttttgaaaaaattcactcaaagctttagtattcattttaaatgtgtccatttagttgcatctatttcttttttttctaatgaaaaattacttttattaatcattaaactctataattggacaaagtactaactcagttagaatagatttcaaactaaaaataagattatggtacaaaatagagactcgaataaaattatgagccactacagactgcttaataaaaataattgaaacattacataattcgataagcaaatttctacaaaccgaacaaagatatcatacaaatagaactatgtgaagcttgcagaacactaaaagtcaatcaatctctgcggttacttgttgccattgtttctatttgatccaactcaaagcctcacgaactcctattgtctcggctaaaattctccccaagtacaaatgaaaggtgcatcataagtttcttttgtcgcttcatcaaagaatgattattgttgtagtcatacaagaaactttaatcgtgtaagtagactcgattgaagtttcgattgtttgagtggttgctcactcaattgtccttaaccttaaccgataaccttagttaattaaattaattctaacctaatttctttagcgataaataaaattgcatcaattcatcaaatgcattgtcatgccgggcataggcggactaggcgtccaagagcacaaaaaaaaaaatccttttaaaattacttatttttattattaataattttaaaaaatatcaatttttttctaaataaaagttaaaaatattttttacttataacctactaaattttaagatggtcctgtgcattgtgatacctaactt

SEQ ID NO: 239740 - DNA, 2822 bp, Cannabis indica
ataatctattacaccctacaagaaaaaaaaaaaaaaaaaactattatagtatactattaccaatgaaaattcatttttatctaccatctcatcactacacgtgatgaatcgtccgattcaaaaaaactttatagctttcggttagtcaaaatagaatcaacccaatattaaaatgacaagtaatccatagtgatagtctttttccaaagagaaagaaataaacactttataattctacagtttttttttttatttatttatttctactttttgtctatgcaccatgttggagaaatggagaataatatcaaaatcagcaagagacatataataatttaggcatatatggtagatctcaacacgggtaatttgattggacatttacgaatatgaaccacagaatgacgaccgaatacatgcacctgggagtttagggtacgcccgtgcaaggcagacccacatacacatagaggtcaagggaaaacaaattatatatatattttactttttcttaaaaagttaaatttcgtgatcattacaaaagatgtttaccgggatagaggatagagataagcaaccttattgattgtgggtaaaggtccacttcgacacattataatcaataaattaaattacatgacgaaaataaacaacccacaaaatgaggagaaggactattacaaaatgaagagtaattcttaacttcccatcgagtctccttgttgttgagagaattaatcattacccttgagtcgctctccacaataatgaatatgcatcattttgccttggccttatctagggccaaacaacatgcaaccacctcgccacaaagggcatcagaaaaatccaactttgccctgcttacccaagccaccttgccttgccctgcttacccaagccacatcgagtctccttgccattgagagaattgatcactacccttgagtcgctctcctcaataataaatttgcatcctttcgccttaccttgtctaaggccaaacaatacgcaaccacctcgccacaaaaggcatcagaaaaatccaatcttgccctacttacccaagccacctcgccttcatggtttctagctaccgccgcaatacacattctttttaaacccacttttacgtcacaattcagtttaatccaatcatgaggtggaggaggccaagcttccaccaagatcagagtaggagtagggaggagggaagctctatagtcggtataagagtgatgaatatagtcaataaaacgcttcacattatccagattattattgtgtaccttatcattttggaccctccaaatagtattgtttcctaagattttcataaatggaataaaataataagaattgaaaaaaaataattgagagaaagtataataagagacaaacaattttcttttgtggttggggcgttaactagccttagtctacgagttaattttatttagtaatgtgtttacttgtaaagattctcaaagctatataggatgtatgattgtaagtttgccagagtaaaagtacgtgagagaattcaaccctaatccatgagattagttgggtatttatagtattggagaattacattagggtttccctttttccctctactggggagcttacaactgaacaatgtcttttggcttactcatgaagtccagctcatgaagaatacaatctgctaactaggtgaatcgggcttgagttgatcaggtcaaaactgtatctaattataatgggagaatattctgaaataactaccctgcgcttgttatgaaaagttttctctttaatcgcgatatgatattatggcagaatctaacagctggaactcccttatttataggagggaactaatagggaaaccaaaagagtcttccaagaatgcaactcattttccctccgggctcatgataccaaagctatcttgcagcttcaacctatcaagggcaaaagatactgtgagcacacaactaaaataacacccgaaaagttctatccaggtgggcttggcccaccatatccctgttgagggtcccattgataagtcttaaatgctaacttgggggccacgtgtccaattctggaaacatgaataacatttaccctaagctttcaggaagctgcacatggtggaagcttgctctgatccctttgttctggataagtggagattggagaaagaaataattgatttctcacaagttacttgacggtggaagttggcttctgcctgtgatgatggtgcgtccatgtggcagacgagcgtgtgttaggacgtggttattgatgagtcgttgtctaggaacagctatattttgacggctatttgttgactgacacgaaaagcaaaaaagagtatcttcatcattacttcacacctttattctgaagagcattaaatgcaaagatacacataaatctttgatctccctagccattggatggggattgtactttgttccgaaaagatcatggccatccactccttcctcacatggatcgttgtcctgggatataaatacccttggcaaccatcagttgccacttttactttctttttcaaattttcaaactctcaaattgcaccagacttgttgctatccaagagcttcgaatcacattcaagaagaatcacactggaagacgcgatggattactgccttcgcctattgctgagaatttgggctcgtgaatatccacatcttccttcgccagtgatcagcacagttaaaccaagagaaatcgcaagcctagattttcaagaggaaatctgtaacacctactaatgtaggcgtgttatcatgatttta

SEQ ID NO: 239741 - DNA, 1754 bp, Cannabis indica
ttttaaactcttaatagggtaagccttaaacgcaatcttaattcggcttagctcatgcggaaacttaatattcctagtcttatccaaaaatagaatagaataatacgaggagtcaaccttaggatatgactagttttagcggtgggtatgtttgaactgtctccaaaatcacacactacacttctctttctataaataacccaaaaacacaacacaacaaaacctcttactcttaagtcttaagtcttaagtcttaagtcttattattaggtatggatattattgtacgacaagaagaagaacccacaaaacgacacatattagatggtcgtttaacaagtagtagcctggatagtttgccggagggttgcctgtgtctgatactatcactcaccacacccagagacgccacccgatcctccgccgtatccaagtgtctcaactccgcagcccaatccgacgtcgtttgggaacacttccttcccaccgattacaccgacatcatttccagatcaacttctcctttgatcttctcttccaagaaagacctttacttacgactcagtctctcccctgttctcctcgacgagggcaataaggtaatttcacacccctctgttctatgttatatatatatatacatacatacatcgatcttatgtgtatatgtttgtttgtttgaacagagtattgtactgaatagactcactgggaacaagagttgcatgattggatctagaaaattggccatagcttgggctgggagtcgccgtttctggaattggcttcctctttctaactccaggttcttatcaaattcacaattaccataattttagtaatattgttagattcaaggatttgtgtgcagaattttgatgcgtaaacttttgaattcaatcatcttaatagttgattatgtttgtaaaatgaaacggaaaatttgtaaacttttgtaacttataattagtaaaatttatttttatacgttaattaagaatatcgtgctttagtaggacattacaattttagtattgaattgatttagtacatgttaaaattcgttgaagaagtcataattagccaaaattaaattaatgttgggtgatcaactcttttaatggagtgaagttcagattggaaattgcaaactactcgagtcactgtttaagtactttttctttatttgcaggttgtgttttttcaaatgtagttcggttttgtaattatgtagctcataatgtagttaagtaggtttttaggcacaatcagtatggtcgttttggatgtaagcaacataccttcgaactttaatttaataattgatgttggagataaccacttaggctaggtcaaatgtccataaagggtattgagtgtgtgtgagggaatgtagatcgaatcttaactgtgtaactcaaaaatttaatacaaaacgcttctatcaaaaaaaaatgttggagatttgattgtttttgctgaaattgaattttttttttattggacagatttggtgaagtgattcatcttcgaaacgtgtgttggctagacatatgtgggaaaattgagaagaaaatgttatccccaaacacgaactacgcggcttacttggtttacaacatagctttggggtttcagggattggaatttgttcgagtttcgatgaaatttcttggaccgggaggagttcttgtggaggagaacccggaattcgatgtgaatttgggatcaatggaagatgatgaacgagggag

SEQ ID NO: 239742 - DNA, 1217 bp, Cannabis indica
ttaactaaataatttttaagaacaaaatatttaaaaaagtgttttgttaaaaataattattatcaaccaattcttttagataataaagatgtttggataagaaagaacagaccagtttaaaatttaaaaagagaaatactaattgtaacctcctatattacaatttcttagtcaattttcatgttcgaaattgtatgccagaatatgttttttttttcactttttttcatagtgatatttattatagttacgatatcatccctataaatttttaaaaaacttcgaatagtttacactactaaaaacaaatttcttgatatttcagtttaacactcatatgttctaaaaatttcaaacttattttaagcactgtaaactattcaaaaatttacagggatgatgttgtaactataatgaaaattgccaaaaaaaaaaataaaaaaaaataattctaacatgtgttttcaagcacagagattgactaagaagtcgtaatatgaagttgatgatagcactcctcgtttaagaatggcttcctttgaaatacccaaatggattgttatgtattattaacgttcaaaattcaggggaaatatatacatcgataataggtgaggaagtacgatttcttaaaacaaaagttcaatggacaaagtattttttttattcttaatgttttatttttttttgtatttggttttttttttttaatgatgatgtatagaattattttaaaaaagtgatgtgttagtaatgttgggtgtgcaacaaaaaccccatattggctaagagaatgattataggtatataaggatggataatatttttttattagtatgagcccttttgggaatgtgcccaagaacaaaactacgagggcttaggcccaaagcggacaataacatacttagagtagagagagatgatgtccaacagtcctttacaagtggtatcagagctggatcccaacattagctatgtgaatgaattttctaaatgtcaaacaaaggtgatgagcctcgatgtaacctcacaattgaagatttgtatggtgccttgtatcgaaagtctacttgatattgtgatagtcaagtagcgtgtctcgttagtgattacggtgatacaagatggagatctgtgtttggtgccttatgtcgaaagttttcctaataatgaaggttaggcagcgtgttacgtttggtgatagcaacggtgaa

SEQ ID NO: 239743 - DNA, 1830 bp, Cannabis indica
gccacacagatctaatggcaggaacaaccaaactctagcaactagttgcttgggggctggctagggatctctggctcaacaacacccccatttgtccaacctttggcaggccagccccttagtggtgcacatctggttggccaatagggcaagcttcctctctaaaatattcgagagcaagtcatcctaaggtcattttttgaccggctaggcccaagaacgggtggaaatatccaagacaacatcaactcgagaagtgaatacaatcaattcaagcatttagatccaccaaactccaacaattggtgtgatctactcctgtcaacacacaggctgcaccaaccaattaggggagaacaggaagcagacattgcctagtatagagcttgccgaccatgcacaactgcccagggtaaggcttgtttgccatggccaatttcttacctagggctggccagccaaagccagatgctaagcctggggctgcccacccttaaacatactctttccttgggtatggccagtaaggtcctgaccaatccagggctgcatcccaatcaagaaaggccaatctaccaggctcgcagcatcagatccttctgtgcaagcacagttggatcaaataagagacatgataaagggcttggctgacccgaaaccatttgaccttgaactggataggtcaaggggctcaccattttagtgtacatcaatgccctgcccttacccaagttcaagatgccggtatggaaaatgtataccgggcgagaagaccctctagcacacatcaagtacttcgagatacagactaatctctataaggttactggtgatgtctagtgtcagatcttcccagtaactttgtcgaaaacagctcaacaatggtacttctacactcaattctcgtcctcaagactaataccatcatagttggaagaccttgttgaggtcaaacaatgacaaggtgaacctttgaaggactttatccaaaggtttatggccaaggcccccaaggtcaaaggcctaataaaagagagccgttatacaaccatattggggggcattcttccgttgagtgacttctggaaagatatctgaaggatctcaaccaataacatgaaagagttcctcaaattagcagacaacttcataaaactaaaagaagctgtcggataagcccagacagggaaagtcaacaacaggtagtcttatggtgttgtacagccccaagacttgccaaacacgcatgccagccctagaagtattggccagacctctagtggcaagaacattggaggaaagtgcaataacaacaattttggatggaatagtagcaaaaaagagaacttctcccatgccacgaaactagaaggagaatgaggagaagtacacctacttcaccctcctaatagagaaggctaagaccatttacatggctactcaggctactatcccatacaaggatccccatctaatcaaaagggagatgagcaagagggacatgttgaagttctgtcagtttcacaatgatttcaaccatgacaccaacgagtgttggaacttgaagagggagattgagttcctcataaggaagaacaatccacacttgtgtcattatgtgcagaacgactaagctcaggcacaagctacccagaacagagtccctatgccacctctaatggtaggtcacttaggggtcataattggcagaccccacattgcaggcaagactagcaaggctagggaatcctatgctcggaatctctgtcatgagcctaaaagtgacatcctggccattcaagaaaagggctctaaccaactcaagcttgg

SEQ ID NO: 239744 - DNA, 1365 bp, Cannabis indica
acctcgcggagatgctttaatattacttggggcttccggggagcatatgggggctcccgtatgcccttctcccggggaggcatgtcccggatgctgccttattacataaagacttagcgaataattcaagtattaagatgtttgatccacgtgtccctgttcggttgatccacgtatattgggcaaaatcaggggcaacaaacttcgattatgaattttctcatagtcttaaaaaactgtgtggtactttaaagtgttgattaatttaattaatatataactaagcatatttgagctgaagacatttaatgatatttatacttttggggagaggtttttgtgataaagatcacaatcaacagagagtgtttattgatgatcaaagaccaaattaaatgtacactcatactttgaaaatttatgagtcaattttaaccaaaataagtatgaatctcaaccattcgttggtggagactattatgttacattcaagtagtgatgatatattcaaaattatttatatataaatgataatatatatgataatttttcttatctttctaaactttgagaaaaaaaattatgctttatcctaatggattcagagaaggcaaaataatcatgttatttaagtatacctattttggaattagttatcttaagtaatttgattatgtctttaattgttagttttgtttttatttttgaaaggttaatttgataattttctgtaacagatttttataagtagttttaaatttaattgttttacgtaactagtttatttgtgtcatatttttaattagttgcttagtgtaattggtttctctagctctggtgaccgatccagtccctcgtacaacccctactagctccgacgaagctatttctaccattgacagacaagacagaccacaatcgaggttctcattcacaagatcaaaatgacttcttcagactgcaacgaccatgggagatcttcaaaaagactgctccaaacttgttctctatcattgccggggagtaagtcaatgtgttgactgatcgatttataaagccaaggtgcaatacaatagtttttagtttacaaatagaataaaaagcatttttggtgcttgttggttgactgtgttgttctcatcattgattccaccactgatagttgtgaagctggcatctataaggatggacagactcgtgagcatgcccttcttgctttcacccttggttttaggcagatgatatgttgttgtaataatgtgataaaattaattcaattcaactctatttacatttgccttttgtgggttatttggcaaagcgataaatctctcttcttcttctttctttttttttttttttttt

SEQ ID NO: 239745 - DNA, 3620 bp, Cannabis indica
ctggccaaatactcatcttgtgtcttatcttttaaccttggtgagttttggggaggagaacgccatatcgactaggatcttctccaacttttgtacgaggatcaacctcgtctttatgttagtccgtccttctcaagtgatgactttctaactcgagttttgaagactaggaaatgagtagtgagggtagacctactccagaacccaaagtgcagcaccacttttattccgagcagatcagaggtgaaggttacgggcgtttcatttgggaactcaggaagggatggtggtatcttccgtccaactggacatatattatctggccaaacatagctgataccattccagtgggccgtccaagccttagtgcctttgacattcctattgctactcctgccgtgaccgttgcacgtcatacccaccaaccatcgtccaggggtaggatgatggcccacacgaaacaaactatgcagaagattgatgcagctgactctcacatggcccagcatgccacgatgtcgagcgccgaacaggcccagcctgatgttgagaaagagacgagggggatgttgaagtctaagaagtagaggatcaaggcaaggttcgtcctgatagaccttctaaggccgaggaggaaggagctgctcaacctttgcgctttggaggctacaatgaggctggagaaccactgtcagaggctggtgacatcctggtggaaggtgatgactacgccaccgaggagtatgtcgaggcggttcctcaaaggaggcaaggtgcctttagggctcggtgggtgtctcccccatctattgtaactcaagcctagttgaggagtttggagaaggatggatacctgggcagtgtcaaatgctttttcccttttccaaatcatcgggcaactaatccaagggagggatactgtgcctagtcgggtgctcacactaaacaaggtgcgatgctgcctctgcacccgtacttcaaaaggattgcggactattaccacctttatctgacccagttcacacccaagggcatcaagtactgatctgcctgttcatcctctacgcaactcaaggatggagtgagccatctccacacgacacctactggctcttcgatttgaagtcgacccccaagcagagcaggtcgaggtacttctacttctctcagctggatgataagtggctgaagggtaccctagaccctgcggtcagcaaaatagggcacttcgtggatgagtattattttgtgacgggcatggagaccgtccacacttggttccagtagatccactcatactgatgccctcctttcacgttgaaacttagggagagggcacaaaaaattctccaactgccaaaggatgctcggaatatcactttgttgacctctgaggccaactttgtgaagtacaagctctatccagaggattttgtgccaaagcccgtgaaggagaagaagaagaagtctaagccaagccgagctaaggatgccgagtaggagaaagagctcattcaactgaagcgtgaggctaagttgaagggaggtgtcggagccaaacaatatgctcatattagggatccaatgtaaggttttcataaactattgtgtgtttattttcattgttttggagatattcatatttgggacattaaatcaatatacttgttagtaaatttagatcttggtaaaatattcccaatagtttttccctcaagtcctgggggctactttggtgagggtcttctagggttgaagagagtggcttcatcttccacgggtttctagctgattacgtgtggacacgctccgtggtggcgaagattgtggggtgttgcttgtggatgattcaggagtccctttcatcttagtcttttgattctcaatattggtggctttgtgtttgtacagggggacatctaatcgtccttccagcaaactgtttaacacctattgcatgtgggtggcgcgacatgagggtccacatgaccctctctcacgccgatgggcggcatgacatgagggtcaatgagaccctcttcttgctaacaggcagaacatgatgaggctccagtgagcctctcatctcgctagggggcggcgcaacacgaggctccagcgagtctcttagtttcgtgcctcttcccttctttcttttctctcattccgctgttatcccgatgttcttacttagcaatttttcaaggtcaacaatatggtttgaacatatttgtgcttaaatgtattgggtagggtgtttgaacatataagatcatcattttggcaactaaattcatgttttaatggaaatattgtaggttgtagctgcgtcacaagacagttgttgtatagtttaattttacatggcttaaactcaaattaacaactaagttaatattaccgataatcatttatttatgtatttatttttattatcagcttttatgtaaaatcatcgctaggccatcgtatgtgcaaatcattttaattcttttatatttctcatctcaaatcttagagacccaccaaagcataaatccaatatctttcagataatggattcttaaccatagcaaaactgtcattgggcattcttttgcctttaaattcttgttttgatggaacgtttaaagaaccatcttaagactttttatattcagatcttaaaaagaaccttaataaatttatatatatatagggtatgtctatagtaaacaccttagttttgtccttatgtaagcatatttttatagccataaaaatttaatctaagtaataaatttatcagtgtatataaatagttaacatgtagaatgtactagattatttataaaattatttttttaataatattcttaaattaaataataattatttaaatagattactaatttattcttacctcttccattattttttcttttctttctctctttcattcacaaactcaaaccagttatatatgatgataaaccagttaaaaactgtaatcctaaaagtcatcaagcaaacggtagtcaaagaaggaggaattcgaaccttactaaaagtcatagagcccagatccacttgtagttccaagactcgagagatagctctccgggcaatagaaaatctttatttttcatcaacaagctcagggatttctacttaataactcgttcgtagaccacctcattttttttcttcgaaatggagaagtttcagtacaagaaatggtattgaaagtagtcgtaagactatctgggacatcggaagaagccaagaaagcattaggcgacaccaatttcatgcctaagctcattaagtttctcgattcaaaatcatttgaggttcaagaaatggctgccgaggccctttcgggcatggtttcggtgcccaaaaattgaaaaaggtttgtataggatgatcggaatattgccctgcttctccaattgcttgacccagaacaagaacatgaaaattgttgctttcaatacttatgttgttgaccagtagcaatagcggaaggttattatttggttaaagtttaaattattttcttgaatgataaagttaattttaattggttgttaattttttttttgtttaatttggtatctgatttttttttttttaaa

SEQ ID NO: 239746 - DNA, 1820 bp, Cannabis indica
accatcacaacgtactagttgacgaagattccaaatacattagcaagacaaagagataatgaactaaccaacgagggggtctagccaaaccacccctggccgaccatggtgtagcaagggacgaccaccctccaggaaagcataagctggccaacttcttttttggcatgcatttttggtgcctctgtagctttcaacctaaacaggcattctcagtaatgaattagcttcaacaacccacataaataggggttcaacttcagtagtttacctattctttaggaccaattcataagttattttcttatttatttaatgtgtaacaaataggtggtatctcctcattttaagggatatcaacctactatcttatgtaagctctctcctatataaaaagcactaggtcaaacctaaaggcactgaggctctcatgcctaagctcttgaggtctagcactcaaaaccctagctcaccctctcttctacacgccattaacagtgtagtagagactaagtctccgtcacctcaatcccttgagatctttcttacattctcactattgtaatacatagagagccactctagaactcacaacacttgtgatttgagtggtattatctctcatatcaatataactaaaagggaagtaggtcgttacccgctaactaaggggggttgaaagtctataaacctactgtgtccttttatttgcttgctctaattgtttacacgtggtgatttcgatcatatatacaactttgttgtcggttggtcaaatttgaggtcagctgaagcaatgagagaaaggaggcacctaaaccacgaaataagatttagaaagaaatccattgaagcgaaccacagacgaccataagaggccaattatcgaggatcatcgtcaaaggagaagaagcacaagggacatgcttgatttgtgcatgaagaagaagggaagaaagggagtatgatgaagaacaactcctttattagggtttttaattggtttttggtatacgattagagagagaaaactatatatatattaaattgttttaaatttttcaataataataattcaacaacaacaataatagtaataattagagtaaaaatatgcactgatactcaatgtttcctttttgattaaatagaacacgtgtcacgtccaacacagaagaacgttatcctcactcaaaaaattaaaaagtaataacaaaaacaattaatgtgtttacttattatgactctgcacaaatttcatgaccaacattgttggacatgaaaaatctcctaaagaatttcatgacttacgtctaatcgtgttaatcatgagaaaggggtcattaaaaaatataaaattgttgtaagtgagataaacaaataaactaacaaaaaattacaacgttccaattagggcgaagtagactttggccccacttaaaattttaaaaacaaaaatatatgtttaatattattttaatagtagtgcatttttttttattagaaattagaagtttagtccacctcaatcttttttttcttcaacattttgaccccttttgaaattaagggtgtgtttggaagtaactgtgtaattactaggtaaggtaattattagggtggtaattacacagtttagtaattacactatattttaaaatgcaaggtgtatttggatatgaggtggtaattacatataaattcctaatgcagtagaacctctatttaagaatactctattcaagaataacctctaatttgttataaaaaaatcaagtcccgatttggaccagttataaataagaataacctctaaattg

SEQ ID NO: 239747 - DNA, 829 bp, Cannabis indica
gaatttggtttagaagaaataagtaggtattagattagactattcttaacgactgtatggtgttagattgaagcattgattaccttcacaggtttaaaggggctaataatcatacaggcacaaggggattcttccttgcgcaagagcctattccatcataagccaacaatatcgtgaatctcgcggtcccttccgtaagattgcaacaccttatagttgcagaacttattggcgatttgatccatctcccatagagattaattgtaaatttcttctagaatagcgtctctggcttgttcctcaattagttcttcctcctcgagacggatgacgcctgccattgtagtgacttaaaaagaagaagcaaaccaagaagttaatatccacactagaagaatagcacggctacagagagtcctccccttaaactgcttctagacccgtcatctcaaagcaaaatcctcagagaacttttccccaaaatgatccaatcgggaacacaagaatttgacaagaaattctcaaagtgtctcatccaaaaccataagggtcctagaaaaatgatcaaaatcgagtcatactcgacaatatcatcctacactcagttcttcaacatacattccccacaaagacaaagtttcatagagcctaatattatctaccaacaggacacaagctgtaacgccctaatgctaaggcacgctatagtaatttttcaattacagtgctatcgttactaatcaaagaattttctcgaaaatcgtatcaaattaaaacttttatattaaatattaaactttatatattcatttacaagttccgggatccc

SEQ ID NO: 239748 - DNA, 1134 bp, Cannabis indica
taaaataaaaaacattaggtatttatgccgcaatttacccttttatgatttaaagagtcacttaatttttgtttatggatgaaattgatatgagaacaaattgagaaacttgtatttatctgtgcactatattcgtatttcttgtattttgaaggtgattatatttattgttgttttcttcgttggtatgttagggtggtaatgatgcatctgaaaatactgagggattgtcaagggaagaattgggtcgacttgttgcttgtctttggataggagaaaacattggaaaacacacatagaataccaatgctgaataagataataataataatcatgaagcatataaaaacacttaagagatgccaaaggacaccacacatgacgaggaagatgatggctatgctactgatgatgaacaccataagtatgatgaaagcaatatagaggatgagttagaggatgatatgaaaaaggatcacaatattagagaaggtttggcttcttctcagtattaaatgtgtttcttttatagattatttttcactcaaaatgtcaggagattataaaattagtataatttaaataacttttaaaccctcttactaatttcactcatgaacatttatctaaatacatagttaagttttggtagagattttaaaccgaaagataacaatactattattttgaattgccattggtattcagataaattattttatgtaatattgtacgtacatgggttacatgaagtagtataaagggtttggatattataaaaaactaagattttataatttgaacagcgtgtgaagtcctccgcttcctctcatggcgaagaagaaacaggcgacttcgaagcttgccaaaatcgttgctgatgtcgagaatacctccgatctcccttcgatccaaaccgaagagaatgtctctgaagctactccgtccccaaacgcgattgacgaacagcctgccccaatcgagaatgacgaacaacctgcccctgagatttttctcgactcgagcgagaacttggaaggagatccagttgatgacggtccgtttgtctcgcggaagtcagtgagctgggctgaggaagttaagaaagcatatttcaatgccaaatcgaaagat

SEQ ID NO: 239749 - DNA, 1290 bp, Cannabis indica
agaacttctgcttctaccaaaagtgatgcaattggccattgaatagtaagcataatgctatgtacttcctttgagcagcgaatgacaatgcacattacatactaacaatattacttacaaatgttatcacagcaagaattcggaaagagcacaaaaccatatacttcttcactgttcattttaaacaagcttctgctgaccatatcacatcttcaagagatttatttatgtcaaagcataggcaagagatcttaaattataaacacttagtacaactcaatatgatataaatatatatatattttctttagttactttgtgtctgtggccaaatcaacttcagaagtcaacattgggaagaaacagtcagcatggccatatacatcaaagaaacaagcatcttgatcacatttcccaacacacatcataaatcttacgatcagaaaatcatgatgtaaacagagagaaacttacattctgcaagtctagtttggacactgccatcccaagcatcaaagtggcaccaccaaacactagagtggtagcagcagcaaaagcctttccaactgccaaaagagaaaaatacaattttggttggatagagtcaacagacaaagcagtggtttaccatcttaatttcataaaataattatagccaaattattgaacatacaaggcggaatatatatatatatatatttatataaatgaattcgttgggggcaattctgtcccaggtcgtaagtttaatagagcggccttcgctttggcaatcttaaaatgattcgattactttttaaccaaaaaagataaaataaatatacatattgaacatactttgttgaagcccttcagctgcagctttcactttctcaggattaatagggacatgcttgtctcgacgcaattcattagctgttgaggccgagaccccaaaactttgattcgggcaattcccatctgcattcattatcaattacattataatcgaaacacacccaaaaaaaaaaaaaatgaaatgaagaagaaaaggtaccttttggggccaaaggtgacctgaggcagagaaaggtaagacctgagtgggttcaaagcctcggcattgatagaaaggcgagcgttagggtcagagggaatatcccatttggaggcagagtataaggaaggcgttgaattagacgtctcctgatgaaatagcttggacggcagagagtggcgcgaacacctcgggaagcgcgtcggctaggtcttcacggctcagtcaccggagctgaagagaagaagaagaga

SEQ ID NO: 239750 - DNA, 697 bp, Cannabis indica
taccttattaaagatagtacgaccacaataaactactctctcaaaaagctaagcataaatcttctcataatggaatgtgatgggattccaatccttgattcaagcaagaaaaccactaaaccacacaacaacatgcaaaaaacaaataaacaaaattatgccaagggttgtccctctattagatgcttgaactataacttttgtagagttttgtttcatgaatttttttccattgtaaaaatttttcttgtattataaaaaacgatgtaaatatccccaataattgtattttattcatttctttaaataactttttgataatgatataacactaacaaaatattaatctggctcaattcaagagtagacaaaatatacattcataaatagcagtctaattataaattataaatatatgtatacgcattcttaaagttattatttctatgtttaatgtcaataaattgaattttaagtagcttaatgctattaaataaactcttgtactcaggcccggccttcggcataggcgagctaggcctgtacctagggcccacccagccgaggggcccaaattttttttttccttcttttaaaattatacattttttttttactaattttaaaaaatactacattttttctaacataagggtctaaaaaaaaattttctctgtcgcccactttgtttcagggc

SEQ ID NO: 239751 - DNA, 1734 bp, Cannabis indica
accaatgcctcgagattccttcttattatcattctatgagaaacccatctttgtaacttagagaagaaccaattgttgaatttgtgttgcccagttgtggagaggagtctcccttttgcaacccatttaaatgatcatcgggttgtctactattacccaatgtttgtattttgaatggtggcccccatccttaagcccaattctcgacctaacccataatatcatcattaatccccacatgatcacccttatccccactaccttatgccacatcatcaaaactcccatgttcaataactgtttcttccccaacttccccttgtttttctgcttcttgccggactatctcctgccagttactgttacctgatgcttctctcattacctccgcctctacttcacttctttctccacatccagtcatgaattccacccttcttgcttttgtcctacttctcaccagaaacactgcatacgcttcaaaacatgttggggtaggatcgtcttccttcagccaaacaccatatttcgacacccctattctatctctccctcgttccattaactgcattttctcacaatccttttgttcatgtccccaccatccataattgaagcataacataggtaaacaatcaaactttagatgaacccaatgttcctcaccgactatcttgataaatttacccacaaatatacttgtatcaactagaaaagctattcttgcatgaacatatccattgaacatcacctgctgaggactactctatcaagatatctcccaccacccctgtcattttttccgtccgctggacattagctaaagtaaaggattttatcaaaaatccccaaattctaacccagcaacgtacagtctctagattaacatctttccactatcccgtggttaactagtcttctactatcaacaaaccacccccatacaaccaaggctgcttatcaagaatcattctagcatctttatgattcttaaacgatagtttataaatgtatgatccccctatttctccaaaaattttactttccaatttaataccgatttccacatacgcccaaagacagtcttcagaaagtttccattaacggaccgccttgaaatcactcttccaattaaatacttttcaataaattgtattgattcctcctcattaacctcccaatcttcttcggtctacatagttatattatttgctctattaacaatatcctctattacttgcccagtatttatgaacaccattaaaccaagccacaagatcctaaccttacgaaagagtccttcagaccatataagtctacaaggtcactctaaccatttattttttataatttttaactatcgggtatttaatatctaggttatttaaatatatatataatattatttataaatttctaataagtaaaatgatataatattataataaattttatttttctaagttatgatttataaataataaattatatcataaaataactaatttataaatttgaaattattatatttaggatatgtatgaaaatatttaggttaattttaaatttattattatttaatttatcatataagataattttaatataatatttcaaattaaaaggataataatatcttttaatttaaaatatatctaatattaaaatatctaatcttattaaataatttgaaagttttaaaaaattaacaatttttaaaaatctcaccataat

SEQ ID NO: 239752 - DNA, 890 bp, Cannabis indica
ggggcttggcacggttctgatgccaattgggcgtctcattgcctatttcagccgtactttgtccactcgggcccaatcaaagtccgcctacgaaagagaattgatggccattgtcctagccatcctgaaatggcgactgtatttattgggctgtaaatttcttgttcgtactgatcaaagaagcttaaaatacttgttggaacagcgtgttgtctccctagaacatcaaaaatggctcactaagatcttgggggtatgactttgatattcaatacaaacttggtttggagaaccgcgccaccgatacgctatctcgtgtttcatctaaggtatacttggctactatttcaattcgtggtgtgttttctactactaatttacaagctactattatagccaatcccgatctcgctaagatcatgtcagacatcgctcaagatcaagattgtgggggtttttctatcactcatggctgtctcactttccatggatgattagtattgtcagtttcctctccatctatcccactcttactgcaggagtaccagcagtaaaatggggggccattccagggttttcaaaacattccagcatctcgctgctaatttttattggcaaggtatgcgcaaagatgtcaaaaacttcgttgttgaatgctcagtttgtcagcaaaataaatacatagctcaatcaccggcaagtttgcttcaaccccttcccattcctaagcaagtgtgggaaaacatatccatggattttatcaagggcctcccgaggtctaccagctttgattctatttttgtggttgtggatcgcctcaccaagtatggacacttcattcctcttcgtcatcccttttcagtcgttaccgtggcagcggtgtttgtcaa

SEQ ID NO: 239753 - DNA, 1067 bp, Cannabis indica
cttgatttttttataacaaattagaggttattcttgaatagagtattcttaaatagaggttctactgtagttatcaatctcccatttggtgctcgcacgattgagagcatcaatgaccatactagagtcactctccacaatcacaaacaaacatcctcgaacaatccttgtctctaatgctaggcaacaagcttcggcctctccacagagagaatcaaaataacacaaacgcttagtcgccaccaaaccaccttacccagatggtttcgggcaacaaccacaacacacatcttacgcatgcaatttaacatcaaaattcagcttgatccaccctagagatagcatcagaacaatatgagggagaagagaagctctgtaatctgcataacagagagtaatatagtcaatatagttcataatgttagtcagattgttattatgtatatttcgagcacgccaaatagtatcaacaactattgacacatatatagaggaaaaattcatcagcgttgattcttctttctttaagtctccacaggaatttgacacaatcccacattcgagtacctgttggtttcatggtactaaatcaagtaagtaacagaagagttgttactaattatcattgtaccatatgtccaagatcaccatatatatatattaaactaaaactacatagatgataataatatttatctctcgaaggctattagagtatcctcgattctttttgtatgttgtattcttagaactgtgataacaaaacttacaccttgattttttagactttccaccacacacaagaactaatgtgagctagtaaaaaaattgcatataaagttcttgattatatctcagcacatgagaaaaaggtttagtggtaaaacttttttaggtttttctataaaagttacgtataagtttttctatttctaaaactatatagaactttgttatacggtattaaataaactcaataaaagttttatttaattaattatttaaattttaattatttattaaatcatatttaattatttaaataaataatataaccgaattcagtt

SEQ ID NO: 239754 - DNA, 1745 bp, Cannabis indica
tctaatctcaaacaattaaagtgactccaatgttcatagaatctataaagattcaagttggacacccctcaaaagaaagctgctaatttatcaatctcaatgcaatcagtcaaggaattatgcatcatattctctcttttttctttttaaagggcaataagtgaacagttaccatataattgaaacacggtccattctatgaacgtggtaaattgggtttgaagttacctttaaaatgctttatgagaccgtttaatccaaatttaccgggtaggagttgcttgaacatgttgacgtcagaaggggacactaatcaagtgatgctgaaattgatattctactagacctcctccatacacagatcaaatctctatctacatctgcattaattcacattaaaaatgcatagttgaagttgttagatagtgatttatccatttctaacaaaaacaccaaaacttactttccccaaaggagcaaaagagattgggaaccaaaacaaaacaaaaacccctaaatgtttaccaaacaattaagtgttgagtgtgtttgtcaataataattttctcaatatgatttaattaatctaaattacaactgatataattcagttaactgaaaagatggaatgtagacaagcagaattagaaaatatttccttcccactcgtgcttagaaggacaaactaaaatagcagagaattatagtacatatagcagagaattgattgataaaagttttataatttactaataaaagattgtaaaagttcacttattttgaaacaagcattaggataagtatgaaaaagattaattagaggtcattacttgttgatttagcaaaagagaaaacgatttgatcttgcattttaaatttgaacactatctcttagtagctaaacgggataaaaatcttagaaagaagggaaaaaaaaatcatatccctgtaaaaagagctagaatgccaaagtagaatagagagaatggcttagaaaaatcaaacaaccagatatagtttcaatcgtttctttctatgtttcaacaagagaactcaatttggattcaaatcagtatatttataaaccactaacttatcttcttctttgtaaactatttttcagaacaaaacacacaaccatagaagcaaagagaaacatagatgaaagggcatacctttgagtgaagtaattgtctatcctcgtctccgatcagtaagtgaacgaggttaggcgctgatgagttactgacagaagatggttggtgaaaagagtgagaaacccacccaaaacaatatcttaccgttggcacgatgttgtcgcatctgagttttggcttggagtcccatctcaccgtcggcacgcacggatttggatttggatgggttgggtttttgggattcgggtactatttttttaaattaacccatgtgattttttcaatttctcgaaccgcacccgtaccgtaaaattaaaaaatcgcagaaaccgcacctcaaaagttagttgtgtacggtgcagtttttacttttttttttttttttttttttcaatttttgcaatttggccttcaccaacaaataaattatcacaaatacaacaaaatttgaataatacttttcaaaaatatcataatacttaaaaataaatatgaaaaaaaaaataagtttcaataatacaataattagtgggctttgggttaacattcacatattggacttaaataaatataaaaattaatattttt

SEQ ID NO: 239755 - DNA, 2917 bp, Cannabis indica
ctttttctagacatgtatatatacatatatatatatatatatttatatatgatggagattagagcgtctgaaaccaatcattttattgttactttaacagtaaagaagcaagctagaccatggaatttttattgccaatctttccatatatacatattgttttgattaaaatctttgtaaaatatcgatgagaatctatatgtggttgcatataaattaataacaaccatgcatttaattattacatatttataactatatatatattatcatccaatctgcttgccaaaagcgaaaaaaaatcatctttttacaaaaccaatcatggcctcataatatgaggtccctccctagtaaaattgcattgaaagaactaatatagtttttttttttaattattgatagaagccaaagtgggtattattttctacaaattttaagaaatttaaataaatttataatgcctaattcttagttacaataataataaaaaaattatgtgtgtaacaaattattaaaatttttgatttttttttttaatttctgctatagttacaataaacattgtcatttatcttaattaaattcattccatacttagagtgtattttttgccaactccacaataaccccccatacacatacacttataatttacatataagaaaggaaaagaaaaaaataaaacaaagttacaaacttattataatataggtacaattagttaaaattctaatcttctctcaaatttattatcatattaagtagaagtgatcatccaatctaattttataattcattaatctttttgtaataatttgatctaatccaactagattgctaatattcgttttttaaaataattagattttaatttatagaatgcgattttagctttagcatatacaacgatcacataaaattaaatattacaaattacttaattagattacaaactaataaagttatcaatcttactatcttaatacaactaaaatcctgaagtaactaattataaattagaaacaacaaataaaatgtttccaaatattcaacacaacaactaatagtaagatgcaaattttagaggtttctcaaattatatatggaaagtgtagtactagatgacacttattaatatcttggcataaagtctatgaccatgtagttatgcattttcctacataagtcatataagtagaccggtacattacatgtaaatgtatctcatcgaacaatcaattaatgtatgagtataaataatatgtcaggaatcatacccgtcgagaagatctattgttgaatcttatgtgattaacagtgcattaacgttttgttatatatacttttgaaaagtggaaactagattccaccatcctgaatgaaacaacgtcgacgtcatcccaaacatgtcagatcagcaattttttgtgttcacgcatgtcaaaccaccattaggttagaagagagttgacaccttactaatgctcttcaagcgtaaggcaaattgatacatattgaataaatgcacagaggttgagctgcatatcaagtaagtatatcatcaattaagaatgatgtatgctatcatacttcacctagaaacttcatcttactaatgttcaactaaatgtagtgagcacaaggaggagcttcaagcgaggagtagataatattaaaattgtgcaagagattgagttctttaattagttcaaaatttgagtagatattgttgcctattaattttcataactgatgtgatttcatatcttttgtttgcagatgacagtttcttctttctggaagcctcagtggctagttgtgttcgcttaagagaaactctacatcagtacgagaatgcttcgggacaacttgtgaacttgcgtaaattagtggtatgcttctcatctagtattcctcttgattttcgtgagtatttggcccacattctcggggtctcgcttgttccttgtcatgataaatttcttgggttgccttgttttgcgggtaaaagtaaaagtggtctgtttcagccaattaaagataggatttggaataaactttttggctggaagtcaaagctcttctcccctgttgggcgtgaagtgttgctaaaatcggttatccaggccattcctacttatgctatgagcttatttcgtttatcgattggtattattaatgagattcaccgtatgtgtgccactttctggtgtggtggggacgatgataagaaaaagatgcattggtgtacatggcctcgcctctgttgccataaaaatgatggtggtatgtgcttttgggacatgtttctgtttaatcagtcgcttctggctaaacaggctgctcggttatataactcgcctgactccctggctgctagggtaatgaaagggttttacttcggtaatggctccctgttaactgttgaagtgacaaagcgctcttcttttttttggaaaagtatcttatggggtcgtgatctctggaagaatggctgttgttggcgtgttggctccgttgagtcaattagaattcgtgaagacgtgtggatccctaaggatcatgtggggaaaacgtactccttctcgtgtgggccgcacctacaaagggttagtgacctcaaaattgattctggaagatggaattctgatcttgtggaggagttttttgacgtaggggaggctactgccattttgtctatcccgtgctccttgtttgatatcaagataggcttatttggcatttctctgataatggttctttctctgtaaagagtggatattggagcactatgtccaggttggggtggggccaagcttcgggatcctttggttcttctcggtggtgaaaaattctttgggaactgaatctcccgcctaagataaaaaaatttgtgtggaaggcatgtctgaat

SEQ ID NO: 239756 - DNA, 1292 bp, Cannabis indica
cattccaccaaaatggtggaaagagcattccattgaaatgtcattccaatactttaaaatgcaaccaaacaaaaaaatggaatgaaaattatttcttttccattccattccatttcattacctccaaccaaacgctacttagttcctaatatcatattttcattagtttcactactcaaattaatagactaaatgttaaaatactcatccaaaacgacaaatattgtcttcagaattgagtagttaatgaatgacacatgtgagaaattgaaaaaagaatattgtccttttttgttgcagtaagcaataaattcttatatatatttcaatatgcagtgtaaatatgtatgttacatattttctttattgtactaatagactaaataactataacaatgacatgttaaagtgaaattcaataaaaatattgagtgtcgcgtcactgtatgtaatattttagcgaaaacattcaccataagtgaaacacactctactctagagctcaatggttatgttccaaatgtgtgattcttgttccaaaactctcaaaatgacattcaccaaacgagatgtttcatcgtattcgaattccatttcctctgaatcaactacaactcttttcggttttgtggatgaataggcaccaaacaaaccgcaaccacaaactctcatctcaactcttttggagtactcatcatcataataattcactcctttaatggctcctcctgagttaaacatctttgttaacccaattggagcaaatctcgctccattggacaactccttcactggaatcaccgtaaacacttcatattctcgcgattttagtgtcaccggcaaagatgcatctttggggagatacactgcttctcctgtaaaattttaccacaacacaaattgtataagtttcttatctctaatgtttaaatttaaattcagttgttagtgataatagttcaaaaattcaacattttaaaatatatactatgtttaatattgattgatatgcatattaatattaaatattttcacacatagtattatataaaaatattatatagtattatataaaaatatgatataatacgtactaaacagactcgaatacatctaacacgatgtttggtagggaggagagatgagtggatggaaaagggtggagggagaagagagttggaggaagacatttttcctccaaatctcaaaaatctaatccctcttcatttggaacaatttaaaaaaagacaaataaacatactaatatcaaattatcctctaaaaaatatatt

SEQ ID NO: 239757 - DNA, 1817 bp, Cannabis indica
acaatctcaatagttcatggggcatttttaacgaccttaaaagttcagggggcaatatttggtacatgtcaaagttcaggaggcaaaaatcctaattagacttattgtgactaacataaaaagagatgtccccgaaagtttagacaataacactttaatgtctgaaaaatataaatcttaactaattataatagtacatataggagttattcaatactaaaacaaacgaatcatgttatctaaaattttatatatatatatatatatatgacgttgcacctacacgtagcttaattcaactaacacttgacataacatgcaacttccggataggagtatgtcaggcaggtcttacacggggctgatatcatatactgtcatctcggaagcatctagtcgggctatcaatgtgttagccagatgatagaagatcagtgtaccgtccatattacttcgtgagtaatttcatcaaaaaagaaagtctcgaaaagggtctggccaggttgtcaacacaccatctaggataaacgacgtaaggctacacgagcttggtttcttctttaagcaaatgctttagaatatagggatatttacttcctggttactccttttacaaagctaatgtaacaatcttttccctataaacagtgaatgaagtcacagaaggagggacctaaaattctaagagcatttctttggaatatatcctttctaaacatcttgagaactgtagctacaattcactttattttctttagtgatttgcgcgacattatctcaatattaaaataactaaaatgggagtaggtcattactcatctataagggggtcgaacctctacaattcctggtaatctttttatttatttattatatattttcaactctttatggaacttatgaagcttttagaaggtcatatgagcacaagagtgaggtcctgttgtctagaataattgatccttgaattctttcttattagggagatcaacgataatcatgcgatcccccgtaaaagttatgaggtaaaagaaaccttttgaacaagtcttcctcaccgaacttgcttttgagggtatacatacaagtaatttcatatggctcaggaccttcccatcccagcatatggtataaagacctcaaagaggccaaaatcctataactatttgggtttaattggaatggagcaattcttacataatcacattaatatataaagtaaatcttcagaggaaggatagcccctacacgtatgtgttcgatactttaggccccaatttttattgagtcacttgtactgcactctaaattattggtgaggcaaccaggtggaaaataactcctctcatctttctcaatcgatcggcacacaaagccattgccttgtttaataccacaagagtgtaaaaaagggccaacatatgaggctattgaagttacttttgactcaaaaagttcaacctcaaattgcactgaggaattttaggacaatttgagtttatgagctttttggcatgggggcataatatggacatataaagcacctgacgaaaaagtaatgttaacaggaggtaaaaaaaaaagtttggctaaatgggtattttagtaagataaaaggtttcaagccgggcagcttctcgcaaaaaagaacgtttaccctcaatgatttcacctatgagtcgtctaaattgtgctaaaatgtttaacatgtttaattcctcagcatgattgagaattttcacattattttttctcaagttttgttttagggatttcctctgtggtttctagcctacactagctgttttttttttttt

SEQ ID NO: 239758 - DNA, 887 bp, Cannabis indica
taaaaaaatcgtaaaaatcgtaaaaatatttaaaattttgtgaaaccgtatttttgtaatttttttgttgtttttatgtttttgtgaaataaatcctagaaaaaacaactagattttagtataagagaagaaaaatattaaattaatccattattgataaacactagcttacatatttattattcacttgcctcaatcttcctacctttcctgttataagcatcgatttttccaaatgatctaataaaagaccagccctcttcctctcctctcttacaaccttttattttctgagaatcaatttgaagatcgaattaaacctcataaaacgaaagataggattggagttaatttcaaagaatcggttgaaacatatatgttggttgcaatatgagaactgagagtcgacttcaagaatcgattttgcttaaggagatagaaggtcaatttcaatcacttgagaatactctaggaaattctagagctttaatcgcatatggattctaagaaatgagaaattcatatttaaaaattagatttagcttagctcatgttttgtgttagggttatacgattaaaattaaaagtaatattaatttttaaaaacacatcttaatattttgacaaataattagatttgatgcctcgaggagtgagccctcagcaagtcagcgtgacttggggaacgaagaaagggtgtggaggaaggatttgatggctccactcgattgcacacgatgtgcttgcgagacatatattttttttttaatagcagagagatattttggttagaatagctcgttcaaacaaacaaatgtctttggtaactgtcattaatttttaacaaaaaaatgatcatggcaacaccatacacattgagagtaatc

SEQ ID NO: 239759 - DNA, 962 bp, Cannabis indica
tagcagccttcgagtttcttggaagaaactcgaagttctgttagggttttctttcaatttcgtgtaaggttggaaatgacctaattcgagagtgttctaagggttaaggggttaaaccaaatgacagtgcgtttgggtgagtcaactgtcgtttgactcaagaatcaagggagtcaactcgtgtttgactcacagtgaaaggtcaaaattaacctcgggtaaagcttgattaaattctgttgtgtgtaggttaaattggtaaaatttgtacaaaaacatacttttgtgattattaagagtgactgtgagactggtatcaagatgctgaaaggaacctattccagttagaatattggtaactatgtccatcattgtaaatatctctataatcttttattaagttgtaattttttatttattttcaaaatttgtaatgttgcgacccataatgtagctaaataggctttcgccaaaaatgttattggaatagttaagctttcttctataatagaatacattgtatgtaatcccggtgaggtgtaactcttgttttcttatttttaatctacaaacacttattgttaaaaaataataaataaaataaaataagaacttgacttttcttcctcatgaaattgtaaaataaatgacttggtgtcattggagtgttctcgttagtgtcataggagatggacaaccgattctcattgatgttacctatctaattgatttcgtatgctattacatcaccattcgcctttacaaatgctgtgaataactgaatattacccaaattcttttaatatataatcttttggtccaaattctaaaaacaaaataaatagcattaccactactttaataaataatacatattccaatatatttttaatatgatattgaaaaacatcttgttgatcaagaaagttgtatcataaatagggcctttaacaaacacagct

SEQ ID NO: 239760 - DNA, 1505 bp, Cannabis indica
tcaatttcacaaaggatagttaattgcctaagagacttttggtggggagagtacaaacgaaaaagaacgctccacactattgtttggcattccctatgtcgatcaaagctcaagaacgggttaggattcagaggtgtgcaaacaatgaataaagtgtttccattcaattgggcttgtaaggcgttaatggacaattctaaattgtggagcatggttctgcaagaaaaatatatgaaaggaagaagttgttttgatattgtgagaagcattggagattcaactatgtggaaggcaattttggatactcgacctctgttgttttatggtatctacaacaaaattaagaatggagctagtacctctatatggtttgatccttggatttcccacgtagatcgttgtccagtccctcaatatggtgcaacatttggtgtggcttgggtgaagcaattcattcataatgacaatagacggagtgaggagatggtaaaggattggtatgcggatgaggatgctaaggctactttaaacattgatctgccagatgaaccaaataatgatagctggatctggctaacgaaaggaggtggagagttcactattcgattagtgtgtaagattattcaagggtcatttggtgaaagtaattttgatcctatatggaaacgaatatggaaatattttcttcatcctcggctaaaacatctatggtggcaattacttcatgatgcattactcactaaaggtaaattgtctgcctttatgaatatatgattgaatctatgtatactgtgtggaaattcaatggagacacaatccattttttctgggagtgttgttatgcaagagctttgtggtatagtacaagttaggaaatcatcacaacacaagtaaatgtgggaaactagagagaatggagtcaatggttctaggaagcatcaaatcgacctccaaatgtctctctaaacgaattcatgggaacaaccctttgtattatggaagtggtccggcgggaacagaataagaagatgcatggagaagacataactccattgcaacaaaaaatgaccacggtcagagagaaaatcaaggagcattctttagtcgcctttaacattgttgatcacattatacttttgagtcccactccaacatcatgggtgagttgcaactctgatgtgaagataaatacaaaaaattataggttagcactactacaaaaatgggttttcccgacgtttttaaatagtcgtttaaagtattcccgtcggtttctataatcatcgcctatacgaccgtcgtaaaacgggcataataggcgacgtttccaaaccgtcgctaatgtgggtttcccgacggtttaaaaccgtcgcctataccatgttataggcaacagttttaaaccgtcgtggatgtaaaaaaaaaatacaaattaatggcacaaaaatttatattttcccccatttttttccttccattagctttataattttacttaaattaaa

SEQ ID NO: 239761 - DNA, 1721 bp, Cannabis indica
atagttaaatctggagccacattccaactgtgctcgcaatggactccaaatcccattttgaatgttcacaattgggctgtcaatccatttgggcttagcgaatgggcccgtaaactaactttgaatgctacaggtttacacgtgtcatttttccaaaagcacggataacaggtggtattagtattctttctagtacttctagtccacaaggtcacacccagaaaataaaattaattagtaaagtatcaacgattacaaatgtaattgacttaaataaatttagactccctctagtgatttgccgcaaatatttataatctaccttgctaatttgatctctgaaatacactaaatagtgaactctcttaagcttttgacgtgttctcacttccttccgaagtgagttttggaaaactcttctcctgaaaatatgttctcacttcttcccaaaattagacttagaaaagtcttcttccgaagaccaccacttgctcaatgattcttttcaacctataatattttatgaacaactagagataattaccaccaaaattttagttcaacactctatgtttttagaaaaaaatatactctcctcgcagaactaaaatatagaaatatgaaactagaaaagataatagaaaaatttactctttaagttctatttatacacttattcaaagacacttgcaacacatttttaccgttgtagaatttattttttttttttaaaaaaaaacaataaaacttagaattttctaaatttgcagtaacagaattgcaagctgatgcgacagatcagtcaagatcatcttttgtttccatataagtctatagtcacaattttagctccaaaatctatcataaaaaaaatctatcataaaaagatcatacattttgctatacatacaacaaaaatcgaagctatcaatcaaggtaaatcaatttgacatatttttcaattatttacataaagagaattcttaataaaataaatcagctatcaaacacaaactaagaaactaaaattaaaatttaataaattaaataaaataatatctcgacaaataaattaccaaaaaaaactttacaaagttaacaaaattactattaaagtaatttgccacataaataactatatttaacttccgattgtaaataaatactttaattttcggagataataatatttatattatatttttggaactccgtagatatctaattgttaaatgttacgttattattcacatattattttcttattagtatatttaaactaatttttttaaagaaaataaaaaatttaataactctgaaccaatcaagaattgtcatgacaatttactaaatacttaataatatccagatacctactgaagtttcaaattataacttaagtattattattaccgtaaaaaattaaacttaaataattatttacaattaaaaattaaacttacataattatagggcaattactactactattttcacaacaattcatataagctcaaagtgagtattatggcttgttcttacatagcaattactatactttcctagtttccaaatattatttttaatagaaaagcgaatttgcagggcaagaatttttatttatttatttgtctgattatcatccaataagaaaattaaatttatttttcccaatatatttagaagagaaaatgattaccccaaactctatttagaattac

SEQ ID NO: 239762 - DNA, 956 bp, Cannabis indica
gcacatgcacatgcagcatgaacatatgtatatatacatatatatatatatatatgctatacaattaatatgcaaaaagtaaaataagtacgtacgtagttaattggtttaaatttgttgactatttgcaccaattaattaattgttagggcttgcatatcatagaaatatatttcattaaacaaatattttaatatataaatatagaacttttagctcataaatatataaaaataacaaaattttacatttctacaaatgtttttttttaacaagagtgttgttttttttgttattttgacgttgctcttataatgggaaggtaatatttttctctaaaaaataacaagtgaaaatttgtatgtataaaaaatctgtaaaaataataaaagaaaatctatttttaagtgtattgtgtaaataattctactgttaattcttattggtagaaacctctttatttttagctagaaataaattcatacattcagttgcaaacatgttagtttttttatacacgtgtaagtgattatttaaaaggctaattatgatttttactcccaaactttgatatgtaccaaatcatgctcttaaacttttaaggtcgttaaaaataccccctgaactattgagattgttagatttaaggacttttgtataattttagttaaaaaaaagaaaatctaacatggacgaaagttcaggggatatgatttagtatgtcaaagttcgagagacataatttggtagatatcaaagtttagagagcatgatctagtacacaaacaatcacgaaaatagtaaaattgaatgaaattaaattataaaagtccttaaatctaacaactcaatagttcaagggaatttttaacgcccaaaaaagttcagggggcatgattgatacatgttaaagtttaggcggtaaaaatacttattagcctatttaaaattttatt

SEQ ID NO: 239763 - DNA, 1097 bp, Cannabis indica
cgccaaatgagcttatccttgtcaccattagatagaagctccacacgcccaagctgactccccaaaacagggatggaaccaatcggctagggactcaatcatcaattcccccctttcattaaagaagttttgtaaaagcttaactctcagctcttgaactcttggattgaaggcagctaagtaatcattccagctaagccaaggaatccacggtgagtgccaaatgtccgtgttgttaccattagcaattaaccaacatgattcaccccggataaagtccctcgaagcaaggatacctcgagcaactttggaggccgcatcggggagattgacactccaaaaggattcattatgtttacaatacttagccaggaaaatactgcaccacggtttctcctccccacacgccaaagttcaaccgagtttcgaaatcaaggccatattgagatccgagaactttttaatgccaaggcccccacacactttcggtttgcaaatagaatcccaacttgcaagggacaagaaacgggttttatcagaccctccaatccaccaaaacttcctcaccaccttatccagatcatcgcatattctctgaggaaggagaaaagtagacatagtatacaccggaatactagcaacaaccgattggatgagggtggttctcccggcttgagacaataacttgcttctccacccttctaagcgcgctttgactcgatccaccacaaagctgaaatcacgagtggcactcttagagaaagagatcgggttcccaaggaatttgtccgactccgagagaggccggaaccccagaaggttgttgatcataactttaacatccgaacaagtgttcttggagaaaactgtagcagattttgacgcattaatcttctgccccgaccaatcagaatacttcctcagacagtcttgaaccacattgatctcggttaagttagcctcacaaaacagaaaagtatcgtccgcatacatgagatgagagatgggaatactgcgagggcagactttgaacccatgtatttggccctagccttagctcggagcaagagacgagagaggacttcgcttccaatgac

SEQ ID NO: 239764 - DNA, 2207 bp, Cannabis indica
ggtaaaatatttccaacagcagcctccttcaggactcctcccaagactatattccaaagacagtgcattgtccggtgatcgctcaattcaagaagtgattgattcaaataatactgaagcatgtccttgcccttctttgccttcgtgctcagcaccacggccgttgaaggggtcttagtctgatcagacccgtccgagcttccccctttggtctttttgacttcgaaaccttttggattggagagtccacagtaggtcgttcctcagaaagatcaataacctcttcgaccggccctttctctttggacggagtctcatttcctctagatcttttggtcgaaggagtctagcccgagctgtcccccactctcttcttcaaagcctggggtaccttctgagacatttttgcataaacaaaacaacacagttagaagcaaatatgatgtaaagcatatcatgaaagaagtaaatgtaaatcaaaaataccctgcacgtgggtaggagcatttgcccgaacaagcatagacaaaacatcatcgtctcaagagtcttcctcctactccacttgaacggctttctcttttccctccacaagggtggatggccgagcaagcatatcaagttccctaatcctgatagcgtgttctactggtacttagtcggttgggagggccttcttcttcttcttgcttggcctctcctgctctgaatattcttgagcatactgcttggctctgttgtctcccttcaacttagcctcacgcttgagttaaatcagctccttttcttgcttggtcccaccagcctggcgtggatttgcctttttcttcttctccttcataagtctcggcataaagtcctctgggaagagtttgtacttaacatagttggcctcagtggctagcaaagtgatgttttgagaagcgctggcagttaaagaattctatgtgccctctccctaagtcgcaaggtgaaaggagggcggcagtacgagggaatctgttagaaccgagtgtggacggtatccatgccttgaataaagtagtactcctccacaaaatgtccattttgctaacatcggtgtccatagtgcccttcagccacttctcatccagttgagagaagtagaaataccccgacctactctacttgggagttgacttctggtcgaaaagccagttagtatcatgcggggatggcttgccccatccttgcgaggcataaaggatgtacagggcagattaatacttgattcccttaggagtaaattaggttgggcaaaggtggtagtagttcgcaatcttcttgaagtacggaagcaaaggcaacattgcaccctgcttggtatgagcgccgaccaggcgcagaacccctgccttcgactagttgcccgatgatttggagaggaaaggaagcatttgacatcccccaagtagctgtgcttctccaaattcttcatcttagcttgggttactatggatggaggagaaacccatcgagctcctacgacaccttgtcttctctgaggaatagcctcggtgtattccttagtaacatagtcttcaccctccaccaagacttcaccagcctcagacatgggttccccttcctcattgaaaccccgaaagggcaatccccgagcaactccctcctcctcagctttagatggagtatcaagatggacctcgccatgatcctccacctcttggacttcggtatccccctcattgtcttcttcctcagcagcaggccaggcctgctcagtactcggcagtgtggcaagctgagccacatgaggatcagtcaaagtagattcccaaactgttagtttgttgtgcgccatcattctatccccgaacggagcttgaatagtgtgcgtggcaacggtcacggcaaaagtggctataggcgtacctacagcagcaaaactcgggcgacctacgggtatattgtcaactatatccggtcggacaatgtatgtccaattggatgacaaatattgcctccaccccctcttcagctcccagataaaatgtccgtagccttcacctgcgatctagccaggataaaaatggtgttgcacatcgggttctagagaagatgtatgtttgctgcttatctctcagtctccaaagctcgagttggaaagaccatcacttgattaggcggactggcactaagacgaggatgatcctcgtacagaagtt

SEQ ID NO: 239765 - DNA, 1257 bp, Cannabis indica
aaaataataatttagaaaaaaaatacttgttgtaacactaagcaaactgattagccaaacaaaaagggaaaataattaatggtgtatatccttaaagacattcagttctccaattttatgatcattggtggtgtaactgttattatttcttttaatgctttacttagattacttttaaattaatatattttaggttttttttaaaattaatatattttaaatttttagttgattttttttttttcaagaattaacagataattcgtgacctttaaaagtgggagaatgaatggacgactacaatttaactaattaattatgaaatgacagatattttcgtttggatattttttaatagttatttggtttctaaataaaaaagcaattaattcaaaaaaataaaaataaaattaaaattgggttgggtgacaactaaaaagactcaattattttctactcttttctttatttagcgctccggtcgctgaatcaacgcacgtgagacccatcaccataccaaccggaaaatatctaatagtgaatttactaaaatgccatcactcatggaatcgtggaattacttttgacaccctgttgtttctcaaaattataaaaataatattttaaaaaaaaatgccacaaggcataagataagcaagtatctagactagaagaatattgcactacagcaacacaacaagggccctcgtcaaaatagatatatttaatttaatataaactgtaaaaaagatgaaaatattaaataatcttttttccttaaatatattaatagttggcgacaaaagaggtgtttagtgtttacaataaatttaaaaatataagatgtggatcgataaacattataaatgaagggttttgatgtaaattgaaggaaagaaaaaaagtgtgctgtcaaaaatatccttgtaaattcgtgtcctcaaatagatgccccttgagcaatttgggtcccacaaaattcacaagttgaacgaagcgcatacaacaagactaggtctcttttccaccgcaaacggcaagcttaaccgcgtgcttcgttgggtgcacaaacctcaatctctccttcgtgttacgtcgctaacaaaaggaaatccaaaaaaaaaaaaatacaataaaaactcagagtccaaacaagaaaaaggatcagaatttgaaaggggaaaaaagatacaaagacccaagtcatagaagaaaacaccttattgttaatggggttgtttttctaacgaaaaaaaa

SEQ ID NO: 239766 - DNA, 926 bp, Cannabis indica
aaaatgttatctaatattgtattgttttatcttttcgtgaagaaacctagctatcttaattatgtatgtatgtatggtttatttgtggttttttttttttcttgttgatatatatatttatatatagctgatatatttggctatttttgtgtttcgtaagatatattatcgcacttaattatcatgatcattgaaataatatgatatttgtctcaccaataatatttaagaatatatatatttatataatataaaatgataaatattattgaattttatgccaaatgaatcaatgatcgatatatatattaattactcattactttttttttattaattattgttttatttgatttttattcaaatgtatattttctcgaacaatcccatgtttttttgtaacaaacaaaatcccattttaaatatttaatatgcaatatcgatccacacaaaaattaatattaattaagagttaatttgaaggataaattaatacagtaattttgtgtgtagaacgaacgattactttaaaaaaaatgatagaaatttattaaactattttttatttaaaataaaatataagactaataatataaataaaatagtttaagaacataatatacaatttttcaactcaatactaaacttaataaaaaacattttactctcttttcttgtagatttattaatttcgtatcattattctcaacatgtatatatataatattaaagctatatttcttgcatattgtgggataatgtctattgtgagatactatattaattggttttaaaataaaaacataattatcaagagtgaccaagttaaaaagagattaataatttaaataaaagattaataaataattttcctaccaaaatatcttttcttttacgattattgatatatatatatatagacgtaa

SEQ ID NO: 239767 - DNA, 822 bp, Cannabis indica
tgtatttgatgacaactataagcttacatttcaagaaattgggtttgagatcactggtagtgtggaatgggaaagaatacctgtcactatgctcacagagctttaccgaatccttcacaagattgctctttcgaattggtgggccaattcccatatttccactgtcaactataacactgggaagttcttgtatgctttggggattggagtaagtattgatcttccctcgctcatatatgatcaaattgtaaactctgccaaggctaacgggtagtgaaacacactttaccatattcgagtttgatgaatagagtggtgcaaaggggttttacctgtgatacttgatcaagacaaaaaaatttctgtgccttccactggtaaatcattttctcctacttttggcaactcgattccctcatctgccatggatgttcatgttgttgcagttgctccaaccactgatatcccatcttcctctagtgctcctccagtacatctttcaaggttgagctcttcctcttagcagggaaaactgttttcattagtaacaaacttgtctgagacttatgctcgtgattaacagcgataacttcgatttgaaaaggttgtgatcactgttccctttggtgatcgtacttgcagttcatctgattattatgtctctcatctgagcctccattagaatcatctcagcctcctgtaaattcatctgcaccggcttcaggcccctctgcacctgattctgtgccagctggtgtctaggggcagtctaagtcctttccagctacaactgttgtacagggagagtctgagtctattcct

SEQ ID NO: 239768 - DNA, 1059 bp, Cannabis indica
gttataaataattttagtaaaaagtatgtaaatcggtttatttggtttaatcaggttatttgggcgggttagaaaaatattcaactcacccaatatattcattggtcagtttgaattttttgtaaaattattcgggttgtattttttatcgctttattcagtttaatttgagcgatttattcacgttaagcaatatgtattaaaagtactaccatatcattaattaatttattaccacacctatctttttttcactttaattttcacagtgaaccgtaccttatatcgtttataattttattatattttttaacacaattttattttgtgtaagacctagttcatttatgaatgcatggcttctggctgaggccttaattaataacaaacaattgtgtttgtctcgtgtcttaattaataagtacccttaacttattaacttattacgagactcgatacttaattatatagcgatatgatactaataacaattgatgctaatcagtatcagcattgctattgggtaccatttactacaaaagattttacttttagtcacaacaaaacttgttactaaaagtgaaaaaattgtgactaattataaattattattcttatgttgtgattaaaaggtctgtggctaaaagtattagtcacaaaaattataatttgttgtgactaaatgtatttttagtcacaatacttgttagactaaaactaaattagtgataacttataactaaatactatattttaattacaagtaacattttgttgtgactaaaaatcacatttaatcataaaaaaattatgttgtgattaaaaaattatcactaaaaataacaatttttgtagtgaattaaaggtagcgccttgcaattagttagcgatattacttaaaatttatcatattaaattatatatgagacccaatatttatttgcgcacacacaataaataagagaagaacccacaaaaaaggaaaaattaagtaataataaggaagactatttaaatacaaggacaagaaagatgaagaagtaagtttttttttttttt

SEQ ID NO: 239769 - DNA, 2581 bp, Cannabis indica
ataataatgtttgagtgatcgggttggcgagcaggtgcggatccaacccaaaactcgatgaccattaaaactcaacccgtgaacccgcccaatggtataccatgttgtcccgacccgctcgaatataatgagatttttaaaaatttcaggttgagcgggtcaggtccgggcgggttggccgtgttcgggtcaaacccggtcaaaatgttcagtcctactcccaagtacttaagaggaaatctcccttcttcaaactaaatattttctaagatgataacctttaactcaagagaaacccctccaagaaagacttcagttttatcttggttagtaataaggcatgtagtttcactaaaatcaatcaggccttctttagaataccaccagctttgactcatacctttacaaaataaaatgaggtcgtctgcaaaacacaaactagtaagacccaacctcttacacaaaggatggaacttgaagtctttctcttttgcagaaagttggagccttctagagatattccataatgagaataaaaaagcaaagggaaattggattccctttcctaagccccttctcgcctttaaaactcctttgaatacgaccacttagcatcaaaacataggagtttccctaagacaagccataatccactcaatgaactgggagggaaaacaaagctccttcaacagattttgaagaaatttccaattaactgtgttgtaagctttactcaaatctatcttgattgcataccttagagaagtatttttctgtccataattccctataagatcttagaaaatgaggatattgtgtgctatggatcttccttgaataaaagccccttgattttgttgaacaagagaaggaagaacaactgccaaccgggtgcacatcaacttggaaatgcatttatgagtcatttaagacttctatcctgtgagctcccacaactttagccaatttcaaccctgccagcatggcttcatacttaactttattgttagaggctggtaatttgaatctcaaggcagcttgaagcctcaacccttctagagatatcattgctatccctgctcctgatccattctcatttgatgcaccgcccacatataccttccatgtaggaataaccgagtttggtaagtcagcttttgcctccatttcattgcactcaaccatgaagtcttccagggctttccctttaatcaaaatgtgggggacatactgtatgtcaaactgattaagttccatcacccacttaaggagtcttctagaggcttctggtttctgaaggaattgtcagatcgggtggttggtgaatactttaattgcgtgtacctgaaagtatggtcgcaacttccttgatgcaattaggaggcagaaagctaatttctcaatcaaagggtactgatcttcaacccttatcattcatttgctaatgtaatatacaaggtactggaatttttcattcctctcatactagagcagcactaactgtgttctcatagacaaccaaatataagtataagtcttccctgagtattgatttggataagacatgtggcttggccatgtgttctttcaatttttgaatgtttctttgcacccttccatccattgaaacttcttacttttcttcagaatgttgaagaacaggaaacacttgtcggtagatttggagatgaatcggctcaaagtagctatttttcccgttaagctctacacatccttatgctttttgggggagagcatgtctagcaaggcctgtattttctctggattcacttctatccctccctgacttactatggatcctagaaatttcccaaatttgacatcgaaagtgcactttttgggattgagcttcatcttgtatttccttactacttcaaaacattctttgtggttattcaagtgatctttgctagttttagacttaatcagcatgtcatccacatatacctcatatttcttcccaataaacttttgaacatctgatttacaatacattgatatgtggctccgtattttttagcctaaaaggcatgactaggtagcaatatacccctttatcggtccagaagttggtacactcctggtctgccacatgcattttgatatggttatacccggagtacgcatccatgaaggacagcagttcaaacccagatgtggcatccatcattaatttgatctattctaagtaatgagaagcagtcctttgggaaagccttgtttagatccgtaaagtcaatgcatattcgccatgtcccatttggtttaggcacgagaactgagttggctagccattctgggtagtacacgtctctgatgaaggtgtttgatagaattttatccacctcctactccaaggcttatgactttactggatcgagaggacaccttttttgttgtaccggaggcatgtccttgttaacatttaggacatgagtaactacatgtgggcgaattctagtcatatctccatgacaccatgcatatatatcaattgattatttgatggtgcttatgattttgttctttcgctaggcccatgcctttccctatgtgaata

SEQ ID NO: 239770 - DNA, 4983 bp, Cannabis indica
tagaaattttatcaaagctgattttaacttcaagcagcaaaccttttccaattttaagtttcctggtctggacatttgggtcggtttttatctcctccaattcttccaatggcccaacatttgtattcggttccccaagttggggatccacatcttcgtccccgccttgggcgactccctattttgcaatgcttttccccctgtccaaactctggctagagaattcttcctttttggtcttagagagggcaaggttgtaatatttctgtgcaacttgttggtttccttttaggcaccctaccccgttctttgttgggaacttggtgcacaaatggaaaattgatgtaacagcctttaggtcatataaggttggtcgacctaacataacattaaaggctgatggaacattaattatcagaaattgtgccatcacagttattctcctcggagattgtccaacactgaggggtagacaaattttccctaaaggtgcaacactctggccagagaaaccatacaccggttgggtacaggggatcagctttttgagttggagccccatcttttcatatggtgttttgaacagaatgttcggtgaggctccattgtctatcatagtctgggccactgtttagttttctatctgtacttccacgactaatggatcgttgtgcgggaagcgaacatggatacatcttcttaagtgaaggtcatagggggttcccctacccgtggtatttttggcttccttcctttcggccacgactacatccttttattcctgttgtaaagtacaagcatacctctctcgagctttgcccaaatcttcagcaatatgtgggccctcgatgatgacttgtaaatgtccgtccaccgttggaggcattaatagatcttggttgttgtctgcttgggcggcttgttgattttggtcgaccttgacatacttctacacgtgctggttatttttccttatcaagaattcaatttcccgcttcaggttgttgcactcattagtgtcatggccatagtctccatgaaaatggcaaaatttggacatgttccgcttgcttatgtcctttttcatgggagcaggttttttgtacgggaccacagactgggttgccatgtagattgtctccaggttgtcagttaagacagagaaagcaatgaaattggaaggattttctctaggggtttgttcggctttgcctacgaactttcccttctttccattgccttgtctatcgttgttattagatcttttgccgctcggatttgaacttctaaggtaatggggattcttaatagatgatcctttcgaggggacctgtgattggcccggcttaggctcgacgtttgcccgttgaattgcctcttcaagcttgataaacccatctgttcggtctagaaaatccgccatagagtctacggggccacttttcttgatgtctttccacaattctccaagtacctcaatgccaccaatattgcggccagcctcctttcttcagttaaccgtgctactttcgtagcttctgtcatgaatttgcttatataggctcggagaagctctcctgatctttgcttcacttcgaccaagtcttctaaatgtaatgggagttggcgagaagaagagaactatgcatggaactctgaggagaaggctttctaggacttaaaccttcctggtggtaacttgaaataccactgttgtgcggcttctaaaagcgtagcagggaatactctacaccgcacatctcctcgtaccccttccaaatccatttgcatttcataatacttaagatgtgacaagggatcctccttccctatgtacatcttccaagtcagcattttgaacttgaggggtagctcgagaacgctgatctttggagtgaaggtgatttgcgtgctcggtccaactcgagatcagtgagtttttggccagccaggccttggaacatatttttcaattcatccaattgtgcttgcacagatgggtgaactacttcagcctcttagctgacctgtttcacattaggatctcttagatttgggtcctagatgcgaataccaagctgagtggccggttgaacatattgttcgttcagacccctctttttattcaaatcatccttgagatcatgggctgcacccaatctgttgaatactgaaacaccaggttgtctcagtgattggttgatttggtcggtctgttggctagaaccgtcaatttggatggagttattaggtataattccacctaaagaatttccagataaggttcggttgcctaccacttggcccacaagtggaaccagtgaccggggattagacagctgaccgctattaatctgggcggtatgccagttggattttcttctgtgccgcccaacgggatactagacgtagcagttagttgttgactagcaacttgataggctttctgtatcagtacggtggcatgtcttgttcggtcttcgatggctgcctactgaaccttcaatgtttccatctccctatccctccattcaatgaactaacgcctctgctcctcgaacgcaaggttcattgcagcacggagctcctcctaatcatgatgtaaggtattagtgtgaccttacatgagtccaagagcattgtggaggttctgaatctcactatcatctcctatggtcgtttgagcattggttgcgaatgggattccagtgctattagtatcttgatcggctgccgatttggtgtttccagtctcttgcacaccgggcgtgatcccagccagaggggatgtcacaccttggcctatagtatgtggatgcatgtttggttgttcaagattggttcctgatcaaccacgcctctacgactttgcaccaccattttgtgtgtctgataaaacttaaggcaaagagaaaatttgaaatttttctctcaatgaaagcaccaaaatgttgacctcgcttttagccaacgacaatgagtaaagtaataagcgataagaaatgtaattacgatagagcaaaaaccagtaagcataaagaacacaagattttaaagaggttcagcccctttagttcggtaatagcctactctccttagattgtattaactcgagaacaaagagtacagtgttttctctctcaaagctctcacaatgaaatctctgagcattttctcttagatctctctgaagtaattctttcgaccccttttacagtgaggatggatcactatttatagggataaatggatgagggaaggatttccttttacttacaatatttataattggtaagaacatatattacatatttagaatacataaattgagggattcagacagtttgtcatatccttttgatataatcccatgattgtagggattgctcatgtgcttcacgataccaatcttgaagttgctaagtcttgatacattgcttagagaaatgacttcatttgctgtccggagtatctgcccttgccctgctcggtcagtaagactttttccgtacgtatgtatggctaaggtctgttcgaaatatctcttcagccaaatgtagaaaatagcagccacgtgtcaccaatatctgttgccacgtcatagtgcaaaaaataggataacagaatgagtgtggtgtttttggctatcgtcaagtaattctcaaggtgaaggtttcgaagtagaagctccacaaaaagagaagaaggtccaaagattcaaaatccaaaagtccctttctcagcctcttacctgatatcccccacatgttcgggcatctcactaacaaatcccatatatcactctttttaatgaataaaatattacaagaaaataaatatctataaaagtccccttgttcctaggcaaatatcccacaaacattgggaaagctgttattctcggttgaggatgcaccaatttgaaatagagtgataggatgtcatctctctcctaaaaatacatgatattggtgaggagtactgaaaacatgtatttggagtgtcaatgcttacatacactgccacatgggttgtggcagtatcctcaaccaaccctcgcttaaccacattacccgattcccgagtaaaatgtaccagcctgccttgtgagctaattttggacatgattacttcagaattgtgccatggctgtgatacacactttgatccgtcttgaaattatctttccaatgaaagttgaaccaggtcatttgaataaaaattaagagagttatgtcccttttactgaaggaagcttatgatgtcttgtaccagttacgagcactggcatggccaaatggcaatgctcggccatgcatgctctcagatccctcggggtgtgttttgacttgttttttttatgatgagtcatattttggggtctcgggacctaaaaacctcatttcaacatctgaaaccctaacgggagattaattccaccagttggagtcggacaatggcagtggttggccatgtcttatgggaagccatgggtggtgtttctcacttgtatttgatacatggatattgaaaatacaatttggccaataaatcccctttccttgtgtagtagccgaccactgccactccattgtggcagtgcccatcaaaattagggagcactgccatttctatatgacagtggtcggatatggaccttataaagccttgagtggcttttctcatttgtatttaatacatatatgttgtaaatgtaacttggccaatgaaacccttctcttgtattggggctgactactaccactccattatggcagtgtccatcaaaattggagagcactgccatttccttgtggcagtggtcggccaagtggtttctttaccgacttggtggcttctttcacttggctttgacatatattgatgaaaatgcattgttgacaaaagttctcacttccccttcttcatggccgaccactgccatctcctatgacatgctcatcaaaattggagagcactgcc

SEQ ID NO: 239771 - DNA, 1394 bp, Cannabis indica
aaaaaaaaaaaattgcataaaaaaccactatatttaacgaaattttcaatatcaaacatatattgaaattgatagttaacattcttctaggcaagatttagaacaagaaatcatcaacaaagatattttaaagagcttgtatctaaaaatactacaaggaaacaacaaatgtgtattaaattatcatttctcttttgagcatttgtagttaacattttaagtataagtgtctctctttctctctctctgtaaagcagtgataaattactataaccaaaacaagaatacaatatcatgaataaagctattggattttatagaaacataaatttgatgaacacaaaaagataagttaagtacagtgacatcgacgtggaatggatacgcccggtggtcttctcttctcgcgaacaatggcttccttgatcaagggcagtttcttatggacctttctccatatgtgatttactgcgccgtcttcaggaattggcccaatcccaccgtaatgaccattttcgtactgaaaaatgggctgtgcctctgccattttccgacgaaatttatctttctgttcccttgaaaagctcctaagatgactcacaagccaatttggtttcaatgcatcacttactgccacaaaaacagagaattctgaataatctaccatgccttcaaaggggagctcgatgttgtcactgacaataacgggtatacaaagactttgaatggcatcgaaaaggacgacatgaagtgggagtgtctcctgcagggttcaagcaaaactcggatgatctcatcccttttatcgattgctctctcccagttgcattagggaacccttcttccattataacacctggcttatcaaccaacaagtcccacaatttctcccgaaccaggcctccctgttatctcgaaaaacagaacgttataacattcgtcgtccatttagatctaatatatgtgtatacaaatacaagataagccttcgaatatataaatatgtagaaagaaaacaattgaatttcaggatataattaacaacgataatatgaagataggacacttaaaagcaacatggacaaaaacttacaatgttgtacttttgacattaaaaaactcttaaatgctatgaaggggagaggtcaagcactactacaatatcatattcagccaattgcaaagaaattgaaatttcaagtctcttgtacacaaagataaagtattgctatttggcagcctctaacaccattccgatatggcactctataattgattagcgattactcgtattatttattaaatcaaaatatatgaaacccgtcatagaaatgcaccaataacaatatatcacctcttgtggtacttgacgtcttaaggtgactcttagcatt

SEQ ID NO: 239772 - DNA, 1348 bp, Cannabis indica
taataataataataatatgtacagattcccactgcctacaaacctgcaaagtcgttaacataaaaaaaaataaaatatatgtataaaattctcgattgcctaccaacccgcaaagtcgtactgctcacactcttagatcttcacggcacctcctccaccatagtggagagctgggagtgcttagtttcgttggaaaaaccaacgctctcagtcgacgattgaaggcataaattcagtcgcttcagtcgcttgcaaaatgtttttcgctaatctgcgattggagatgaatccacccagcaccccgccgccactactagccccaagccccgtaaatctgaatccaaatttcttctttggtatattcaacatgagaatcggtcaacgtcctctacatcatcttctcgttccttgacctcttcgacctcgctcactgctctgttgtctgcaaatcttggtacccttttgtttatatgaaaaacccatttgaaaaagtatctaaagtcttaatttttaatttttaattttagtgttttgatgcaggcatgtggttatcaacaagtctaagctgcttcaagtcttttacatgcagcagcagaaattggatggttctacgagtttggagaagcctttgaatgtgtatttggaggaggtggctatggagcgccatagattggctttggctgaaggatcggttgttgttaatcagtggagaggccactcaattgggtaatgtttaatgatatagtatttcttcaagtttgaaattttacttttggtcactttggaagatgttaattcacttatgaaattacatgtttcatctatagttagttattgggatttaagtgtttactaataacaatgcttaaaaatgagcataaagatcaagatggttgatataaacttgaaatgtaatcaataaaggcaaagatgtatatcatgttttctaacttctgttgttgttgttgttgctaattttctaagttaacttttttagggcgaattaatgtcgaatgaagaggggattgcttcttactggtggaggtgataaggtatattctacctcacaccaagataatagtagagttttttcacttatgattacttagttagaacgtgaaaatgagagattctgtgctgattttgacatatgttcttgcttagtagactgtaattatatgttggttttttctcatcataggtaagtttcctttgcagacgttctgtttagatcttacataggctttaagaagttcacaagtagaatgtattgttatttaaataaatgaatcttcaacattatttccaggttctcataatgctaggtcacattagtcattagcctcca

SEQ ID NO: 239773 - DNA, 1932 bp, Cannabis indica
aagtcaaattaattaattgggttttaatttgcttagctgtactatatatatatatttatatatctagatatagcagatttcgagtgatatataaatggttgatatacggtattacttaatttattctcaagtttaagtacgttcattaatatatatattatggttttatttttatggaaaatacaaaattataatttagaaaagatgtagccatgctccatgcatgatgatatatatataacagtgtacatatttgccgaattttaaaagagaagtgtacaataatatatattttttgtcattcaatttacaataaccaaatttaaagcatctcatattttttaacattttttagtttttttaatttttggcgtttttaaaaagtaagtttttttattacaggagaaaccaattaattacctttatacaaaaaaatttttttttatattatataatttaagatgcattttaattacctctaaaatttatttttatacatatcttagtaattaattggttatttttaagttatattatgataaattataatttaaaatatatttatgtaactttaaaaattattttcgaaactaatgagttgtcttgtaatataatgaactattatttttatatacctttatgttattttaaaagctaatatattatggtataatataatataattcaattaacaaaattctaaaatgaatattaactaaatttttttaaaaaaattaaaaacagtaactaatcactgtattagtaaccaaattttttttttttgcctaaaaatagcaaaaacatatgcaccccatatcttgaaatgttcctattgaacaataggccacaataatatttttttaggctcatccgaataataaagtgattaaaaattatttttgaagtttaagagaaaagagagaaaagagggtggaaaaaatataaaggaaaaggagaatattattccaataaaaacgttataaaacttttacaaaaacaaacaatagagtaaatgagtttgtgttaaaattgtaaattagatgggataatgggtggcttatgcaaattttcgtaaataaaatccatggcccaatagaaatatatgtagatgagtaggcccattttattggaattgagcgtactgttcttatatccaaggacaatattgagtggtcgaggaatgggccgggaattcaactcaactcacccacattgtttgtactttgtacttatatggcatgttaaataaagagaaaattatagaaaaattctagggaaatttacaaaaatattagattttgacttaatctttacaaaaatactgccacacggcaaaaataacttttatactgctttgggactttttttttttttaattattgtaaacatcaaaaaaaaaaaaaaaaaaaaaacgaaaggtcttcatcttccacacccgcagacaaaaccactacaacaacaccagaacaggcagaaaacaaccatgaaattcgtttagatgaagcagaaacattaaaaccattaatattggggttgtcatggttttttaatgttgtttttgggttgttccactattgttttgtatgtttaacaaatattggttttaaattacacaagttaaactaatcactgaatatttatttgaggtaaccaaaatgaaagaatcatggacagtaatagtcttaccttctattaaagttgtgaaatctagaagaccaaaaaaaaaggattgaagctggatgggaaaagaaacaacataacaaatgcagcaaatgtagggagctggggcacaacaagagaacatacaggagaagacaacaaaaatgaaaagaaacagaacaactaaaaaacaacagtagaacaacagaggaaaactgaacatatattagagcatatgatactgaagaaaataacttacatacaaatttcatt

SEQ ID NO: 239774 - DNA, 2129 bp, Cannabis indica
taatccatttaatctttcttgaggcatcaaagatcttaaataagtttttattaattttaattttgaaaaacttctttttagcagatgcaactgaaattggaattgttaacaatattctataagaaatataagcatttggaaatgaatcaattttttatataattaagtacttccaatggactacatttatctttttcataaatttctcttaatacttttaatctgaaaaataaatctattccatctatattagaatgctcattataacttagaaaatcttcaagattcagacaacattgtttaatagcatctccacccattaactttaatctagtaaaatcaaataagaatccaaaaatattttataaatctttaaattgctcaaatcttactttaagtgaagaaattatttgattaaccaaataaataaaatactcaatcctaaataattcttcaagagattttattttatcattactaacatcttcatcaaattatttctttctacgaatcacacgtttttcacgaaattttggttctattttcaattcatttgcaagttttctagctgaagtcatggcagatataaatccattttccctatattttttaaaaagaaaaataagacccttaagaagatctatggcaacattaattgttgattcttcactttgaaagttcttactaagagagtttactgcaaacaagatatcataccaaatagtcatacctaataaaaattcaaaatcttctagttcataagttactataacttatctagactgttagcttcactctttattttaggatcttcacttgtgtctgctagttctaacaaagcatctctaatatttggagtttgatgtataatagcttttacactttcaatatgactttcccaacgagtttgtgataatgatttcactgttaagttagatatattattttttaaaattatccatcgctttggtgatgaagaaaataatgaatatattcgttgtagaaccccaaaaaatgatatggctctaacacaagaagtggcagcatcacaaattactaaattaagactatgacatgcacatggtgtaaaaagtgccctaggatttatatctaataaccttttttgcacaccttggtgtttccctttcatgttagatccattatcataactttgtcctcttacatcatttatatcaagttctaacttcttaatttctcttatgagttcatcaaagagaccttttcctgaagtatctaccacatttaaaaatcctaaaaagtattcttcaatttcaataggacaagaagaaatatttacacaccttaagatcatggacatttgctcttggtggcttaaatctggagtacaatctaatataattgcatagtattttgcttctttaatatttgttaaaattaaactttttatcttgtgagccaacacttgtattaactcattttgaatattatgtcctaaataatgtttatgaattttaccattttgaatacgacgaatatgctctttcattattggatcaaattcagtgatcatctcaataaaacttaaaaagtttccattattttcttgatagatcttttcatgactcccacgaaatgccaaattatttttagctaaacattttataagagaaattatcctttttaaaacatttctccaatgttctttctctttattaattctttcttgagcatgtttatcaattgttttattcattaataatctcgattatatatttgttacttgtttcatgactctttaacctatcaccaagatgtatccaatctttagttccttcgttactcaattggtttatcgtactaagactagtactaaataatttacaacaaaaacaatatactttatcaaacactttgaatacactaaccactttgaatcatgttgttctctatttgataaattttttgtatagtgataagtagaaaaatgtctaccatcatcttttggaaactctatatcactcactctaattggacccctttctactaataagtctattagtttattgtcaagatttttctattttcctggatcataaagataatctaaatcgtggttaccatttttagtttccatattatcctcctta

SEQ ID NO: 239775 - DNA, 1276 bp, Cannabis indica
aactactcgctgcccctattagcgacgtagggaaaaatatgcaacacaagttattataaacattactttctcgcattatagtattaaagttattcaaatgtgcaattgggtttgtagttctactgtattgtacaacatgagggctcttaaattccttcaaaaattgcaagtttaaaatattagggtgaaaaggttttgggtctttgtttgaatcaaagcgtggaagcattccatactatccatcctaatatttcctaaatcgatcctccaactgaattatcctttgctggatggacttaagacgccttcgatttatatggtctcgcaaatcaggttgatcacgtatgtttttggcgccgattgtaactgctcactgattgacttggggagatactttctaattagtaactttgaaagttactcatactttcttgctcgccttgatattcatatcgcggtgttctctccccacgctgtgagtttttcccatgtgcgtgaccttgagaatccagtttacccttgactacttgatctactttgggcttattagcctctgattcctgtggtgattctcgagcaggtcttcgccttttaaataagttagtgaatctacctcaaatcaagtatgtatatatacggtctctttcttctatcctacgtccttgtggtggatgtggatgacgactagaccagttaggtagtggatcattcgcattttcattatttctttgagatgtttattgtccccttgctcgcgtttgccacaaagttgtcgctccctaatttttggggcctcacccatcaataggaatgtcccttgtttcccctggttatttctcctggggatgagttggattgtttggttcctattctttgaggtttggttcttgtgcccttctagttcgtgaaccacggggcctcccttgcggtcgttgtgtaggctgcttgtctagcactggaagtgcattgatagagttttttgatttttttaactcaacagtggggatgtattttgtggggccatatgcatctaactcttttttttaggaacttcttcctcgggtcacttctctcggagttcctcttagtaggaccccttccttggttagtttgagtttgtgccccttgggctcttttactggtcgacatgttgtctgttcttccatgaatggctcgtcatgttgtgtattttccaagatgtaatgaaataatggggagatgtgtttttgagtttttttacaagggctctcaatgaaagcaccaaactgttaactca

SEQ ID NO: 239776 - DNA, 1562 bp, Cannabis indica
tatacaaacacagagtcactcatgtggatggtggtcccctcatcacgagcttacttaaacaaaactttattgacactgcaagaggaagaataaaaaaagaagtagtaaaaaaaaaaaaaataaccattgccaagaagttatctaatatacttaaaacaatactcttgccctatgatgatcattaatgaatatttattaggaaatttattaaaaattgttttcatggaaaagttattgcgcattgttctccagttctttccttttttctaattaaaaaccattttacttactttgttaccctctcaactcccatcgataaattaacatagttgaacctaaaattaacatcttcttatcattacaaacacaacatattatattatatgtttaattatatgtggttacaatatagtaccaactacaaaggtactgtagtttttctttagctaagaaaaagagtaaaaagtacaaaagtagattttgctctgatatagtaatcatggggtagagagagatgaaagcaattatacatatatataaaagctttaattattttgtcccccatattcatattgattattgttaaatctaaatctaggctgcagtcacggcaattttcatgccagattcacagtgctgagggaaattgcaaatgaagtagttctgtcctttaacaagcttgatctgatctcttccacttgtaaacactttggaaccctttggggtcctgcaactctggtaaccggctctgttcacagccaccacattgtgtgccccctgtccataattgaacactggaaaaaaccaatttataagagaaattttaatttaatagttaatatgaaaaaatttatataaccactccacaatatggctaataacagtgctctgaaaagaatggcagcttaagaaagtgattgagtaattaattttgcaggcagatcagatagaaatccattatagctagggaaaaaaatgtaaaactctattgagggaattaaaaaaggctaattaaaatttttaccccaaactttaacatgtaccaaattatgttttttgaagtattaagattgttaaatttaaggatttttgtttaatttaattcaattttactatttcaattattatttatgtactaaaccattctccccggactttaatatctaccacatcatgtccctcgaattttgatatatattaagtcatgccccgtgaactttcatttatgttagatttttttactaaaattagacaaaagtatttaaatctaacaatctcaatagtttaaggggcatttttaacgacattaaaagttcaaaaattatgatttggtacatgtcaaaattgaaggtaaaattcctaattagctattaaaataagtaattttcagacaaaacaaggattaatttgaagataacccttttgctaattgctacacataaatctgttcttgtttacactttttctgaccaattgtcaagttagtttggaacaacccttctagtatatctctatgtaaaaaacatatatacctaaaacacttatatgtaattaaagtacaa

SEQ ID NO: 239777 - DNA, 761 bp, Cannabis indica
aatggagcttaatttttgtgattagtcctagttttaaataatgttcttaaacactgttactgttgtaacaggtgtggtttgagggtgttcattcaccacatacctaacaattaataatactactatcataaaattgttttgtggtagtataaccccttaaacgtgttagtttgattagttatttttgtatatcatctcatgataggtcgaaagacttgtgtggctgcaagtttttgacgaggagagctctatttctatgaaaacaaccacaaaaaggataatgttgaccaattaaaaagtaggttaattacatgtggatttgtttcacacaccaaaagaaaaagaagaaaaaaaaaagtgaacaacaccaatgtaaaacgcattttgtttgacattactctaagaagaagtctttgtcataaaaggttagtaatgtctccactttggtattggtagaatattgcagttacttccacaagtttgactatgattttcagtgatttaaataatatagttactccataatacaatgttacacatttcactacatttttttcttgaaggcctttgaattttgtgttttgctaaaattattaattattctgttaaattataaattaatttatatttttttaaaataatttaaattatatagtttgttgtagggattgaccgcttactttgaaatcagtttttattatttttttaatataaccaattgaaaattaatttctcccagacatatatagaaaatataacta

SEQ ID NO: 239778 - DNA, 822 bp, Cannabis indica
aattattgtttagatcaaaattttttgattttctaagcatagaaaatcaaatttcccttttataattattggctatctaggatttttgccccttaaaattatgacctttgcatgattatatccttaaatttttcagtctgttaaaaatagtccatgaactattgataatggtgtaaagtgctcattctgtcaagatttgtcacatgtagcaaacataataatgcgtgtaatttaaaattaataaagaataaaaatatatattttttaaaaattattaactaaaaaattaattaatgattttaaaaatattaagtaaaactaaataaataaaaaaataattatttttttttcaaattaattatacatgtggtgttaatatgacaatagtttaaattagtaaattgccacgtcatcattctatttgtcacatgtgacaaaacttgacaaaatgatcactttacgacactatgaatagtttgggaactatttttaacgagctaaaaaattcacgagacacaatcatgcataactcatagttcagaggacaaaaatcctaaataacatttgtttaatggtctaagtttaagtttggagtccgaaatccaagtctaagttggggggttgggtctaggcgcgagtgtgggttttgggtccaagtcaagggctaggtatagggccagaattcgcgtttggatttgtgattcgattctcgattgtagttcaaacccaaaattcaaagttaaatttgagatagggatctaagtcgatcagagtaaaaaaatactcatagataataaaattttcttttacaaaaaaaaaaaa

SEQ ID NO: 239779 - DNA, 1536 bp, Cannabis indica
ttttcttttctttttagaggacataataattagttccttgaataaaaatcattgagtgtctggtaaagttaaatcaatgggcgtaataataaaataaagagcaactttcaattaaatagtttttgcaaaaaagtttgaaaattatgaatacaaattattagtaattgaaggtaaaattttgtactaaaatatgagaaattaaaaacctataattgaacctctccctccaaaaacacctataatttaaaaaatttaataaaaatgttataaaatagcttcatatggccgtctcttatttatttattgaacaaatcttataaaaaaacaataaaatatattatgtgttctaaaataagtatgcatgacccacatgtggataatgattgactacctatttggtttcttttaatagtttgtcttctaacttataaagagactaatttgagataggaaaataaacattattttaaattttgtgtttttgaaaattactaattgaattttttattttgttaaatagtaaaataaattctatattttttaaaattatataaataagatcttgaacttaatttttaataattttattttttaatataagaagctttatgatagtttctaatacgaataaatacagaaaatatctctatattggattattattaaattttatttttgacaataaattaatttaagatcatatttgtataattttaaaaaatataaagtctattttattatttaacaaaataaaaaatttaattaataatttttataaatataatgtataaaataatatttatccctctaaataaattgaaattattagaacaacttttcatttggaacagcttttgataaaacaatagaagaggataagatgctcctttctttattttattcttttttttttcttcaataatgagtaataggatagcgattgattaccatatttagtttttaaagttgtcgagagttttaggtttgggtttgttatgcccttttaacttttcactgtgtcataggcccataacattaggctatgtttggtaggaaggaaggagagttagaaggatggagagttgatgaaagatggagaatataaaggagggagaagagagtaatgattcttttatattgtttggtaggaaggatgaagtgattgaaggataaattattatgaatttataaaattattattttatctttataattattttttaataatatttgttgacggcatttatataatttacaataattgaaaagggagagttcctatccttccatgaatggagggattacaaattagagatttaagtggattctctatcctctcacctctcctttctttccttcacttcctcttgccaaacaaagggatttgttatttcctcccacttctattcctcctctcctctccatccctccacttctccctcctaccaacacagtgttagtgactctctctttcttcaaaaagaaaaaaaaaaagcattgacgacttgtcactatactctatattaatcaggagtc

SEQ ID NO: 239780 - DNA, 1658 bp, Cannabis indica
aaaaaaataaagaaaaaaagaagtgtttggcacgtaataattaaaggtgagaagaaaaaggataaccaattaaagaataatacatttagagaataaaataaataataataatgacttgtcatattccaaaaacagctagattaatataataataataataattaagctcatattattatttttagggcataacatgcctataaataatgaccctattcaattccaatacctcctcacttaggcatttgctcttttcattcattctcttcttctattgtgaataataataataacaataattttttgttgttattattattcatatatatatttttttcatttgcgaaaaaaaaaatggaaatgaagaagattgtttgcgctgttatgtttgcagctgcctcagtcaccgccgtggtggctcaagagaccacggcggcccccgccccttcaccgacgagtgcagccacctcggtcgccactcttcctttgttgggtgttgcctctcttgtctccttggttggctactacttgcactaattaattaattaattaataattaaattattttataatttaattataattattattatttggggattaagatggtgatcatatatatatatagtattactatttttttttatccttgattattggaatttgtaatttttttaatattgttatgggaagaagatgaatatttgtttctttgttatgcaattaattaataaaagagtttttttaattagtgcaaataatattattattgctgtcattgttttcttcttcttgaaaatgtatttcatttttatggtttgtgaatataaatcatccatagaatgaaaaaaaaaatcttattggttcattatttatatttacttgcaaaatatattttagaaggttgaatggtgaattaatataaaattatatatatttaattaattaatgaacctcaatacaatggcaaaaatttatgggaaattagttgtatattggtgaaaaatatagtatagcattgcattgcaaaaatgatctttccaaatcttcatttgaaataaaataccaaaaatatgataaatttgtacttaatttttatacatatgtatggaaaaatatatattatactgaaaatctcatatttataaaaaaaaaaaatcatatttcttataattacttctaccttagaacaatatatgctaatgaatagaatattaaggataataaaaaatatataattaaagaataatgtcttttatccatatatatatgacatatacattatacatacatatattgtatattaaatataaagttgatgataagaggtcatgggtttgaaatcaattaaattaaaaatttggtcactaaaacaaagattatgattctgatgaaaagtgaaataaagttggcatttttctttatttatttgtttatttttatgaagaaaggaatatttgaacagatcattccaagagagacaactagatataataatggggctttaaaattctatattcatttttcctttaactaacacatgcaatgcagttgctaatcaaaccaataattgagtgttactaattaaaatttatttattgaaaaagtaactaatttgcagagctaaaaagtaggaacatcctaaacaattgacatta

SEQ ID NO: 239781 - DNA, 2499 bp, Cannabis indica
aaataataaataacattcaattgcactagcactactaaaaaaaattcttgctcattctttggctacaaccggtcatcctcttgatgacagtgatcttgtaatgcacatactcaatggattaggtcttgagtataatcttgttgttgttcatgttacaagtcttgtggataatctctccttagagtccattcaatctttacttctaacccatgaaagcagggttgaacgtcattacttcgtcaatgactctaattctaatctttctgtaaatctgagcatccacaactcccgatccaacaatagaaatggctttcgcccaaacttcaatcagaatcgtggctatcctcctatgaatcgttctcaagatcgtgcttatcccaaaaacaacacatctattccacgattactctgtcaagtttgccacaaagcaggacacacgaatgttgtttgccactacagattcgacaaagcatttgtcaccccaaagatcaatgattcaaaagtctttcttgctgaaattgatgaccaagaagaacaccaagcatactccagttcaaccttgcctgaattcgtcgaggactttgactggtatgttgatacgggtgcaaccaaccacattgctcagggcatggaacacttagaatctgaaattccttgctcggcgtctgatactctagctgttggaaatggcaaaagacttgttataagtcatattggtaactcatctctcccttcatctctgtcctcgttacatttaaaaaatgttcttaaagttccttcaattaccaaaaatcttataagtgtctctaagttaactgctgacaataatgttttcttagaatttcactctaaatgttgttttgttaaggaaaaaattacagggagagtgctactcaaggggaggcttaaaaatggcctctacatgctgtctcacagctccttcccatctaaagttcaacttcaatgtcaactcgtcaccaagcagtccaaatctgattctacatgtcctggttcacctgaaaccattcaagaatctgtaccaacttctaattcttatttttccacttataatatgagtactgttaacacagtgactcctccatgtactgattcttgcaatagtaaaaatgattttttgcctactactaatgagtctttatcttatcttgttcaaaaattgatgtcaacctttggcattcaaaacttggtcatcccacaccagagatactagcaaaaattctatctacattacatatttccaccagccttagaaatctaaggttctgtgatgcttgcaaaaaaggcaaaagccataagcagcatcatcccatatccgagtctagggcctcctaaccattacaattggttcacacagatttgtggggaccatcacatgttgaatccaaagaagggcataggtattatatccactttattgataattttagccgttatacatggatcttcccattatccataaaatctcaagcctatagtacattcctacagtttaaaacatttatggaaaacacaatttgatctccccatcaagactgtccaatctgactggggaggtgaatataggtccctaacatcatttcttacccaccatggagttcatttccaacatccatgacctcatgaccatgctcaaaatagaagagctgaacgcaaacatcgtcactttactgaaactgggcttacattacttgcacatgctggtttatctctattttattggtggctagcatttcagcatgctgtctatctcataaacagaatgcctactcgtgttctaggtgacatgtctccatattaaagtttatttcacaaagtccctgactatactatgctaaagccctttggttgtgcttgttaccctcacctaaggccatataacaatcacaagttgtcattaagatctgaaaaatgcatgttagttggttatataatgaatcacaaaggctacttgtgtgaaaataaagatggcaaagttttcatagcaagaaatgtggtctttaatgaagaagaatttctagccttcacaccatgtgattccacaaaggtacactcttcttcacaaactttttttccttctacctcatttcttacatctcccattataactaacaccactatgccctctcaatctgctgcaaatactactatgccatccacaacaaatccacctattgttgtgagaaatgctgaaccagtggccacttctgctacatcagcatctccatctgtccctactactgatgttcaacacaccactacaatccctgctatacctgtgccagttctcacatgtcttgatcctatacctgaccacagaacccgtgtcaatgatcccatacagcaacctcatactgactctcacaccaccaacccaattcaccacacttccaccaccaacatacatcaaatgcagaccagggtctaaatcgggcatacacaaaccaaaagcctatcactctactctacatcctttacccg

SEQ ID NO: 239782 - DNA, 1282 bp, Cannabis indica
gggtcttgtttaagacttggcccgcccatggtgtttgtcatgaagtgtgtcctaggattttggccggttaatgcatgggtcatgtgaccctgaccggttctttcatgggtcaagggatcctggcgagtcctctttgatgccatgggaccctgattggcccagggctttggtcccaagtgggtggccagtttgctgtcctttttcaacctcggcaagaatactttcatggccttgcaaacctatacaaccttcgtcttttatgtggttcccatagaagctttgtatgatgctttttggtgagtctattatagtaaagtatccaacttaagactcaacacttgtccaagttgtcacacttgaaatcgtacttcaatgatacctagtcttgtacgataaatgaacaatcatataatatattatcgcgccatcgcactatactctatgtgcttagctcactgtcttacctaaaatccaatgtatgaggagaatttctagtccataggtgatcccgacaagtattagtattcctagtcacaatcccaggtttatacaaaatagggttaatcctaaattcactttgataataattcacattttggactctaactctggaccaagtaatagagctcattactggctttccaacagtataaagaacatccaaaatggagtttgttgtcacaagttatggccaaaacatgtttacaaaaatccaggatcaaaagggcattaacaccgcaagggcgccccttataggggtaaaatcccccgtaatctgagcttatgagaattgcggtgtccatgcatagggttgcaatgtctaggttgaaaaaacctaaaaattaccaaattttcatatactttgaattttcatccaaattcaaaaccatactaatacctgctacaataatggcacacaagcctcaaaatcaagtgtaaataggttcaaacattccaaatatacacatgcacaacttacacataacctaagctcaaaacttttcaaaacattttattcaaattcaaggagaaaaccaagcccaacttgatgctcaaattcatcaaaatgaccatagaaaaacaacccgcacttccaaccctaacttagctcataacttagattttaacaagaagaaatttatttccatccatggtgttatccaatttcttgcacaatgacgtggcagaatactcaagtgacacgtgtcctgtatttcttgtatctaggcggaggtgaatgttctgaacagactctatgatgtacgtcagcatgtataacctt

SEQ ID NO: 239783 - DNA, 1695 bp, Cannabis indica
gtttttatattttcttatatacaactgacatttgcaaaaacacggtttttcaggtccttcttacttaaattcaagaaagtattcatgaagagaatctttactggctcttctaactctttaccactccttagagtgattgcactacagttttcgttaagatttacctccatattacttggcgaatttccttcagatattttatgaagcataatagctagttgccccacttgtgtttcaagaattctggtggatgttcttgtctcaatcataagatgagtttgtagattggtgagaataagcaaagcagcttgtagatcaattgttggagcaggtggagcttgtggattttactgttgagaagtagaagcttaattctgatttttaaattggggttgttgcccttgattatttgtccatccattattaaatgaattggagaaaggatttttgaactgcctctgaaaattagctatggcttgaacttcagcaagattcatcagaatgttatcaattgatgtgtgcatttatcaaacatatgagacctctacaaatttcacaactagtttgagcttggatagcattaatagctacaattgtttgctgcaactgtttagtgagagtaacaacctaaacagtcaaagcaataattgtatttaattcatatattccagttgttttcttcttcctagatgctctctcatcaaagcactgataattattcatagccatatcttctaaaagtttatagactccagttacactcttactcatgaatgtgcctccagaagcaacatcaataatagttctagttatgagacacaaaccattataaaagttctaaactaacttccacttatcaatgccatggtgtggatattttctcaatagtttcctaaatcactcccaagcttcatatagagattctccatcattctagcaaaaattattaatttctcccctcagtttagcagctttagatggagggaaaattttagactagaagttctaagccataacaatagaattcagtacaaagctccaaaaaattagacagataagcatgaggatctttagtcgacaacccactaaaccgaacagaagattgtaccatttgtagaatagttggcttaatttcaaagttattggcttcaatcactggtggtcttatacaattttgtacccccgtcaaagtgggcagtacatagtctcttaagctcctttcaacattattataagcctgacccccttgtacaactacaggaatgaaatcattactatcatccctatcattctgtgtcatcaccatagacttttgggtttccctcttgttctttctattttgctacaagacttctcaatctaagaattcaaaggaatacaggaatgaaatcattactatcatccctatctttctgtgtcatcaccatagacttttgggtttccctcttgttctttctattttgctacaagacttctcaatctaagaattcaaaggaataagactgtctgctcctcctctgctacgcatataaaaagttcacctaagataagaaaaaagagtaactaaataggttagaaacaagagaaaaagaaatcaaattagattaaaaattaattagattgatattgataattttcaatttcctgacaacggcaccaaaagcttgttcccaaaaattgatacgcaagtataca

SEQ ID NO: 239784 - DNA, 1348 bp, Cannabis indica
gttccttttattttctgcagcaactagtttctaacaagaacaaatgatttccttgaatgaaggtctgataacggaggcggagaccctgtgaatcacggggtttcgaggggaacatgtaaatcacatttatatgtaaaatatttgtaattagtgtatttttaaattttgttttaaataaaatatttgtaattagtatatttttaaattttgttttaaatcaagatatttgtaattaatatatttttaaattttgttttaaatcaagttatttgtataacattttattagttatttttaaatcaagatatttgtaattagtatattattaatttttgttttaaattttaaaatattttttatggcatttttatccttataaaatttataattttcatattatttttaaatatttttattttatcccactaaaatttatacttttctcaattaaaattacattcccatatgatccattctcacttaataattgtgagggtctaacgaattaataatattattttacctaataacaaaataggaatccaccaaataataacatcaaaatttattccaagtataattatatataccaatcaatcactcattgaagtctattagaaactctttgctcgatgttaaaaagtaccattttttttaaaaaaaaaaaatcaaaccctagttatttaaaaaaaaaaacaaaacaaaatccaggtctgttctcaaaattggtaactaatgacaaactaattatatgttagaggtcactctgatcaagagatccacctgaaaaatatatacatagaagttttcaataacaatcatactaaagaagacagaagtaataatttaacaaatacctgaactttgtagtattaataatagtaatcactgagattaccatgtatttgtagagagacaaaaaagaaaaagaagaatatataaagactcacgtaaaagaaaaattaattaaaatataatgaaatggaagtgagaagtagatctggcttaattttattgggccacaagggaactaattaagcctaaagtttcacattaataaaagaaacagaaattatagaggtacataaaaaaaatttgattaacaattaattaattataaaacaaaatatgtactgaatcaatacgtacatatatactctcgcttaatttgtttgatgaagaaattgctaggttgatgataaaagaaaagagtgatatcagaaagagagagagataggtaccgtacagctaggttaattttaaaatgttgttcaatttatatatgatatatggttattatttatttatttattttttttaaaaagtaaaaatcatgatatatcaatat

SEQ ID NO: 239785 - DNA, 1273 bp, Cannabis indica
gtatgtctattagatttcagtagatgtacaaaatgaaaaggaaagatggattaactgtttagaatatagctctgtaagtttttggtttcagatacaaaaaatttagctgttttagaatgatgtgaaattaattctgtaaatgttaggatgaattgtgattattgtttgcttgtctggtatgatagcccatttgtttagccttatggcataattgtgttcccaaaaatgcatcctttgcacatcaaagatatgttttactctgttttagaaactttcactcaagataagataatgtttttaaagacattgattaaattaattaattgttgtatgtctattagatttcagtagctgtacaaaacttcgcggtagaagagtttatgaactttatgcttttctgtatacctactttttccctttgataattgagtgtaattgtatactttgcttaatgttattgtgatatattgtttttattatgttttaaatacttaggttatgtgctatcggaaattgtctcccgaagaacaaattaaagaccttttgagaaaaaagaacttcaacgaagctattgcgttagttgaagagcttgaatgtgaaggtgaaataacaaagaacatggtctcctttgtacatgctcaagtggggtttctcttgatttttgacttgcgttttgaggaagcagtgaatcactttctgctctctgatatcttacagccttctgaattgtttccattcataatgcgagatccaaatcgatggtcattattggtattttctctattgttttggtagtcattttttgtcattgaacttaaagtaagagagtgaaaaagaaaaggaagaaaagtaatttcttaacatctttttatttgaattcttcaaattgattgttgtgtttactgagaaattataggatattacatgttatattgatctcaatgccctaagagtcttgcgtgttggcaatttcattgtaatgtcaacggtcaaaaacatgaaagagctgatagaatagaaaaacaggaagtttattaccgggcttgctttctaacgtcctcatatttcattgtaatgtcaatggtcaaaatgtcttttttctcttgaaatgaattgaattttgttttggaaggatacagggaagcactctctttgaatatttgctcattgtttttaaaatgtttgcatgataattgggaagggggtcagtttttgttttgctgtaacattattgatatgatgtatgtaacacctcagaaactatatttatttt

SEQ ID NO: 239786 - DNA, 1149 bp, Cannabis indica
gttacatacatataattacacttatgagtatgatgccacaatggatacatggcaacatttcttaataagaaatttgtggtgtgcttgttcgtacgtactttcacattcagtgggtttattattatttttattataattaactaataaatcttgattggtgatatgtctctatttatcgaagaaaaaactccaacatatagaaataaaagccttcaatttcaaaattaatgagcaatttattaattacaagttttttttttttagttgaaaagcttttaattaaattgtggcttcaacatggttttggttaatacgagtcaattatacactcccaagtcaagatttcccacttgtttctaagtactcaatggtccccattttatatcatagtgagatcgatggtcccattataaactcatatatgagtacatacataccatatatatgcatataggaccatatcatttttatgatcaaatgcgtcataatactattctgttgactttttaaacccattatttggacttcctttgcttattaaacattacaaagtacacatctatatatattttcgtactcttttgtttttttgtttgtttttcctgctttggttttcaaattatttggacatatatttcaaattcaaataaaggcatactttgaagtttgaagtatatagtggcatatttgggatttgattttgatgtatatatattttgttaatatgtggaagaaatgtttataaaaaaaatatatgtggaagaaattatttgaggtatgaaaaattgaaaaggatagtcaagttaccaaattatttattacatataatttgattagagaaatgttaaagggcaccagtagtgcctagtactctcatatatgttaatattgctattggtctaattaaatatcggattttatataatttaatataatagcatttagggagtatcgctagcaatcgtaacgtgacatgtcgagaaggtactaagtaccactggtacctaatagcaatgctcatttgattataataatgaagatggccagttaattaacgcggctgcttctgcggccacactacgttacacacaagtttacacatcatcaattacttgtgctcttcctcaacgttctttttttttttttttt

SEQ ID NO: 239787 - DNA, 1934 bp, Cannabis indica
tccactctgcgcaattgctactaaatacagtgagaaaaagaaaaggattaattggatatgagaagcaccagcaataggcagtatggcagagagagacagcaaacctaaacccataatataaagcaagttggcaacgataatggtgcggtagcgaccaagaaaagaatcggccacaaaagctccaaacaagggaagcaacgaggacactccggcccatgcattgacattggcggccgccaaagccgttgactgtcccagaggtccggtcaaatagcttatgaggttggattcaatcccatagtaagcgaatctctcagctacctccacacctatgataaatccggccgacctccaaccgcctgaagtaaatctgagaacgggagtgcctttgtggtcgacgacgccgtctacagtgtcgtttagcagaggggtttcttcgtcggcggtggaggagcttgttgagacatccatagtctttcgtaggaacactccaactcacacttgtgacccaacccaacctgtaccaaaaacaagcaaacgatttcctattcaaccataaccaagaattctacggataccaaaatagcaatcctatcctatacataatgattaccacatatatcaatcttttcagtgtgggttggattggatgggagaaaaggaagaaaaaaaaattaaagagaggacttcaaagcttcttccgaatctaattccacaagcagttgatggatcaatcaattttttgcaactgccattactattggacacctaaagacctaatagtaggcctcccacttttattctacaatattattattttttttttttacaagttctattatattgagtactgtgattgcattagagggacaagcttccaaattggttgttccatttctcataggtaccaagttcatttaaggaaacggatggccgaacctcttgcaatgctttgtaatttctatgccttgtgtcaaagcctctctcagtggacccattgaagcttccttaaccaagtttttcatgtctgatcctgaataacctgaaattcaaagtgccaactaagaaattgttgacagaaacaagactgagtacttcatcaccacaaagtagtggagtgtggagaagcttatccataccttcagttaatttgcatatggtatcaacatcttcttttccgagtttgaataatccatccttttttagtagattttgtataatccatgctcttgcttcttcattatcaggttcagctcattaaccacaaattccaagcactaaacattatcagcaaatctaaaagttaaactctgaaattttacctgaagaaggtaaagggacataaagcctttttgtaagtcgcctccgtgctgcttcatctagttcccggggcccatttgttgctcctggatgatgaatctattagcaaatttacagtgcagcatactaaaaagagcaggaaaaaagaaatcaacttgagctgtgaaattggaaagacacatgcatcagagctacttctgagtttagtcgtttaacaatcacctataagtagaatttgtccgctgccactgtcaaagccttccatttcaaaatgaggaactgtgttttgagtctcctactcgattcgtgttcaccttctgatttacgctgcaaccagaaaacttatatcacaaactcaaagtatacaaaaacaagaagtgaatcaattccacatgttgcatgtgaagcagttaattcttacatttttaccatttataaaagttaatcaccttcttgacattaaaattttgtacttaaaaagagaattgtccaagggagctacactcagcacaaaagagtaactaatatatctttcaaggtaatataaaatccagattccagaacataccttacctgagagagaagtgaatcaatttcatcaacaaatatcacag

SEQ ID NO: 239788 - DNA, 1295 bp, Cannabis indica
agtgaagtagcccatgttcttatatatggctcaatactttcacatttaatctatgtgggataatattctccaataacaaattttaccatatctaaaagtaaaaattttataatagaaaaataatattttattataactcttttccaaattataaataatccaatattaagcggtcctcaaatttttattttagcatcaacattattaccttactttttgatttggctctttccaaacattaattaattcttccacataaccaaagcattcgctccaattagtgatcttagaagttaccgaacaattagtgttctaacaaaatataggacctttcaaaaaaaatatatatgatgtattaattaaagtagcatttagtaacattttcttaattaatttttatttaaaaaatataaaaatatttttcaaaatcatgttctataaaactgttttcacttattgatttttcaatttatgagaatcaaaattttgaaaataaaaaaaaattactttcaatacttttttacaattaatttttaatcaatattttagactccgactttagactcggactgaaacccaaatctgatctcgaccgtggcaccgaacctggcccctaacctggaccagactcgacctcagacctagactcgacttaaatttctctgactgttttcaattgttgcttattctactcagtattcacgatgcttgtataggtgacagttttatagatcaacattaattctttacctgaaggtgttaataaactatcaggaattttgaattttttagtagtaaatcgttttgtgttttagggaattagagcactcacaataagtgtgctataattactaaaagctaaatagaaaaaagctaaaagcttaaaattgagatccaacaaatgctttaaacccctagcaatttagcccatttcaaactcccagaaattattctctacatagctcaatagctcaatgattaaaaaaacaaaaaaaaaaaaactaattaaaaaaatattacgtactaaatacacatttattaattaccaaaatattattgatagttgttataattttatcctcacggaaaattttgaaggcgaaaatatattttataatagctgattttattattttaaaattatttgagtagcccaaaaattttttatataccaaagaaatccaaacttaagccatatcaatctttcatatattctcaaataaacaaaataaaatagaaattgtagaaattatgcctaagagcacctccaaggaggcagcaaaaattgaaaaatg

SEQ ID NO: 239789 - DNA, 1663 bp, Cannabis indica
acatacttgtgagtagatttaagatcctggtaaaataattccaacaccttgttgatataggtagtaccatccaatccatttaagccctcttcaactgtatagttccatacctacacagtctcagaatcatcacacttgaccttctccaggcgatgtaggattgcacaacttacccggtattttcccttacggatcacaagactactgactgttacattaccgattctttgacaatgatcacaacttttcacaaaggcattagcatctttatataaagtaggccaataaaacccacattgaagcacttttgtcgttgtccttgtttctccaaaatgaccaccacaatagagagtatgacaatgagtaagaatggaattcatatcttcttctggtacacacttatgtatcacttgatcaatgcaatgatgaaaaagaattgggtcatcccaatagtagtgcttgacatctaaataaaacttcttgaattgttgtcttgacatatctaggggtacaacattggccaccaaataattaacatagtctacaaaccatggtactgagtctttctcattacaaaaagttgttcatctagaaaattatcatttattttcactcctttatctctagattgctccttgatttttaatctggacagatgatccactactaaattttcagtcccctttttatcctgaattttcatgtcaaattcttataaaagtagaacctaaccaataaggtgaggctttgcatccttctttgtcatgagatacttttatagtggagtgatcagtatggactatcatcgtgttcccaatgagataaggttgaaacttgtcaaaggcatagataatggcaagcaactccttctctgttgttgtataattaagctaagttttatgcaaagtatgactagcatagtaaataatacgaaacaccttgtcaactcgctgcccatgtactgctcctcctgcataatcacttgcatcacacattaattcaaaggggacatcccaatttggtgctacaataataggagctgaaattaagttctctttcaaggtgatatatggcttatgacactcttcattaaaatcaaaaggaaccccattcatcaataaattagacaaaggcttcgaaatcttggaaaagtctttgataaatcttctataaaaccccgcatgaccaagaaagctttgaatacccttgactgaatccggaggtggtagattcttaattatttttattttttctcggttaaccttgatacctttgcttaaaatcttgtgacccaaaataattccttcattaaccatgaagtggcacttttcccaattaagaaccaaattaggtttttcacaacatttcaaaactatctccagattcaccaaacacaaattgaatgattctctaaatactaaaaaaattatccatgaaaatctcaatacttctctccaccatatcctaaaaaagagacatcatacgacgttaaaatgtggctggagcattacataacctaaaaggcattctacgaaaagcgaaagtaccataggggcacgtgaaagctatcttctcttgatcttcaggagcaattgcaatttgatgatagttggagtatccattaaaaaaaataataggaatggccagcaagtctacccaacat

SEQ ID NO: 239790 - DNA, 1107 bp, Cannabis indica
aggatgttaaaaaaatacttgttagtaaatctagatcctggtaaaatatattccaacaattttggtctttaaaggtgccttcgaagattaaaatttttctatggcgagttcttcatgatgttcttccagttgctgccactttgcatagaagacatatcgctgattcaagtagatgcccactttgttctaatcaccaagaaacaacttttcatcctttttttgcatgcaaaagagcgaaaaagtgtggccacgcaaaagagcgaaaaaagtgtggtgtttgtctggtatacatataccacaactaatgagtcatcatgcttcttgtaagtctctactcttttatatttcagatttattaacaaagcaagaattggaactagtgacttgcatcagttggagtatttggaatgaaaaaaacaatgacttccatggaaaaaaataaaagccaactgatatattattgcaattcgcattgaattacgtggctgaattttaatctgcaaattgtaatattaacaaaggaggacaagacatcattgcacgtaatcaaagatcccattctattacaccacaatggatgtatcctccttctggacggcttaaactcaatactgacgctgcggtaaatacaatggaacaaaatgctagttttggagccattttgcgtaactctgatgggaagaatttagctaccttctctctccctatccaaagatgttacaaaccagaaatacttgaggcattggcaattttctatagccttcggaggctgattgcacattaatttcctgtgcattacattgaaacgaattcacttttggtggcgaaaggactacaatcttctgatgccacagtttcgaattttcattatattttatctgatattcgtgatcttgtgaccaatttcccaagagtgcatttctcatgttcctagatctactaatactcatattcataagttagctaagtatgctctttcggtggacacaaattgtatttggttggaggaaacaccccctcctctttgaactgttgtatcttaacattgaacatctaatatataacagttttattctaaaaaaaatctcaattgtaaataaatactta

SEQ ID NO: 239791 - DNA, 864 bp, Cannabis indica
ttgattgattgattgattgatttttaccttaatggtgcgagaaggagaaaagaagaaacgccatggtttacaggtgattaagaagaccaagatgagaatcagaatcagcataaggagaagaagaagaccaacaatgttatctaccatcgccatactcatttctctctctctctccaggagaatagagattggctcgggctttgcgagaagctcgctttgaaatggtcgcacccaaaaaattaaaaacaataataataataataaaatctctaatttttagtttaatttttttcattctaccggtaaaatacccctttcataatactatttctaattgtaatagacaaaaacatacatctagaattaattttgagtattttagttacaactaataaataaaattcaatgccaaatttaagtttaattttaaaataaagtaaaaaaagataaaaattgcttttctattaagtaaacgtaatataatataataaaataaaatatgtgtttttcatgattgtgcaaatttttcgaaattcaagacaaattatgtaatagtcaaataatattgtttagtattattaaagaattatataattatataataccgaccactccggctcaactcaataagcttcctttctttttcttttattattaaaaaatgtttaaaaataattaggaaatatattaaaacatgtatgcatttatgggcgggatattctataccccacccgtgttcctattgggctttgcctatttagactaatgggctttacttatagagaaaattacactttataccatttttatattgtcctcttttatttttaccttctttttaaaattctatcatttttacttctt

SEQ ID NO: 239792 - DNA, 2700 bp, Cannabis indica
attttggatgcaatttgctgttggaaaggtaattattattattcttttaataaacaaaatacaaacaaaattccttcattttcagaaggaacagtcttcattgaccagttttagagaaatttctgatgatttcatgtccagttgtaatataacaaaatatttaagaaaatcaatcagggtttcatgtataaaaatcaaataccattttggatgtgttttgtaaaagttattaattgaattctttgttttgttagataaaaaaaaaccctatattttctaaaatagtaaaaatagaatcctgagcttaattttcaaaaaattcattttttaatataaccaattttaggacaatttctaacatgaacagataccgaaaatataactatttttgtcacaacatctctagatcaaattattattaaattttattttgataaaaaatcagttcaagatcctatttatataattttaaaaaatacatagtctattttattatttaacaaaatagaaactttaattagtaatttttgcaaaatacagagtctaaactagtatttagccatataagtatgtattgctaaggggacataacaatacaaggtctcatcacatattagtacaattaaattaaaaagtattattggaaagtgctaatcactaattaggtgtcaccttaggaaaagagaatcctagctcctaaggccatcattataatttatgagtagggctttatttatttatttatttatcatttgatttcattagctaatggcattggcaggctcccgcttttaattcattctttacaagcaccggtagtggagagaagggagaaaaggcagcaaaagaagtagtagaagtgtttaaaatcttggaagagcaattaagccttggaaataccaagttctttgggggagagactataaacatggtggacatatcatggttacctcattggtttgaatgtacagaacaacttgtaggactcaaactcttagaccccaaaacaatgcctcggctccatacttgggctcgagatttcaagcaacatcccatcatcaaggagagcgttcctgattatgacagactcttaatccatatgaaatcagttagggagaagatgatgatgtcatccaagtgaatgaaaatgtcacaagttcatatttcagtcagctttgatcgttgtgttgttgtgtatgttgttttgtttaaatgggaagattagatagataatacgagttccattccacgagagtaaacaagggtggcaatagtttcctgtttagtttgcttggtggtacgtcgttgactatggatattagttttcttgttggtatgtttagttccatttcaatgtaaatggaaactagattttatttagttggtcaataaagatgagtgaagagttcgctcttcatttaaatatatataaatggactaagattctagagagagagagaaagaggagctttgtctttttacataaaactggactatgattctaaagaaaactaaacattttataattcttaaaattggttactttcatcataaaatatgaaagcgatcacttacttcgagactttgagaattgagatgaataaagtaagttaatgactcattaaaaagataagaacgagtttcttgtttgaaaatgccaatttatgtttcgtatcttttttataaataatgtgaattaaacaaggattatctacttggtcaaacgaacagcaggaaaacctcacttaacatataagatatagctgatattcatttgtatttgtaaaataattccttgtttgaccaagcagataattgagatttatattcatttattgtttgaacacaatgtccagtttatgtttcttagtttttttatattaacattgaatgaatataaatctcaatggttatcttcttagtcaaacaagaaattctcacccaacatatataataaatagctgatactcatttgtatctgtaaaagtattttggtgatatttcaaaacttgtaatcgataataatggatgaagaagtaaagctggtgggatattgggcaagcccaatgcctccgagagtgatatgggcactgaaactgaagggagttgagtatgattacatagaagaagatatttacaataagagtgaattgttccttcagtacaatccaattcacaagaaggtacctgtgcttgttcatggaggcaaacccatttgtgagtctctggtcattcttgagtacatcgaagacacttggcctcaaactcctctcttgcccaaggacgcttatgaaagagctttggctcgcttttggatgcgatttacagatgaaatggttaagttttttttttttttttgttatcgttgacaaagaaattagattatgtatgcgtttccttcatttttcaagagctataattaacagaagcaatagtcttcgttgacttttttttggagaaatttctgtgtattattttcatttgatttgaacaacttcgctaattgatttttaccactttttaatgtgaccttatgttcactagtaatataacataagatttaaggaaattaattaggtatttcatgttaaaactacccatcacaactatctatctgttctatgctatattgtaacttttcccctttaatccatttcacaagcacaactcttgtcagtagtgctacggagaaaaaacggg

SEQ ID NO: 239793 - DNA, 1610 bp, Cannabis indica
cttatagcgttgtctggatcagcgtcgatagcgaatttctccaaaaatcgactctgaaatgtcttaaaagttgcctctaaagcccaaattgtagcagtgacagtagaaaatcctttttggcatgcttcaaagtccctactatcaaccaagtttgttcattgcctcaagcttctcgcagcggacactagtgactactctttcaactactcatggctcataaaattcagagggctgaaaagattatggttcaaggtggagaattgctagaaaggagtgaccctgaatcattttcctttaagcattcagttatgattgtagtgaacctagtcctatattcaatcaacagttagtgtcagttaaattagttaactactatcaactaaccatgtagattagttaagctactctcactttacaggtatagttatatagtttaattccactacaaaaaatcttgcttttaattacaataaaatttgtgactaaaattataaaaattgtgactaaaagattcgtggcaaaaagtattagtcacaaaaattacaatttattgtgactaaatgtgtttttagttataatacttgttgtgacaaaaattaaattattaataatttgtatctaaaaactatgttttagttacaaataatattttattgtgactatttaatcacaaaaaaaattatattatgactaaaatattgttactaaaaataacaattttttgaattttttgtagtgttctgctgtggtctaacagaattctgtatataaggacatttgctcacatatttatcaatgagaattcatcttaattcaattactttctctcactcgtttccgttaaatcattgtgaaattttactcaatattatttgtttcactgtcatgtttgggagaagagacacctcctgttaagatctatagagtgataggattgttgaacgtacgacacatcatccacattcatgactttaggccaggttatagtgggaccagaataaaagaaaaacaaacagcggggacaattttgaaaaaacaaaattaattaaaatagtaaatttaaagtaaaacgaaaattttcttttaataatcaaagagatccagattaagataaaaaggtagtatgagctagctatgagggaataaaatagatatggagcttttgtatttgtatcgatctttccatattcttttaaacaattatatatataataatattgaaagggctttaaaagaccaagagtgtgaaatgaggaaagaaaaaccacagagaatatataaaagagcagccaactaagtaagaagagagagaaataatgtgtgatatgatatgttcattcaataatgtcttttaaaacattacgcatgtgctttttccatatatttatttatttatttttatacaaacagaaatggttctcactttctcccctggttattgtattaactcgaaaaatcaaaagataaaaaggtgtattaattaatgaccaaacgtataaattgacacacatggctggctgggccatgttttttaatatttacagatagttttcatatataaatttaaacaccactcaagatcatgtcttcacaaatcataacatctcctc

SEQ ID NO: 239794 - DNA, 1969 bp, Cannabis indica
taactgcactcaccaaatatcaaaacaaataatagtaaaaaaacatgtttttaaaacgtgtactatacatataaataactactatgggtctctcaatctttcctttcttgaccaactatgcaggctcacttctagtttttcaaacatcatgtaccaagtttccacttctttttctagaattttattgggattttcttttttccatttccatatgaaagattgtaagtaaggaaatggcacaatcacaatccccacatccccaatccaaaattgcatcttttgttttcttttaacatttaatacaagccaaacttgggtgtaaaactcaggtttgttacactctataatgggcaaattctgtcaaaccatataatgtaaaatcttgctagctttactattcctcatttatgggggccatcaccaactattcatatcaggccgaaaatgtattagccatagccacgtaaaagtaaaacccatactaaattgggctagggtgactttaatttagggcacatggatgaacctagtcaacactttaaaaagaaaactataacacaaataatagttttggtatactctttatttgttttgaaattcaaaaccacattattagtcttacgttgtaaatttttagaaccacatgaaattttatatagtttacagtaaaaaaaaattaagcaataatttatcacacatgttatattaatttaacatgctctcttagataacgagacaaataaaagttatattgaaatattctttaggggttttactataaaattaccacatatatatatttatatatatatcaaattaagagcactccccctaaaaaaaattaagatcatttccaagtaaatatatagctaaagttctattttcggtgctctaataagtgaactaaatagttcacttcattctttagctacatttagctaagatatgaaggtgagagcactcccaatagttttttactctatctttaaaatacatcactaaaattttattttctctattttgcaacacatttttacattacacaatacatcggtttttttaaaatacatcaccaaaatcctatttttttttaaattttattatattttattcattttaaatatataatatattttatttttttgaggaaaagttaattgttattataaattaaacaaaaatgtcatttacaacaacagagtaaaaaggttgaggtaaatcctctaaccaaaagcaagtctcttccacccctaaagcgaatttagctaagctgtgagcaaccatattggctgagcgtttagcatgtacaacattcacttgtgggaaaaaggaaagaagactagtaacatctagtaaaatatcatgatatgaagaaattgcagtagatccatattgcaaagcattagcaaccaaaagggcatctgtctccacaattgaaattggtaattgcagctgaataacccaattaaggctatgaaacatagcctgtgcttccataatatgagatgcaaaatttccaacaatcggtttcgccatagcagccagtacatgaccatctgaattacgaacgacagccccaacacccacaatgtttcggttagcatcaagggcggcatcaacattcaatttcaggttcaaaccagttggtggagtccatttcgcagcaccctgtactgatgtaggcagaggagaagcagatgttgatactgtatgacacttccttgttgctgatctgaaatttgataggtaattaacagcaaaggaggcaagaaacgaagctggttttgcagaagagccatgaaccactctgtttctttctgtccagattgaccaaagagtgcaaacaatttgttccatctcttgtgttgtataaatcgttgagagatggaccaggtagtctcctttgtacattgcataagtttactccagtcaaaaaacctgaatccatgtgcgccatacaactttggca

SEQ ID NO: 239795 - DNA, 1364 bp, Cannabis indica
gattatctgattctccctttaatttgaaattagggtttttaaactaggttatattaagatttagaatatgatttgtattcaataaatgtgtttgtggtaagaactggtaattagatgtctatttcattctttaggaagataagaatgttgttacattaatagataaaaatggagaagagtataaaactgtgtacttgctcataataattatcatctcacaatataaatttttatacccaaaaacgaaaacccaacctttatgtttcctattgtgcttgtgtctctgtgcgtgttttcctctcttaatgcttgtcatgtttcctattcgtagtcaatttgttctttatttttgtttcctaatttttgtgtaatggattctggttttgtagtttatattctacactgaaacaaaaaaccaaaagcatcttttataaaacataacgagtcgtactgattatttgcaatgttggttcagtttatgattttgattgttttactagatcatccgctgtttgtgttactgtgcagttgatcacaaccactgactttttcatgttttttttttctccctttctatttagttatttatttattgtttaataagatacatttatttggattcgaagtaggcactatagggccatttaattatgtattgtttcaacttagtattataattgttacagagtgataaatttgaattttcttttgatctagatttcattttaattttttagttgtaccctcttgcggaagtgccagttcttccgcccaggtgacaagtgactcatattatctaatgtttcatcccctttaaaatttacttttttcttttccttcttttatttgaagattgtctctgtgaactaattaagcctgccatttctgaatgatctacatgagtttccccatttattgccacagttgtagcagattagataaataattaaaaaaataattgatgtgttgataagagtttagaagtccattgttttttactgaactatttctctatattaataatacaagtagtgctgttttgttttgtttttctttcaaaaaaggttcattgtttttcaatgttagagttcttgtgcttgtgtgtttgtttttcttagtcggtcgtcattcatggtctagggcctaggcttgtttatgcatctctccttgctaaattcaccttctgttgtactacaatatactcccaactttaaactaaaaccaagtgattgttgtgctggttttcagttggtctcaatgatggcatttctcgcactaagcacattgacatacgacatcactttattatggttttaaatatggcccctcacatttttgaggcttcttgtagcatttatattttt

SEQ ID NO: 239796 - DNA, 1099 bp, Cannabis indica
ttgtgccatgccatgtactctatgtaaagcattattcacctgaaaatgagaaaatagtagatcatataaagatatgatggtgtttcacatattgttactaaaaatcacatctcttagtagagtgcgtataacttttttatacgaacaagtttcgtaggaaagcttagaaagagctctaaaatttctatttcacgactttttcctaattagagcatggtcaaatttaaacttgaaattttaattttatttttcttgcaattttattttttttactaaaataccaaaataaactagtttaatactaaaattaaaccagcaaaacataggagcatctcaaatagaaatttaaattggtgatctattgctaaaatataacttattatgtgaaaagtttgtttcaaggtgtgctaaaagttgatacaaatttatcacgagaaatactaaattggtgtctagcactcttatgaggtatagatattgatataattcaatatcaggtctcacttattttattttaataaagattataaaaaaatgttaaccaattataagatacaatagtggtgctatatactttagtgcccgacaacaatgctcaatttggcacataacgaaagttgattcaaataatttgaatcacaatatccactccatcacaataaatgcattacttttaatctatttttatgtcattttaatattttactactaaatttagttattgcattaaattataaaccttttacatttagcttgatttgggggcaggaaacgaaagctcgatagcttgatttcttggaggtaatgcagtgtaattaaatggagatgaataaatttttattctaatttttttttttaataatatcatttacttttttactttaaaatgaaagaaaaattcgtgaattttttttatcaattttttaattgtgtaccttaaattttattttatttctattctcatttcgattcttattttaatatttttatttttcccaatcaaacacaacctatttgaaaacaaagaggaaatagagaagtgagaacaagaaacttgattcattaattaagaaattcatgctaaaagggtgtcatagat

SEQ ID NO: 239797 - DNA, 1763 bp, Cannabis indica
attcacgtgcgtagcacgtgttgttaccaactagtttattttttaaaaatatgaattaaaagaaaataatataatcaaaaatatatattaaaataacatgtatttttaaatttttagaatacaaataaaactctccacattttaattagacacataacttatgcatacaaattcaaattttgctgtgcaaataaaactgctctcatatggtgtcagtgggtgaggtctgttttattgttattaaaatgatgtaagagaatatgatgaggtcagtcggtgaggtctgttttattattattaagagcaagacgaagactcaaaaatcaaaatcatcatgtgatattattattttgttatgaccaagacccaagacgagccttcctcccttcccctcatataatatattatacatatatatatgtcatattaatagtcgtttcatcatactgattaacttgcatgctcttctacttctaaatgaaagtgacaattaattaaattaataattgacagagaagaaaagaaatggggtgggctttagcacttcatggcggcggtggtggaattcctctggactatccgccggagcatctgcagccacgagtggacagtctccgcctctgccttcagatcggcgttgaagctctcgaagctggaaatccagccttggacgttgctgaacttgtggtactatatactttcatatgctttatgcatcttcttttatgtctttaattattcttttttagtttgtagatctgtaattactgtggtaatattgatataataataagaaccaacatctagttattatcaacttaattcttttcaaaattagagttcataatatacattcataagaatattaatcattcctcaattcatagctaagtccatctccaaccgaactctaaaacactaaatatagtgtagtttcatactatatttactccaatgagaagataccaaaattatactcataaatgactttatttacagtgtcccaccaaatttaataggatattagagcatctccaaggatacaccatctttagtgttacactatcaccaaatttgacgtcaaaaggtatttccaccccaaccacaacaccaaaaattacactaaaaaaatattcctcattattatattaattttttaataaaataaaaaaaattaatatcatcttaattaacaaaaattaccacaatgtgtactcttgattaataagaatatgatgtctactgtgtttaattttaatgtgtttaaatttgtattatttttattatttaattttctaataaaaataaaaaaaaatataataaaatatcacttttaaaaatgtgcatggtaaaatttcccaaaatacaattcttaattttataaatgcaatagtataaatatatataaatattaattattttttttttaaaaaaaaaaatatgcagtgacaacagtgcacaccatatatgtcgtgcactgtagacaaaatatcaaaatgctgcaagaaatgcaatctcattgcagcaaatatgcacggtatatatgatatataccggctcttagtgtttctcttatagaccacactattttaaagttttttttttaattattaaattatacttttaagtaaaaaaaaactaaataattatatataagtattaaaatattcttattatattaataaaataataaaaaatataaaatctggtgtaattcttagtgttgttgttggaattaaaaaaataggttaattaggattttt

SEQ ID NO: 239798 - DNA, 1241 bp, Cannabis indica
tgactaatgagtgagtatgtaaagatgtcttgccagctggcatgagtgagtattttctcttcagttttttgaaagtttgttacgattgtactgttttcgtgcgactcaaccttccgtctccgactggtgcgactacggcttccatctccgactggtgcgactacggcttccatctccgatcggtgcgcctccacgggtggtgcttggcgtcgactggtaggtgatcatcatcgttaagttttctttagttttttccagcgttcgggtctgcgtgttggggttgaagactcggggtttctgggttgttttttttctggtttttctcaagatcggattgagctgcgttttgtctctggtgtggtgcgactgggtatttgtttctcgttctgtttggctgcgtttttttctgcttggtgcgactgcgtgtttctctttgaggtttttttgatacgttttcttttggtgttgtggctgtttcggtattacgactgtttattctttctcgctgcttgctgcgatttttaccggtggagcatggcgtcaagcagtcatgccatggaggacatggagcagagctacgggaatatagagttggaggatgaggagtgttttggaattgagatcgatgatgatcatgaggagatgactctcgtggatgatcggtggtgcctggtgggtagatttttgaatgctcgatcgttagactttgaagctatgaagcacacattggctgggctgtggaagccggggaagggtctttttgtcaaggagttgggtccaaatttattcttatttcagttttaccatgaaattgatattaagagagtcatcaatggtagtccttggactttcaataggcttcctttgattttcagcagggtaccgaggggtggtgatccgaaagcagtcagtctaaataaattggatatgtgggttcagattcatggcctttcaacgggatttatgacagagaaaattgtgtctacagcagcaaattacatcggcactctagtcgaatcggatccgaaaaattataatggtctttggagggaatatcttcgagtaagggtgacggtgaacatagattttcctttgaaaagacgcatgaaattaaagaaaactggtggtgagtggttctatgccaattttaaatatgagtttgttccaacattttgttttatctgtggtattattggacactcagaaaatttttgtcataaactttttgatactcctgagga

SEQ ID NO: 239799 - DNA, 1321 bp, Cannabis indica
ataacacttttagatcagattataattaaattttatatttttgataaaaaaatcaattgagggtcctatttgtaccattttagaaaatatagtgtccatttttattatttagtaaaacagagagtctaatgcgtaacttttacaaaaatacatggtccaaaatagtatttaccctttaattttatttagcaactgtcccaaaaaaaatatgttttgatgactgacgtacgggaatgtaaagttttgtaatagtgtattgattcaaagacaacataaagacatcaatctgaaatcgatttcaatgtcccaaaaacacattaatgagccttaattgcatccgataatcattttccattggttttattacttctcatatatatagacatcacatatatgataggatttcttgagaataatgttaacattgagatttttattacaactgatatattgattatgcttagatggcttgaatttgagggagatatatagaaagagtatagaatgatatatatgcacatccaaaatatgtaccaaaatattaggtgacaatttagataaatggaagagaaaattatagaaaaatgagggtttatatttttgtggttatttaattttagacatagtgtgatccaataagtttaggatgtataattgttaggcacatggattacttgtttttttattaagtataaccttacaaagtagatggtagtaattaatgtagaaggttccaataatgtatttatataaattgttaggcatgcaaagcctaattaattaataaatgagggtggccaatggccactatatatatcaaggcatcgactgtatgtagcataatgtgatttatataattataaaaaaaaaaaaaaaaagaagaagaagaagaaagttgagaaagagaatggcagtgaagcatttgattatattgaagttcaaagatgaaatcacagaagcccaaaaggaagaatttttcaagacgtatgtgaatcttgtgaatatcatcccagccatgaaagatgtatactggtaatttgtgattaattattttgtttcataattcatacatttaattaattataataatagtatagtcatgaatataattctaataattttgtttgtaggggtaaagatgtgactcaaaagaataaggaagaagggtacactcacatagttgaggtaacatttgagagtgtggagactattcaggactacattattcatcctgcccatgttggatttggagatgtctatcgttgtttctgggaaaaacttctcatttttgactacacaccacgaaagtagactatatata

SEQ ID NO: 239800 - DNA, 2251 bp, Cannabis indica
caaatttgcaacttgggtaggtcctagtcgtaattcattcattcaaataactagtaattgagtcacacaaatctaagtaaattaaagaagtcatgctatatattattttttaatttttttgttcttatttttacgatttaagttactttagtaattattttagtaacttttatgtgagctgctatatgaatttaagttacaatttaagttgctccgttagttactatgtagatttctacgtgtatttttcgtaaacatataaaaaaaaattactttaaaatgtatataaaaaaaaactataaattaattagccaaaattatatttactgaaaaaaaaatcaattttaatcaattagtgaggacaacatgacatatttaaagacgtgttgataaaaggtgtatagtatcatgatattattattctcaaagttcaatcatgccatataggtctgtttgttatgatttttcaaagtattttcagaatttaaatgttgtttttatgagtgtttaatgaattttcaataataatagtttatgggttcaattttgaaaactaataataaagaatcataaattttcaatatttacaaaaaattattacttttagtgataattttttagtcataacataaattttttgtgactaaatatgacttttagttacaataaaaatttacttgtggctaaaatatagtatttagttacaaattgtcactaatttagttttagtcacaacaaatattgtgactaaaaatacatttagtcacaaaaaattgtaatttttgtgactaatacttttagttacggaccttttagtcacaacacaataatgataatttataattagccacaacttttttatctttagtcataaattttattgtgactaaaagtaaaaatttttgtagtttaatactcaactactttttccatgaaattattataatagtacacaatttatgtaatttatgcaataaatcaaaaacttaatttaaaacatgatatgaagagaaataagagctacccgccaagtagagatctagctaaaagaacaacagaacctgccactccaaaaaataccacttttgtcagtgcaattagtcaaatacactggcaaaacttaacgagataaagtggctatggcaaaatctaaaatttggagaaaaatttatactgacgcactaacctatatcagtaaagttcatgaaatgtgcagacaaaaatcttagaattaaccgccaaatggcgtgaaccattccaatggttcagtaagcttttgtcggcatataatgcaaccgacaaaaggtctaaaaatggattaattttttggggaggggaacttttgccgatgcatatatgcttcgacaaaaggttactagaatttttttttttaacttttcaacgggaaaattatagttttgttggcacaaatatacgtgttggaacttattttaccaggatttagatttactaacatgtatgtttgattaacaccctaaatatgaattctttaaaataatgaaataaacacatataaagttcagaaaaccttacattgatggcagcggaataatatgactcctcacactcagatctctaacccttattcctttctgtcgcagagtaataacaagatctgagtctggatctctttttctccttcgatttggttaatcaccgtcttctgcactatgactaagtacaagacttgctatgtgtgagcatggtactctatcactaaaggcttaaatttgatgaaagaatagcaagaggagttcaaaattactacgaaagagtctctcatctactagttatctgacagagctagaaaactagatttagattggttgaaggtgttggatgagaatgagagcatcatgttccttttatagtatttcaactagggtttaggatttaattatatagattaaaaaacataaaataatgggcaaaaatcactctagtggtcggccacttaatgcttcactagttataattttgccactttatttcaactatttatctctctttcaataatgtcatatttttcaattttaatcatataaatgtcaaaactatttatttaataattataattaattatcaaataaaattgtcatttattttatttaattaattagacttaacaaagtctcttaattaacaaataaactccaaaacctcttttcttcacaattaagcacttgcttagtgaaaattcataagtaagacatagtctaattttaaaatt

SEQ ID NO: 239801 - DNA, 2188 bp, Cannabis indica
cctttttttcctattttttttttgagaaaataaaaaataccattaatagacaagtcgatgtatgctatactttaattggaaccctacgattttgacatgttaatatacaaataaatatgaccatttaataaatgtgacacgcatgaaggcgtagagccgcaatttctttggccggaaagagaaaatcacgttgattcacaaaatgtgcttacataaaatggtgctatatataatctatagagagatcgagaaagattttttttaggtggcatcactttttttatttgttgtacattaataaattatatttttatttttttttaatataacgtacatactattgtaataaatattctgtgttcaagaaacactaatatttaacatttaatggtgttgaaataaaatttaaattagtctattgttgaactgaatgttttgaattttattttcaatattgtaaataattcaaaaaaattcaaaaataatagacaaaatttttattataactataatatatatatatatatatcattatataaaaaaaattatttataacttcttcatgtaccaaaaacaaaaaatgcatgtgagcgttgttagttaatgatattaacaatgtgtgagcgttggatgaaacctgtgttcaatacggttaaggtgaatgttgacggagctatttttgaagctaagaacaagtttggtgttggttgtgtggctcgtgattccaatggatgtttgattgcggctttatctgtaagtcgttttggcttagtcaaggtagaaattgctgaaataattgggatcaaagaagccttgagttggataaagaagaaatagtcaactaatgttgtaattgaaactgatgctttggtggtggttcaagctataataccgctattcttatgccttctcagtttggattattagctcatgattgtagggagatgctttcttctctttctaatgtttatttgatttttattaaacgatctgctaataaggccgctcattgtgttgctagagggtcttgttatttgacagattgtgagtttagcaagcataatgctcctagcgctctaaagaatattgtatcttctgagtgtttttttgaataaattccatctttgattcaaaaaaaaaaacaaaaacaaaaaacatcctagtaaaagtgatattctctataaattaatgatttattataaatgaaaagatttataaagagagttcaaacaagttatcacgccaaacccaaacgaaaaaaaaattgtgaattttatcaactttgaatattaatgaaattgggacttcaactttcgaagattcttgtttatattcgactcaattgggatatttgcaacttaattaaaatattagtaaacatagagttcacaaaatattcgacccaattgggatattcacttagtactatagcggtcaaaatattttaatgaatttacgtattgtttacaaaatatcgatattcactacaccaaaaaccccaatcagtaacattttaaaatgccactattacttaaacattttattattttagtcgcatttgtataaaatgtaagctataccaacgtgactaaaaatacaagtgtcactaattaattttttagtggcatcttaaaatgtcacctaaatataaattgtgataatttgaaatgtcactataatatttaatatataattgtttaatgtttaaaaaataatttagtgacattttgaaaataccaaaacttatattagaatcataatggatgatcagttttgacaattatatttgagccacacagtatcactctaacaagtataggtttgctcattaaaccataatccaccatctcttaaaatcttattttatgagcccaatatatatgtccgcatatcccttaagatatttaggcataaaatgagagatttgggtgtattaagttatagagtgataagtggtaaggtttaagttaagagatgctctccataagctcttatactcatgctttgatacttagagggattcatggagattcacactacaaaaattttacttttattagtcacaaataaaagtaaaaaaaattgtgactaattataaattattattcctatattgtgactaaaagatccgtggctaaaagtattagtcacaaaaattataatttattgtgactaaatatgtatttta

SEQ ID NO: 239802 - DNA, 1812 bp, Cannabis indica
aatttttttttcataattacgtatgttgtagttatttaagattatttgtcaattttttagataattctgaatagtttataatgccgaaaataagttttaaataattacttaccacgcgtataagaaaaaacagtcgcacgtacaataaaatatgtaaatcttatttttagcattgtaaactgcttgaaattttttgaaaatttacagagtaatctcaaataactataacatacgctattatgaaacaaatagactaaaaaaattctcttgagtgctaaaacaaataagggtctatcgaaaagtataaggtaagtctatgtacacttcttaaaaagtatttaaacctcttatttttttcgacattcaagatagttttttagtcatttttttaatgatcatgtaccttggagtaatttagaattatctgtagtttacaatgctaaaaataatgtctaaatattttgttgtacgcacgactgtattttcttatacacatggtaagttaatgtttgaactttattttcggtactgtaaactattcaaaaaattttaaaaatttccatgtggtcctaaatagctacaacatacatgattatgaaaaaaaaattaggttaaaaaacttttttagaagcatgtttaccgaaatttttgaaaaccgattcataaataagttaggcttaaagaagaataaaactaggatttttatgtagttcggcgttaataagccttagtccacaagtcaatattattacacttgaaaaactatagagtattcttacataaaagtgttcttgcctaagtcttagaaccataatctttagccctaaatttgcaaattagccacgaataaattcattagagaagtattcgcctcctctatcacttcttgacatttttattttcacgttgagttgatttttaacctctactttaaaaattttaaaagtactaaatgcctcatcattttgctttaacaaatatacataagtatatctaccataatcatcaataaaagtaataaaatattttttaccacctctatttagaattctatttaactcacataaatcactatgaattaaatctaaaaattttgaatttctaacgatacttggaaaaggtttttaatcatctttacttttatacaagtttcacatttaccataatttcttatatcacaatcaatcatgccacatttttttaactctttttatagtagaaaaatcaatacgagctaatctaagatgctacaaaaataaagaatcatgctcaatcatataagtgaaactagatgctttattatcgataacattgaaagttacatcattggtgcacaatttcaccaatccctcacaagaatactccttgcccaaaaatacattaaacttaataagtatgagcttaccagacttataaacggccttaatacagagtttttcaaataagtcaccactaattaagtttttatacatgtcgggtacataaagcacattcaccaatgtgacttttttaccgaaagtaaaaaacacaccaataatacctttacctgatctaaaatgatatttacccattctaaaattaatataattttaccgtcaatatcccatattataaacattttgtatttaattgttaattgtaaaatatatctttgtggtatatacccattcatggcccaccccaaactacccattattagaattatattccaaaatataaagtaatttaaaataatcaataaataatagaaacattcgatttgtgcactgctgcaccaagtgaaacggcatcgtttcaggttaaaacgggcat

SEQ ID NO: 239803 - DNA, 1200 bp, Cannabis indica
ttttgtaaaaaaatgacaaaagtcagtatattaggtaaattttctacattcatagtacgtgaggctgaaaaataccaacattggtgagtatgttttatgtttttttatgatatgtggatgaggtggtaggagtaagtaatgaaatacatcgttttaaatattgagtgaaatattcaataaaaatattaataataattaaacaaatgaatggggtccttaatttttgtatcactcattggatgagtattcgtagccacaccatgaccatataacataacatggcttaaacccccaaaacggttgatgagtagagcccatcatcttctaaatcatgtaaaaattgaccaatatatagaccaatattggtccacttacaattatatgaatacatgtttcaaccacatgaattatggcagttttatcatatgcaacggtttgatctcatctaacaaggcacttgcacttgtcacttaatttcatgtacattatcattatatgttaagtacttgatttgggcatgaatgggttgtacgaggggtcaatttaaaatatgaggcccatttatatcttggtttgaagccatatggcttaagtagggagtgttatatgtgtatgaatgtagtgacacatacattattatgtgaaaattaaaaacatatagtacatctgattaaatacctacataattatgtagtttcgatccatttgtattactgataccttactattttggcacttataataatatattatatttttagttattgcaactctagaatttttttttttttttttttggtaacaataagcatttatatattaaaaccaataaaataaagagtaaacctcgcggtcgttatataaaatattgtttagtataggagacacttcaactgtgtcagtcatattttcggcaaaaacccactctaaaatttcctttataaagaaaaattttactaatcaagaagtaaatatcaatcatcgaaagggcatataaacattaatctcaatgtacaattaagactcaacacatcacacaacctaaagtattttgatatttatgtttgcccagtgttaacctactagagtctagagttccctcaacggcaacaatgatagctgataagtaagaagcaacatgaccaagtaaataaaacattaccacacaaaatactaaatagaccacaaacctctcaacat

SEQ ID NO: 239804 - DNA, 2032 bp, Cannabis indica
aaaaaaaaaaaaaaaaaactacaagtggttcaaatgtgaggggtattatggggataaagcaaaagtagtcatatattgcctatagtataacatttaggtttagggatataattttaggattttttaagcatagaaaatcaaatttccctatagaaattaaaatttagtagaacgctctaggttttctcacaagaaatacttcacacaaatatgaaaatataaaataataagatttgaagagatagattagtttgactctggtcctatttataacacatataacctctaaaaacaaccataaatacaattttacaactgtataaaattttcctaaaataaactttaatttgccagatctacaatatacaatgacagctgaggcaaaatcaacgcactatccatagccaaaatcatgattttacatttatttcttactataaaaaaaaattatacaagttatattgatagcaaaatccaaaaaaatcaaatatcattaattagtatagattataccatacataaatcatttaaacaaggttttgataaaaagaatcccttatctcttataaaaacttttctgaatattcaaaataaattaaataatatcttaacaattaaattacaaaaaaaaaaaaataacttcacagttagataaagtgataattacttataaatttctaatatttaatttagccattacatatcaaaataataatttttattacttaatattaatttttatagggagtatgaaaattgaaaaatataactcagattctcaattacttcaaatgacacaattacattataattatatggacaaataaatatgtaaaattacgtaattaccttcaattataccaaattttaatttctctttaacttttcaaacgtgccctaaaaaccaatcaacaccttacaatcaacaattattttttaataaataaccaacaagaagaaacaattgatagcaacaatgagttgcttttagtttttctagtaactcaatgtgataatagaatacataaatcgaaagggccaaaatggtcaattttcttaaatgtgaaatattcttaatgtataatgaaagataaaatctcaaacaaatgagacaaatacaaaaaagacaaataaatatattcttttaaatattgtgcatataaatacaagatcatataatctatattgataggacataattattataaaaaatatagaaaaaaatacaaattattgaattatttattacatcacttaataaaattaaattattttttatttacataattttcaattgaataaaaaattattgaggatctgattgaattggtcagccttttcaatattgggtaaatgtgatgcttcttttatcacctccaacttcacattctttcccagaagcctgtgatcaaaatataaaaatatattaattaaaattaattaaatagaaaaataataagaaaattttttaaaaatattttttttttttgtatatttataattttacgatttaaaatttttatttataaaaatatactttcaaaatttcaaaattaaaaaaatacgctttgctcaactaaaaataagaaaagaactaaaaaaataaacaaaaaatcaacctcatggtcatgaaatctataattttataagacaatcacgaaaataatttcatgacaagtgacaattataatacaactataaataagctataaaacaactaaaaaaacagtttattattttcactgaagagatatttttataaataaaaaaattacaaagaaaaaattaaaaaaaaaattacgtgttatgtatttttgtaaattttttcaaatttttagtttattatgtaatttttatttttggtcttttagattattttcataaaattaacaaaaaaatttgcagatttatataaatatgtatactaaaaattaaagaaccttctaaccacatatgtgtctctattatgtacactttatacacccaagatatatgatttggcataatatataatagatttggttttaatcac

SEQ ID NO: 239805 - DNA, 2059 bp, Cannabis indica
ctctctctctctcttccttttctcttttcgattgatccatcccctttttcgtttgttccagggtatttataaagctttgtaaggattacttaaaaaggggtcacttatctttgagtgccagcccctaggtacacaagttcctaagatacataaaataagacatacatgacctatgtcgtaggtgtcatagggattaggtgagagtaatctttatcctcccttgattgatgtgattcttcataatggaggcgtcactagactctttgattatcgtgtaatcaccgtaaatgatgctgacgccatctgtcacatcctttttatgggtgttctaatacgtttctctgattccgcattaaatgtgaaatgattgtctgaacagttctccttctcccaaagatgctttgttgtatctctagctcccgaggagtaaaggcgggctttatgctcctcttcgggggctcgctccctaaagtgcacttgtttgtctatatataacttagctaattttgtgggtgaggtgtccttgaaattcatgtgccacatgcaatcgctgccacgtattttgggaaaaatccgaggcaacacctttgaagtttgtattcttattccaagttgtatataaattttgaaatacacttaaaaaggagaagggaaaagatataattatatttttttcttatcatttacctcttccttagaaagctttaaatttaaaagactcgaagtagctttaggattaggagattggactcaactgtaaataagtgagttctgaactaattttgtcactcttctaattccctcccacacgcctaatcatttagtgagcacctcaagatttcttcttctcttcctttgctgatattactataaggactccttaactctaaaaatcccttgaaataatttctccaagcctcccaaaaatccacaactcctttcttttgccttgaaaaaactcctccaagctacttagactttttccaaccaagtttgactttccttgtgttgtaagtagcctaagttgttgaatttgagatggctagggtgaagagaagcaaaaggttgccgaatgagtatgtgatgagtgcacatttgtacacttattcatagtcaattattagttaaattagtatttatttcttatgttttgtataatttgatgtgttttctatagtgtgcagtattatgcataaattgatgaaattatgataaattacaagtgaatcgtacataattgggcgaagtaccaaaatcaaggagtaaccgagtcgagaaacaagctgaagtgtaaaaaattggtgcttggcgctatagcgcagggtgtaggcgctatagtgcaggactggaaaaaatattgcaaggaaaaaaagataatttcaccatgtggttatttcgggatatttcttttaggcactatagtgcagggtgtaggcgctatagcgcaacacttatcttttataaaaaataaatcctaattctaaggggattcatctatctttgttggcctatataaagaatgatataaatcggattgaaggacgacttgagagatagaaacaagcaactttaagattagaaaacacattaagagcaagagagaagagatttgaagcgatcattatcaactttcatcattaagagttcttttcttcttattcttcttctttattcttttgtttagttatttaattatgaacatgattatcgtggttattatgtttgtgattatggactaaacactcattctagagtgtttatgaaactattttagattatgaatttaagttcttagattattcccatatttgttcttgctatttgtttatgcaattttgtgctcattatcatcttcttaatgcttgatcaccattaattagtatagagattttaggttttacacttgagagaggtaatctaaaattggacttagaattgcatgacataggaaaagtatgagattaagagattccactaattctatgagtttcatttaaagagaatcatattagtgcttatttgattaacattgaatgagtttgttgggtttatgccctaa

SEQ ID NO: 239806 - DNA, 1618 bp, Cannabis indica
ttttttatatatataaataattattattgtatctgtcagtctttgggttacaaacaacaaatgtgaggctcttgttgtcgaccccaccttaaaaaagcaaacatatattcttaattttaatttatttatgatgtaataatttaattagtagtgtactaaagatttgctatgttttttttttttttggttaagaataagatttgctatgttaaattcatacgaatttcgttcttaaatgagcaactagttataccaaatgatgaaatgagtgggctgcttctgcttctatagtaacggagaataaattgtgcaaacaaatactcttagttgtaatggtgaccagaatctgaaactcctacacacgagaatcttaagaactaatcaaacagccaaaaccagcctcacctaaaagttaaggagcattgtttatgatattatatcggacaaagtcaaatattagactttggacataatagctttgaatagaattttttttaataagaaattttgtatagagccaatagttagcagtttttcatattatttataacagatgtgtttggaaagctaaaaagaaatcgaaaagtattgttactaagcataatatgatgtgaaaaccatactgatatagcgtgttgcgattagttaatagtttcttatattatttattaaattaaattatgtgggatccgatattaatttgcaccaataataacataccacttcttatggtgcttgataccgtaaagtaccatttagcattcttcgaattgaaattaagtgtaattgaaagtaattacatttatgtatttgtgtaattacatgtaattggaggtaattgagagaccttagttacattctaattactaaaatttttttattttaaatattaagtaataaaaattatcattcgtcaaataagagattaagaattcatatgtaattatcacatcatattttaatacatcttgtattttaaaataagaattgctaataggcatttctgttgtttaagaccttcttagtgtcgtagagttattggtataattaaatattaagtcttatataacataagaaaatagtattttagaaaatatggctaactaatggtaaggcactacttatagaaagtgtaaggtaatattgatataataataatattttttaaaaaatataatgtaattaatatattattgtaattacacaattatttctaaacataccccatatcaaaatatatgggatttaatattaaattacacgaaatataagtatatcagttcttatggtccaccacctttaacatttctcaaaacttaaaggtatctagcagcgtgaaattttattattatttggctcgtttggaatgttgtattaggttgtattgtattatattgaattagataatagatcatatttttatataatactatgttaaattttaatttatactaaaatattatatatttaagtgtctataaaagttaataccacatagttttatataaaaatattacataaaatacaatttaatataatattatacaataacatgtacggcataccaaacgaacccattattattattttcctaatggtgtacacgtagtttaataat

SEQ ID NO: 239807 - DNA, 1732 bp, Cannabis indica
catatttagcacaaaaaatagttgtgattaaaaaattgtcactgaaagtagttgtttttcatagtgtctctaattaacatttctctatgatttttgaaaagcaagatgagtgagccaatgacagacggtggagctcgcagctgagggagttgacggtaagggcaaaggtcactgctaaacagagcttttggacgagtcgacaatggggacaaagcttcacacatttttctgagtttcatacatgctcaccatcagacaagtaaaggacagaggcctatgaggctttagagagcctccacttctatgacagtgataatgccaaatcatactccctcactttctatcaattacctatctagaatttcataatcacttatgaaccaagtgatttagttcatgggtatgagacatttaaaattttgttttgttttgaatatttacacttgggatttgaacctctacgtataagactttatttagtagagctttactaataatgccaaacaatttatggttgtttgtatcatggagcctgtgaatcgctcccctccttaatagcagaacaatacgagagtttgaatatagaagacgaagaagaaacgggaattctgtatgaaggtggagatgaggaactgtcagatattgatgatagatgggtactagttggtcgctttcttacgaaaagatccatcgattttcaagcaatgcaaaacaagatggcggtcttatggcaaccgggtcgaggtatgtatgtcaaagaattggaacataatctctatttgttccaattttatcatgaagtggatatcgagagagtaatggaaggaagcccgtggacctttgatcgtgtcccattgatatttgaacgccttaagcaaggtgaaaacccacggacagtcatgctcaataaactggaattctggattcaaattcacaatttgactacgggattcatgtccgatcgagtgattcgcgacttaggcaattatttgggtagctttgttaaatcagacccgaacaactttattggtgtttggagagattttttcagagttagagtgaagattaacattgacaaacctctcaaaaggaagaagaagcttgaaagaataggtgggattgtttgctatgctcaattcaaatatgaagacctatctaccttttgtttcatctgtggtattctaggccactctgaaagattttgtgaaaaactatttgacaccccctggatgaaatagaaaaccttataatttggaattgaaagcggcaccaagaaggaaaaaccatacgatcggagcaagatggttacggcctgggtcagttaataacagcggtggtttctctgcaactggtggaacgtcgacgacttctgagttctcggctggccgtggtgttggtcgggctggcaaggcttcgattgtgggatcaggatcgaagaatcagggatcctcattcactaagccgattattgtggagggagaggaggcggtttacaaggaagtccatgctgatttagtgggagggtcaatcgatcagcatcctaaagatataaggggaaagtcgcatagtcaacatacagatgaagtcattatggaatataatggagaggattctttagtgattttggaaaataaaagaagaagaaaaggccaagtatctctacaaggaaacttggacaatgttgggttgggcctttctaatcttggcccagcagataattcaaaattacttg

SEQ ID NO: 239808 - DNA, 1261 bp, Cannabis indica
taaaaaaaaagaagtgaatcattataaaaaatatacaatatatctataatggaagaagttgaaaataataaggctattacgtacgtagagcatgaatgattctgatttgggcagctgcatgaacaaattgggcaagaagtgttgaccccatgagcagaggataaagagacacaacactgatttggtacgtccttgaattgagagggtggtttgtagctgcattccaccttccaagtctctgaaattcaattcaaaagtaacacatatataatttgagaagccttatataaatatatatatttataaatttatatataagaaatttttatttatatgtattttttcctttcatcttattttaaaaaattattttctcttcagtaattatttacaacttagtatttcaggcaagctattttataaaaaagcattactaaaaaaatattattagtgtctagcactctcctcagtatcatattgtaattagtatcggatcacatataacttaacaaaatagcttttagaaaatatcgctaaccaatcgtggagcactacctatagaaagcactgggtaagtgcccaatagcaatgctcttcgtaatagatttgaggtttaatattattttggaccttgtattttactatcctgggcttcaagttggagcgctaccctgtattttaataaatccggttacccagatgaggccagatttgggcacctcgattcttgtgttttctcgatatttaaaatttttccatatttatcgattaaaaaaaataagttttgagttgaagtcctagaacaaattaaaataaattatttactgatttgtttttttaatgtaaccaacttgaagacaatttctagcccgaagagatgtaaaaaatgtactaaatcttatcataagacatctaggtagatcagattattattaagttttattttgataaaaaaaaaaaataagctcaatgtactatttgtactattttgaaaaatacaggatctaatgttttatttaacaaaataaagaggccaattgataatttttacaaaatacaggatctaaaataatatttatcattttttcctttaaaattttaaactacctttccatttttataattgtaatttttatgaaaaaattaataattaacaatttaaaattaaatatgacatctacttttaattagacaaaaaacctaacttaaagcttgcaaaccaaaaaagtaattcactgagacttaatgatgagtttttaag

SEQ ID NO: 239809 - DNA, 2013 bp, Cannabis indica
ttgatattgtttgttaatattaaaataaaatattaattatatttttaaaaaaaattaagaaatttaataattatttattttattataattagtttataatatggttttcactacaaaaaatttattagtcttttaatgaaaatagttttttctaaaaattgagttaaaacagttttaacttttagctgtaatttctttaaaaattcaaaaagttattttttgactgcttcctaaacatatttttattacaatgttttcaaaaaataacttttaactttttcaaaaattgtgccgagcaaacccttagaactgtcgatccaaaaaagatgccaataaaaacaatttataccaatacaccagatgctattttataataatatttaacaaagggatttcttgcttttattttactaataaagtagtaaagtactatggaagaaagtgattttctttatctacactttctctttattctattattttctttcctcacccaccaaacatggcgtgcgagtgtaattacatcatctcatacgcaaaccattttcttatctattgtccctaatcagtcataatatataaaaaagaattcttaaagaggtgatatatatatatagatccacagtaaaatcatatttttgtttaacaatcactagtaaaaaaaaaaacctgttaatttactcttgatcgaaatgatcataacaacaagatcttaaccaatattttcagtaacgctccttaaaaatcaaagccaaagaatcataaaagcagagtaggtaatgccattaaatttaaaaatcagatccaattcctgtagtttgtgttgtattatcaccactataaagtataaaatataaattgtaacacgaaagtttagagtttataggtatacaacaacatttaaaattatcatatgacaggaagtctaattcacaaaaagaaggaacaaaaaataaaaagtgtagagaagaagaagggagaacaaaaaataacaagagacaatttaccagaaaacaaagtccctatcatatttcgtataacaacttctcaaatgctttcaagtgatcaggttgaagaccaattgcaattgacaagcttccatcgtttgttgggctaggtaaagtaaaagctaagccctcacaaaaaatcccacctggtcccatgaaaattggtcgaccccaaccgaaatcagcatcatggataggcaatctgacccaactagtaattccaagatttgggcacttaaaagtatgagctccccggacaagagctgaaagattaggctgaacttctaagaaatcaagcgcggaccttaagtactcgttgtccatccttaccaaagcatcgtgaattcgactagcagcataccaagttggctttgacataagatcaccagccacagcgagcggtgtggatgtgaaaatcacattgccaaagtaaccaggtgggagtggtggttgcagcctagaccttccatcagtagcaatgtacagttttgtatcttgatcgtcgggcaatcctctagccttgcatacacatctccacacatgtcctgataacatctcgtacgagctgtagttgactgtgttcccatcttccttgctcttccctttcaacatggctacttgtctttagtcaatttgtacataccaactgcatgtgtggtgttttcgggtgtggatcgaggagagtttgtggtggtggtgggtttttcatgggctggtggggggtttggactcaatgtgatcaaatgtagctttaggtgggtcacgagcacgaagtagtgtcctatctataaagggtggaattgtaaggtcaagaccacgagccatatcagaccaagtattcacaaaatggagacctgaaaaaccatctgcagcatggtgtttgcataccaacaccaagtgagtacacccccacatctaaaagtatgtaacctgcaaataataacaattttacaatcctcaaaatactaacataggaattcattcagataagaatagcattcaaatt

SEQ ID NO: 239810 - DNA, 1831 bp, Cannabis indica
gttaattttaatattttttaccatttatttcatatggtatatatcccataatagacatctgttaataaattaaactgagttgggatcgaaaatctttaattctaataatttcatatggtttgaatttttaaaagcttagtaaaaatttcaaaactataatttggtatatatatcatagttagaggagtaaaatatttttattagtctaaatataatattagatattatttcacatattttaaaaataattctattcaaataaacattatatgaaaagtttgtttaattttctttgagtttctgctaattaatgagatttttttgtctttatattttattaaatggcttagtttgaagcatggacacattgtcctagtctctatgatgaggcacttagattaaaatatatatatatatatataaatatatatatatatatataatataaacaattagtattttggcttagtggtgagctatcttaaatttgtttctaaggttggaaattaatctgaaaccaatacatatatatatttatatatatattacatttgtatataatatacaaactcaattattagtgatgttggttcattcccaaattggtgatgttttagactagatcaatataatatatattatataattataatatttttttatataagatatatttatttttttaaaaaataccatacataacagataacactactatgatgttttgatgtatattttataagtagattatattcatgatgatatatatgtatatataatatatatatatataggtggcatcgtacatgccaaccttacccatatatcatcatatataataaaccgtgactaagtgtgattaaaaattaattaaaaacgtggttcggaggtagattattggataaaccatacattaattaataataataatactaatatatctactaaaatcataattaagtacgcatcaaactagaccaaaataaggtaacataatattagtttgggaaatgttgaaagatattgcttagtactttttgtttagtactctcttacatattaatattgttattggtttaattaagtgatcatgtctcatatagtttaatgtaataaattttaagaagtatagctattagctagccaattgtaaggcaacatgtttggaaggtactaaacatcattagtgctcaaaatgattttattatgttattattaaattaaaatatgtgagattttgttagctcccgtttatttatattgtattgggattaagcatttaaaatatttatttttaaaataatttttgtctaatttttaatttttaatttgagtttatatttcaatagattcaatattaaattgtattaaatataattttgttaactgaaaaatataatatcttaagtaaatgtccttttaacaattttatttgaaaatgactaaggaactagttaattaataaggaaacataggagttataataattgagaaaattttagttcaatattttactttatgattattttaacaataatgtataattatcttagttaaaataaggagtcccttctacctaactaatctaattttgttttcctttttttttcttttaacaaaaattaactaatctaatattctttctaatttgttttgactacattggccaaagctttaaaaatataaagatcattaaagacggctattgatgatgaatcaatattgccaactaaccaaaagatgtgatcgaggtgtctttaaaatcaaaaataaaatcattattttattttagggtaaattttgaattttctatacttacatatacctaata

SEQ ID NO: 239811 - DNA, 885 bp, Cannabis indica
atatgttagttccacatatattaattttttttaatttttttttttaaatttacagtttgagtttttaaagtagttgcatcactagctgtaataagggtttttatacgattttttgttacaatttagattgcaacgtagttgcaatagagatttctatataaaatttcgtaaaaataacaaaaaaaaaaaaaaaaaaaaattattttaaagtaataaaaataaaaaaaatctaactttcagaatttatttttttctgaggaattttttagaatattattaaagagtactagtgttaaatataatagagtatatattgaattgtataataatactacttatttgcaccaatattcaaaagtaataataattttacgttatatatatccaacttttatcactatgagtttttatttttagttttttatttttgtcatcatcttgacattttctttacaggaaaattaatgaaagggatgttgttggcccaattccagaagagctatggagtctagtcttctcaccagtttgtaagactttatttgatcatcactaatttaggttactccaataatttctatgtgatttgttatgtgaatattaattgcgatttagattgttccgttagttgctataagaatttctatttagaattttgtaaaaatacaaaagaaaaaaaattattttaaagtataaaaataaagaaaaaattcaaaatttgtattaatattgtttacgaaaacatttaaaaaatgtcataaatagattaaaaatcgagtgttaggataaaataaatatggaataattatataaggcaccattttttgtaaaatatttatatttttacgttcaaagaataattttttacatttttacagtttttcaaaa

SEQ ID NO: 239812 - DNA, 1041 bp, Cannabis indica
tataaaaatatgatatataatcgaaattcaatataatataatacaactaatacaatattccgaacgagcccttaaataatataataagtaatttgcgacgcgtaaatgcttaaataccatttcaaaaaatagagagtctatttcattatattaaaaaagttatcgaaaattaaacacagtatcttatttaatattattttgaaaaatataagttcattttgttatttaataaaataaatagtgaaattagtaatttttgcaaaacacatgatttaaaattatattaacccttaaattaagttttaaataaaaaagaattaatgacctgaactaatcaaagactgcgacgtgattattgacttgacactaaacggtcaaatacctataaagtttcagaaatataacttaagtattaataccgtcaaaaactaaacttagttatttataaccaaccaagagttaaacttatgtatttatgtagcaaattactctaaacataaataataagtatataatattaatatcccctctttatgtttcaataaattctctatttatttcagtatctaatatatgtatttagtttaattctatttatatgagtatctactttgtaatttttgagaatcatttataaatttttagaaaattctatatagttgacaatacgaaaaataatattcaaatattttattgtatatgtgattcttttttcatatacgtgactgtgtgtacgtggtaaataatttttttaactttatttttgatactataaattattaaaattttttaaaaaatttataagtagtactaaataattacaacatatacaatcataaaaataataaaatacgagtagtcctaaaaaaattacaatatcttgaaattaaggctcaaatattttattgcacatgtgattattttttcgtttacgcgcaataaataactatttgaatcttattttcggtactataaagtattttaaattttttaaaaatttacaaataatcttaaataattacaatgtgacagtcagtagtc

SEQ ID NO: 239813 - DNA, 1509 bp, Cannabis indica
tttttaaaattcataattataattaattatatatttaaaatgggtaatctttatatgataatggaagtattataataatcaaccaaaagctagttgtaaaaactattccaattcaatttatatcttatgaattagacaaaagttttacccattaagttgatcatccagtataaatcaataacttaattatatgattatcttttcttacatgtatatatatatatatatatttatatagattcatatactatattgaagttagatgatagaaaaaaaaaagctcatatttaatagagtatatatggtaagattttggacatttaccataagtactcaatatacataattgaagtgatcaaagacattaaagattgttcaatagaactcatcatcacaaaaaacaatattatttgattttctagaacacttttcatcaacttttcaattatcatataattaaatccaaaaacatttcaattgaattattgaaaggattaaagaaataatattacctaataaatcagcagtaataaatcaaattctactcaaataaacccagaaaacaaaccctaaagactacaggttcagatagactagaattacaaatttgcatgctataacccaactaacaacttcaaaaatttcaaggaacaaaggtttcttgggttaccttatcttattccttccaattgttattgaattccccttgaatttctagctagaaaaggctgaaaatcagaaatggaacccttggttcctccttactttcctagattcaaagagagagagagagagagaaagaaagagataatgcctttgattttctaactgtgtttatttctttaattactttagccaaaaaaattctaattactacaagtttccattacaagaaaaaaccaataatgggcaaaattacaattttgccctcgcttcacacttaagaaactaaaggctttatgggtaaaatggtcaaatatcaccaccccgcctaaactcaatattcaaaatatctcttatgtttgtcccactaagaattaggttctaaacctatccatatgactctaatggtcatccatcgtatttttcatcgtcgctgagcaaatatcataaaaattgtatatttcatatttagcataaataatactcgtggagtttaataaaatctccaaaagtgagaaattataactataatggtcatttttgaaaatggggctcacaacataaatatatgtatataactataagataaagataattaatgttaattgccctactaatccatatttaagttatgcagtcattacaccaccaatgtcaatgggaaacatgaacatttggcatcgttgctaatcctcatgattatcataactctgttaaatctggacaaatgatcacttaggtttgtgtcgcccatgtacagagtcattttgggcattttgaagttctttgggagcttagcttctaatatatgtcttgcacaaggctctctatcctcacaattagact

SEQ ID NO: 239814 - DNA, 1107 bp, Cannabis indica
tacatgtcaaagttcagaggaaaaaaacctaattagccttattttccttaattttttattattaacatttttagttatttatttcttacaacatatttagttaaacaaaattaagataataacaaacttttataaaaacacaatattattaatcttactaatggaaactttgcatagacatatttttctccaaacataaaacagaaaaaaaattgacaaaaattaaaacatatgatagatgaaattattttaaattttaaccaacattgggaacgtttcacctccatagtgaggcagctaattaataaataattaatgatcgataatgttgattaatttcttccaagcagggcggttagagatactttcccaccaagccttcacattcttcctctcactcactaaatgttccatgttaacttcattcactaaatatctaatccctggaagatggctcaaatcggctagactgaaagtttcaccgccaaggtatttgctcttacctaatctctcctcgtacacgtcaagaactttcgccatcttttcctcacagtcgtctaccagagccaagtttcccttctttcccatacttgggaggattaggatctgcagcaccagagtgtagactatgtcattgaagttgttggattctacttctacccattggtccactatggctctctcctctgttgtggctcccaataggtcagctccatgatcggcatacttggctgcgtagtaccgtatgattgctcttgattctgaaattaataacacgacttttaattgtggataaccttaataaaaaataattaggaaatttatgtagtacacccattacacttttaaagggctgttttggtaaatttttaaatttttttttgaatagtttaccgtactgaaaataaattttaaacagttccttatcaggcgtataaaagaaacagtcgcaaaatattattttggacattgtaaattattcgagatttttgaaaatttacagattgtccttaataactacaacgaatgtaattatgattctttagattaaaaatttctcatgaatgtcaaaacaaataaacagtttaccaaaatactttttagagg

SEQ ID NO: 239815 - DNA, 1222 bp, Cannabis indica
tggtgaagatgcactcttcatttgcgaagaagaagagattattggagtggcagatggggttggcggttgggccaaaagaggcatcgatgctggtgagtatgctcgacaacttatgaataacagtgtcgaagccattttcttcaacaacaacaccgatcccaaaagtattttgaaagaagcttatatggctaatgctgaggccgagattcaaggctcctctactgcatgcattattcgccataataatggtattttagaaagtgtcaacattggagatagtggtttcatgatctttagagaaaacaagttcatctacaaatctaagactcaacagtggaaattcaactcgccttatcaactgggaaattctaagtatagcgatattcctgaattagctagggcaatgaagatcgcggtgattccaggagatgttattgttttggcaactgatggactttttgataatttgtttatctccgatatagaagagaaattgaagagtaagtcttcgagttccaatgttgctttttcgttggcagagttatctcgtcgttactctttgatgaaagatcgaaaaagtcctttctcgaaagcagctgccaaggccggcttacctcacaccggtggaaagttcgatgacataactgtaattgttgcaagaattattagtcaatgaaaaacattttatcaactaggattagggtttgggaaaagtagagataagtaaatggtggttttgagtatgtgccaatctgattgggatgtattcaacactttccatatattatttttcattgatttgtttcattgtaattaaactattttgtattaattcaacactttctattattaatatacattggaatgatataaacatgctaagaaaaacattaatgagaaaaaaagattatttaatattaataatttacaagtggatattcggatttgaacttaatttataaacttcacacatttttaattataataagaataatattaacaagtactgattacattaatattaatatatatatatttaatttaatattattatcttgtaattaattttgattctattattacaattaattcttcatttttttccgaaagaaataattctcattcttcccaactaatttgttagattggcaaattttcgagtaattggataaataatattcaaattttcgaggtgtcattttacgaataattaatgatattt

SEQ ID NO: 239816 - DNA, 1032 bp, Cannabis indica
gggaaactgtggatcaacccagtcttagggcaaggcaatgataatgcaatactctttgattttatttgattaagttcaattaaggtcatctttattattttgccaagtataatcttataatatttggttttaatttcttccaagccactcgaatatcatgatagaatcatgttcgatttcgataaggtgcttaaattggatgaggaaaaggacatgctcaatatactaaaggagagtgccttatgtggtagatgttaatattcaggaatttcagaaagtttcaaaggtaaattttatattttgaagattgtgtttttattgattagaacatgaattttgttgaaattcactttgcaatcaaaatttaagaaaacaaaacctagagtgcaataatatatattgtagggtttctttcttcaatctcacagttatcaaacttgtacatgcaagaattatgtgaacctaaatcaccatcgaatattgttaaaaataattggaagtgaaagtggaatgatatcatgttgcattgaaactagatcagaataagttttcaagtaacattatttcagaagaaattctaaaatatatatacaaataaatagtagtttgtttctttttctattttttaatctattaaaaggcaaatattatgaatacccgaggtctgtgttgttaaattttttgttgatgagattatttctgtaacttagtaagactcaaccttacaagtctcattttatcattttataagagaaaaatgatgttattatttttcatgtgggacaaaatcattaaacattcaaattcattttatgtatttttattggacaaataatgttttccaaataataaaaatagtaataatcctccaaatactttattttgctgcctaatttaagcacagaaaatataagttaaaataaacaggttacatcatcaattgtcaattaatgttaagataactattaaataaaataatttcacctatttgctagtcaagccacctccattaactcagttcttattaccata

SEQ ID NO: 239817 - DNA, 1196 bp, Cannabis indica
tctctcacggacatttcagctttcatttgaaatctgaatacacgtgtcctttaaataggagtctggtcttgagtttctaggtgagagaaatctcactataacaaaatccaaaggcgatgagaccccatccagagagaaggcaccaactgaagtggtcattgacctttctgaagaacaaactattgtcgaccctcctgatctaaaactgaccaagtccaaagattcctgaggaggtagttcggacaggcttgaataggcaaaaggtggattcgagctgattagaagtgggtctgaacagattaaggcccctgccccacctctagtactgcactaggagtctaaaagaggctgagatatgctcacccactatgtgagtcggtcgatccctgaggcgaacaagcaactgctggggcggataatgacctatatctggagctggttatgggaggagtcctaaaatagcttttgagggtaaaccttttctgacattttccttttgttcttctttaactagttttgattttgatgtcttctttctgcaaagactggtctgaagatggcttatgcctattccccagctatgtcggctgatgctaaaaaccttgccatttccaacacaatgcgaacagaggtggacttagccatgaaggatgctgaggaagcacgggctcaacttggggctgtacggatagagctgggagaagtcaataagaagctccttgttgtcgagaccaaagttgtcaaactgaccaaagatctgcaggacatgccatccacgagcagctcaaagctgacattgcttccttgtctcaagaagtgaccagtttccaagacgaaagagagggtctccagacccttcttcgcaggttggaggaagagaagaaagctaaggaggaggagcttggggctgaggttgaaaagcaaaaatctgaggtggtgaggctcggggagaagttaaatgccttaaagatagctggtctcgagatattttatgacttttggaaagctaatcccaatgcaaactttgattagatgggcactttcaaagacatgtttctcgactactgcgctgctcatcaacctacggggagctcgaggcgaccatttctatctcacctaccgatcagaatgttgaggctcctttaaataactagctgaccgtccagcctttaatcctgggtttgaatgcttttttt

SEQ ID NO: 239818 - DNA, 1510 bp, Cannabis indica
gttttacaatttattcaaaaactcataagaagcattagtcgaaggactgaaaatttgagatctttttagcacatttcctcgaaatggaaatggaagatatttaaaaaaaaaaaaaaagaatatccatctaggtgcaaaaaacaaaaagataattctttatgtctgtaaatgatgacttctaagaaccataaattagttgaaatttgccacatagaaaatccaaaattacttctttcccctactaagcctttgcatatggtaattaatgcttccccatggctttctgttgttgttctgcaagaaaaataaaactctcaagctttaaagctggtactaaaatgaaattttgctatgttgcaaaataaatttaagcataaaaaattcacacacatgcagaatccaaatacaagaaaccaacctgagcatccatacaagtatttagaagttccttatttcggacacacttctcatcactgttgtggttaagtgccaagcagttgagaaatgtcatcatctccttcatgcagggtttgtgaagagagccgaatttcttgggattaattcgaagagtaccaactttccgacccattgtgatcttctaaactacatgtccaagcaggcattgttaaattcaacatcaaagagatactcttttagaataatgacaatacttggtaattactccaaaatcatcttaaaatacaagatttccaatcagacataaaaggtaagaaacttgaccattagtctatttcatgataaatggttggcaaagtataacttaatttaggattgttcactggatcacatccaatgtttttagactcattcaggtccaattcaattatacattagatgttggatttctccaaccgatccaatccaatattgtaggctcaaccgaaccgatccaataaatcattggattggatcggttccatccaatgaatgaatccctgtattggatcggatccatccaatattttttagaccggattggatccattcaatattttaatccaataccaattgaattgattggatccatccaatccaatccaagagtaaaacctgatttttcacctaaacggctaatatattagttcaaaatattacaacccaacataaatccaacctaattgtaacataagtccaacataaatccaacctaaattgtaacataagtccaacataaatccatcctaaattgtaacataagtctaacatcaagttataataatacatgttacataaacaagagtatacaaataatgaatatcatagaatccttcatcagtcaaaactccaaagtgacaatgtcactcaattctgaacaaatacctttttaaggttaacaaatactactctcactttattaatttatttatttattcttaaaagaaaaaaaaatgatactaaagattacccaccaagatgaacgatttttcagtttcttattaataatgctttttttaaagcaaagaaagtatatagttattatgaatttaag

SEQ ID NO: 239819 - DNA, 2276 bp, Cannabis indica
gaaactaactgactaacggtttttacacagtttatttattgccccctcaaacgaaaaggggttgcagccattttaagtttgtctttgaggtatagaaaccggtcagtggagagtgctttggtaagagaatcagccacttgatcaacagctggaacatagcgaaccgaaagctcctttgccataatttgatctcgaacaaaatggagatcgatctcaatatgtttggaccgtgcatgaaagattgggttagctgcgagagcagcagctccttgattatcaacccatatgactggtggatgagagggagagatctgtaattcagagagcaaatgaaccagccaccttatttcagcagcagtgttggccaaacttctaaactcactttcagtacttgaccttgcaacaacattttgcttttttgcagaccatgagacaaggtttcccccaagaaaaacaacataacctccagtggattttctgtcatctatagcactagcccaatcggcatcggaatatgcagaaatctccatcgaagcagctggtcttagaagcaagccatctgttatggtccctttaagataccggagtaatcttttgcaagcagcccaatgagtaactgtaggtgcgtgaatgaattgactgagcttgttaatgataaaggcgacatcgggtcgagttaaagtgaggtattggagggcaccaagtgtacttctatatagtgtaggatcctcaaatggttcaccatcatttagagataacttttgagtagagctagcgggattgggacaactcttcactccatcaagctgcaatctagtgagtaaatcagcaatgtatttgctttgagagagatacataccgcccgagtctctataaatttcaatgccaagaaaataatgaatcgagccaagatcttttaatgcaaacgattggttgagatcagcaaccaactttgaaataagggctgaattaggtccagttactagtatgtcatcgacatacactagtaaaataatcaagtccaaatctgatccatagataaagagtgaggtgtcagaccttgatgctcgaaagccccattgcagcaaagtagaccttagtttttcattccaagctctaggagcttgtttcaatccatagatagccttgtgaagatgacaaacatgagtaggtttagttgggtcttcaaatcctttcggttgcctcatgtacacagtttcatggagatcaccattcaagaatgcattacttacatccaattgctgaaccggccaattagatgtgacagctagggatagaactgttcgaacagttacaggtttgaccacaggactaaaggtctcttcatagtcaatcccaggtgtttgcaagtaacctttagcaactaaccgagatttgtaggtatttaaggagccatctgcattgagtttaattctgtacacccatttattgtcaataacatgcatatccggatgatatggaacaagtgtccatgtcttggagttaatcaatgctgtgttttctttttgcatggattgaagccattttggatctttaagtgcttgctgagttgttcttggttcagtcggaaaaagagattcttttaatggatgtcttgtagccatgtatgccttcggtttgtatataccactttgggacctggttttcatgtgatgaacccgagtaataatgctggaaataggagcttcagctggttgaatatcagaatgtagagaaggtatgggttcggatacagggacagtagtggtaggaggctgcaatattatatcagaagttgatgtattattggttggcagaggcaaattaggtgtagttgaggcaggtatatctggttgctgagagagagtttcagaggcaggttgtagatgttcttgtggctgggaattaatttctggtgtaggcaggttatttgctggtgtaaagtgggaaattgtagggaaaggcatttgggaaggtggctgttgtgtaatagaatgatgtgcggaagcaggtgcttgggtatttgttgatgagtggggattgtgttgaacatcagtagcacaaccaggaatggaattagcaccagtagcaatattagaaaaagagaaggtaggaaattgagagtaaggagaagggtgtacctgactcatgttgtagttggaaaaggcagggaagtggctttcattgaaaataacattccttgctatatatattctgccattggagttctcacagagatatcctttgtgatgagatgagtagccaaggaaaatgca

SEQ ID NO: 239820 - DNA, 3425 bp, Cannabis indica
ataattgagtgggagcgaattgaactaaagttctatttttttatttccatatccaacaatagctacacaattacatatttataggctttcacactctttacaaattactaataagcctctatagcattttcatagtctaacatccctccaataaataaatgacatatgtttttatttttcctgtcaattaagagcatttttaatggtagcatcatttaaggatgataaaaatgtttacatcatccaaaatataagggttgagatgtaaaatggccctaaatttagaaactaaattaataaatgtctatttttaaaaaaaaattaagaaaatggccaaatgtaataaattagctaataaaaatttttaaaatatatttactactgttatctgcattttcgtaaacatgacacgtggactttaatcaaaaaaggctaaggagtcattagccggatcaactttctcaattgatgctctgggaaggtaaatgcaccaatttcgcacgaaggggttccatgaagaggagttccctaactagctacatggaaggtacccgtgaaacaaagtctccctcacttccaggaaccaacaccatgcactatcatgaagagtagggattttcttagaaaggccaagacattttgagactgcctcaatcccagatacgccttcgggttgcgcaggctttatccacgcatgttaggctacgaacctagtgactagactttttcatgtacgatgtcagagattgtcatgacacaccatcgtgcaaagcatacatgtcctcgtgtacctgcccaaacaatccaatggctagggataagggaaattcaaataagaaaagccctgaagtgacacgcatccaaggcccaccctatttaatcagtacgatttgacacccttaaatgccatatgggaaaaataccacctgctaatccaacagacagatcttgccccaacgaagatccatctaaagcagcgtatacatgaagctggcctataaatatcccaaaaaaggacaacggcgggaggaccttctttttcagatggaagacccattctccatcatcccaagaaaacacatgtctgtaacccttttattaactccaaaatattcttactaagcttcctcttcttcaggagcaacacgacgggaaggagtcttagtccattgtatctttatttgtataaacagtgatagaccaaagagcctaataaaaggactcgtggactaaggatagttaacgcctgaaccacgtaaaaatctcttgtttgttatttcactatttattttattgttactttcttaagatctaaaaatatttagttgtcaaaaaactcagtaaacattttggtgcttttattgagagttgaagaaagaaatatgcgcggcagttaccgacacaagcccgtcagaaagagaactcatgcgagtaaagaaggaagacctcatgatctcttactgagttccggtcgaaggccaaaaatgtgcagaccgaaggcgttgcccagagtaagacctgatgccttcatctgcaaaagaagaatacaaagtatgaacgcatgcggtcttagaacgcctgctgcacctatatcttcccttagaagctcagatctggccagccaactccctgtaagggtgactggccaccagtatctttagacctgtatctcttgtaatttaccaagacgtaaccacacaaatacgatgaggtacaaggggtgttggggccagatgaagaagctatgacctgatgtagttatgacgaataactcatgaggggtcgttagatgcaacgactctatctagctcgggactccggcaccggtgctggtgcgagggctggatctgttgtccgacaactacttcccctgcctttgcactaggtggtaaagttgttcagaaattgatcctgtaatagcggcggctaagaggagaccattaataccgtcgacgtctgctgggccaccagtcaggcctggttatggtactattggttgaggcaagccatttttagcatagttcactcagaaggcttttgttgcttggtgtgactacaaccccgaaattacatcagagaaagcaactcgagacattataaaccagttaggaagctcctgttggtccagtgcttatcctattgggagtccgagttttttacccaaaaaccattagaggccatgcacttcaccgaaggaaacagactgcccaggagatccttgggcacatgcatgcaacccctaaagcttcccagagctcgacagatgcatgcgcattgctttttgcgcgtgaaagatcattgggtgtgttgcacgtcttcaaccctccttctcggaagggaaggactgcttgaagtatgctttactctcactgactctttcaccctttgatcttttcaagtgaagtctaagcttgaatttttatgcaacttcagccttccttcgcagaagtcggagcttgccacgtgaaaattcaataggactcttgcatgcacgctgtgtttttcgtgcaagaaagatcactgggggtatggcacgtcttcaactctcctcctcggaatggaaggactgcttgaagtctgtcttactctccatgatgctttttcctttgatcttttcaagcgaagcctaagcttgaatttttatgcaacttcagccttcctccgcggaagccaaagcttgcctcataaaaattcaacatgtctctcgcatgcacgatgtttttcgtgcagaaaagatcactgtgggtatggcacgtcttcaaccctccttcccggcatggaaggactacttgaagtctactttactccccgatgcaacttcatccttcctttgcggaagccaaaacttgcgtcataaaaatttaacaggactcttgcatacacgttattttttttgtgcaagaaagatcactggggtatggcacgtcttcaaccctccttcctggaatggaaggactgcttgaagtctgtcttactctccatgatgctttcttcctttcatcttttcaagcaaagtctaagcttaaaattttatgcaacttcagccttcctccacggaagccaaagcttacctcataaaaattcaacatgactctcacatgcacgatgttttttgtgcaggaaatatcactggaggtatggcacgtcttcaaccttccttcccggcatggaaggtgtaacaccctaactaacataggcgtgttacgtgatttttaaacatgctgtgcagcttgttgctaatcaacgaggtttatggaaaacgtaattaattaaaatttttgctttttaattaaacttgtaaaaatataattacaaaaagactcgggatcccgattacaaaatcatttacaaaatttaactgttcatacaaaataaatgtcgcctagcgaccagttacaaaatcagcctcgctgtcccgatgatcg

SEQ ID NO: 239821 - DNA, 762 bp, Cannabis indica
aaaattttattcccattttcttgttctattttttttttcttccgtttacctgcttaacagtttagtgtaagaagttaatttgtagtttcttataaaaatgagatctgccctttttcaggttcaagggtgtgtgtcaccttacatgtctacaaatgttttctcaacaagctagctttacgatttttcagaggaaagtttccacctgacctttcttttttccgttcataatattatcaagaacaaaagatggacagtgtacctaaaccaagttagctgcttatttaatgtggttaagatagtgttagttattttcttttttcttttaagaaaatatagtgttagtttaatctttctcttggacttgaaaatcagtgtaatagcaagtaaattataggccaaactatgctgtataaagactcactcttatggagatttcaacacttacctagttcacttcagtttggtgctttggatatgcatttagctttagtttttcagcatttgaggactttgcatgtttggatatacaaattatatattaaatatatataaattaagtatatacaagttaagtttatatataatgtatggatataattaattaactaagttaaagtatgtgagttgtattttttggggttaatataaatacccacttccttacattttaagttgattttgagaaagtaaaaacaaataagacaattagtcatattatatatactagcaaaaaattacgtgcgaggcacgtatattaaattt

SEQ ID NO: 239822 - DNA, 2650 bp, Cannabis indica
attaggatacaatacctcttcatctgctgcagcaagcaaaatagcatatccattactagtgctcttcactttttgatcatcatttgtcccctttgtttccatttgtctcaatgcaattcttttaggagtaatccaactacaaccaacaacattaatagttgacccctctccattttctcaatcggaccagcttgtaatacctgaacagcagcagcgttttcaacctcaaccctattttcctgctctgaaattttccctagattgtccactgttggatgatcattgttcatagtctcctagtctcttttccagcagctagtttctccactttcttctctttattgcaattagccactgtatggcctaaattcgcacaagctgaacactttgatttccacagtattcgagcaaatttcaccattgaacattcttgagtcaccttatcgatcatgatcgatttgccaatagtgctaactaaagcacttagattattcttaccccaatattgtaaccccaatccattcaaccgaatccaaaccggcacaaaattagtcatcctcatcgagtcaagatctgtagtccaaggcctaagaacaaccgactttttatcaaaatgttaaaccccagcctccagaataagatctcgtgtggcctcatctcttaaattgaccaaggtacatccagaatgcattctaactactttctcaatgcccaaatttccccgaattctcttaacaaaacccccaaacactttaaaaggaggtttggctcctaaaacaaagcaaacaattgcatttttccagtaagaggcttcaacctcaatctcttctaggtcaagcttagccacaatttgatatccaactctaactggttcagtataagtaagtttagtagagggagatggtacctgattcgttttgaacttgctccataaatccctagcatcaacttggaaatcagcctagtcgacttcatctacccagttccctggtttctaagacccgcaatcaacctctgcatcaacaagttcgatcctgttctccattatcaggttctcgatggtatcgtgaaactcctctatcaactctggtttagcttctgcttcatggattgaagggagatctacttcaatgtccgccgtggtagcagtagcaggcttctgtccgaccctcttcttcttcgtcgtgggagaagcaggagaagtgttttcgtgttgttgttcattttttattcgactgatattttgtttgtttattatttgtttatttctttaattttttgggtttaggattttttcttagttgttttgatgttatggatttcaatcgtatttttttttcaaattagtttttttttatgaataaggaaagttgtattgctcaaactatcaatgacatccccagtttatgtacacaaccgaatgctatacaatatgaagctatgaatttacaaaaattacaatttaatcaaccattgcttatctacttcttttgttttgcttggtatcacccctgctattctccttttactatcctgctgtacactattaacaatgacactaacttgccactatttttgattccacaatacatcatttcttgctccccatagctgatatactaaagcagccaagactatgttcatcatacttcttatggttactgaaatccttttcatattgctgatacattgcagaagcttccgcaacccgactgcctttgtcccccagtttagtttctttttcacttccaatagacacttcctgctatattcgcaatgaaaaaataggtgctcaatggtttctttttccttcccacacagtaagcatgtcctatcaacttttcaaattagttatctatgttctatgttcttagtttatttgtttatttttaatttttttcatatttcttcaatcctattttaagttctatatgaaaaaaaattttgttgcttttttgtttatatattgtttccgttttattcatgttaaaacttagagatttctttgtaatatatttttttcaatattttttgttcaatctttgctggagattttttttaaagcttttttatctacattgtgaatttttttatatgatttttttattttttgttgaattatctatttttgattgttttttttttaatttttaggtttttctatttatattttttacattagttgttcattttaagttacaagttctatttccatttttaaaaaatctaatgtatattctctgttgtttttttttcctttttcttttttttttacatattgttgttttcttgagtttataatttatttattttttggttcttagttatttttttttttaatttatgcattgtttattttcatagttgttgtagttttaatatttcattgattttactattttgttttttcagttatgggattaaaaaatttggtaatgaagattttcataccacacgggtgacttctacttgctcgtttaaaatcattagactatcatttctattttgacccctgaacagaaagaattgtttggacaaactgtttttggattctttttaagaactccttatgttttgcaacaccagttgttccatagtttgttgttgagggaggttgtccagccgaatgaaaatgagatgtggtttaatg

SEQ ID NO: 239823 - DNA, 1604 bp, Cannabis indica
tcaaagccaagcttcatccttgagaaaattagagaaccaatttgagcttttggtcaatgagttgcgtgataaaccctatgaaactttgggtattgatatggaaaattcaagggaggaagaaagtgaaaatgtcatttttgaggagtggatatgagttggagatacttggaaaattttttgagcaattacaagtgcccacttcaatccaaagtagtgaagaaaaggatgaggaagcaagcatttcaggtttgtcaacatttgttgctgctcataatgctatagcattgtcagtttgtcacagcaaaatcacctagattttgaaaaaattcagaaacaaaaagtttccattcctcaacttagtgagtcattagtcatgaaagcctacatatataaagatcctttttggcatggtaccttggcatccatcatgtgcattcatcgaattcaagtcaagttgagcatttgggctattcaattccatatctcgccaagcttgagggcgttcacgacaaagacccatttgtgagggcatatgccactctctatgggcggaagccgctctttgatgagtgcttctcaaaaagtcaagccgacgactttaaatcaagcgcttcttgggaggcaacccaagctttctaaactttgtctttattttgttttaaattcaataaatatgcaatgttaaatggttttgacaattgcattgtagtttttttttctctttcttttctttttctctcttgtaggtgcaagcataaagtcaaatggaattggacgcacttatggaggttgacacaagcaagtttgcacatcattgactaggggagttcttctttaactcttctttatttatttttaaacttgcttacacatatttgagaattttgtgcttaaacatgttttgggaaactaaatatttttttttcttattttatttttttttttaaaaaaaaaattgaggcatatgtgctttggtttggtgattttccacattctaatacatgattgatagtgtgcatagcttgttgaaaaatgtaaatattgcttgagcttgtgactaattcttgtgctagtttcattttgattgagatatgtctaattttgagcacgaatgccttgatcatttaattgtgtgtgatttggtgaaaatttgtgtaaatatataaatttgtgatctcacaagtcttagaatttatttgattctctcttgaggaaaaatcctagacgacactaaaccaagggcatgatttaggctatttttggaccgtttgagctttttgagccaaccatgatattattttatctctggtcaccctctttgagcataattgatccatttatttggttttaccacatgtaagcctagccaaatacaaatctttctaacatataccctttgagcacattgttattataagatatttgtttgttgtgtcatgaaggggatgtgaggagtgtaattttggttgaatggtaattgagtgagtgttttcattgtgctattttattattctcaccattggggacaatgttgaattataagttgggagagagttaccatatttttgtgtgcattgccattattatatttatattgttagtta

SEQ ID NO: 239824 - DNA, 927 bp, Cannabis indica
tttctatagccataggcacaatgttttacttggtgggaaggagtgttgctactaggcaatggtacctcactaaatttgaggattttcctcaacatgttaaggctctcattccatatttattctagatatgaaaaatgtacactttcaaatagtgcaatatgaagaaacaaccaaaagccaaaactgttataactcaaaaaattgttttgattaatagattttataataaatttatttttactaaaaatacatttacttagagctgctaatatatttgagtttctatttttttttacatgtgataaaaatataatttaaacataatataaattatttttatcaaatccatataaatttatactttgaaaaattaaataactaaaaaatacgtagaaaataaaagtttattatcacatatatttttaaataattattattataatgaattaaatactttaacttttttttctatagtgttgcaactgtttttttctcaatatggttatagctgctaaattggcctttatgcctaacctaagccaagaaaatatgttttcgtttgttttccaaactaaaataaaagaaaataatgtggtaattctctagtctactaactactatattgtttaaaaataagacgtacatatttgctataaaataagatcatttaaactaaaataaatatcgttcattattaaatactactatccaagatcgtattagttttatacatcatcacaagtttctataaattaggttgtacatcggtcagtttgggcggtttatcttatatattttcaaacctaatttaaagtttgggttgctaaaatttaagtgcaacctgcccaattttttttttataaaaaaaaaattctgtaaaccgattaacggttttggcagtttcgtcgggttaacccgcccaaaccg

SEQ ID NO: 239825 - DNA, 1437 bp, Cannabis indica
acagagttgggcttcaatctagtttccatcaaaaaaagtaaagtaggcttatgattcttgacaaggagggagagtcgattgaatgctcgggggttccccagcccctgagcattccaacttatcaaactcatttttctgggcgagtgtgctcagcagcacctgcctgttcaacagcatctgaaggcaaagattcagcaaattcatccttccccccctcgagcacgcttgagcatggacctcaaggaacctcccacagttgcttgagaaggctggaagcagggtcttttgacacctgaagcacaagcaagtcccttacctttaacggtagggtcctgcctaggagctttagcttgaaaaacgggggcagcaggggtagatcgactcaggaccaaagagggcagagcatcagccaacgaacgggaagcattaccaaagtcagaatgagaattcgagtggtttgcactcacaatgatagagtcagtggagaccgaactgaaacctggagcatacatcgaagatagagagctagggccctcctgacccaccagaccatcattagacatggaaggactagtgctgacaacagtagaaggagtagggacagacacaaggttaaaaaaaccaccaaccagaccctggttgggattaacaggagtagggatcatgacactagcagagttcctgggggcacttaaacaagagaccgaagccatatgagagttgagaagaggggtgaaacccataaagtaattgaaaaaaggattcacaacttggccaccttgaggaaagtcagaaatatccacatcagcaatcgtaataacaagagcatgaggatattggaaaggcaaaggtttctcagacaacttctctttaccacgcaggagaagatcataagggcaaggggtggcagaagggactcatcacacttttgcagataagcatgaaaatattttttagtatgatcaagtttgccacaatagaaatagaaatccgacagtcgctcatatttaaaatctagccacttagtgaactccctacccatctttaggaaatgaatatgaatgccacgccgaatttgcttactgacatccaaaagagacctgaccctcaaataaggcccagtgccatctttgacagtagtactgtcaacttggattaagtccccaacccctgtggcaataattttggccaattcaaacgacttacacctaaaaggaatgccataaatttgaacccataaaggcacataatgaagttggtctggggtaataggaaaagaggaatcaggcgcaacaaagattgtcagactctgggcaaaatgccatggctggccatcaagaatcctacgcttatcaccttcacagccaaaggtgacaagaaaaagaccctcagagtgatcagacaccacaacagggaaactacactgggaagtccata

SEQ ID NO: 239826 - DNA, 2151 bp, Cannabis indica
aaaaaaaaaaaaagtattaaattgcaggcctgtgtcaatgatccaaagacatgcatcattttatttttggctcctaatgaaaatcttaaatcatccttatcgctaagagttgaatcaattttcgaagtactaggcaagatcaaagtctgaatacgtactctatatattaaaaatctaacctttaatatacaatgacactttaccaaattaaaaaaatatatacataacaaatgatatgggacatttaaaaatattggtgagacatttaattacatgttcttattggtgaagtgtataagtaagaacttgtatacatgcatattatcttatctaatatagattaaaatattaattattatcttttttttttacaaaaagtccatatacggtccgaatatttaaatatacgtataatataccaaattattcattgatgtagattgaattagatcacaatacaaaaaatctcactacaaaaaaaattaccctatgtcggcagttaaaaacccatgacatagagctatttcagcagttcacaactaccgataatctgaccgtcaacatagatgtgatgatctatctcggtggttaaaagccgctgagatagagtgccctatatcggcggttcataaccgtcgagatagagtaccctatctcggcggttcacgcgggacctgccgagatcgggttcccataaaataattttttttatttttttttaaaaaattaccaatctcggtggttccgtgtgtaactgccgatatagataccaacgtcgacggttacacacggaaccgccgagataggggtcataaaataattttttttattttttattttttaaaatttaccaatctcggtggttccgtgtgtaaatgccgatatagataccaacgtcgacggttacacacggaaccgccgagataggggtgccgagatagtctaattttttagtagtgtcttactttcagtgacaattgataatcaacttagggcgatgccttcaatttccaaatctgatgcaaccattgaatttgacatggtaaaaaatgaggggagtgactccttcctcaagtttagaagccttggaagtgtcaaaaatagaatcacaggagcttggtttagaggccctagcacccaggtcaacatttggcttggttcgctgggttctgcttatccgaatctgaagtcgttttgactgtttgtcaagtttttcacaaattcaataatccatgaagtcagatcaatcaaattcacaacttcaattttagctcatctagaagccagaagtttcgagtttttcgtttccataaaataacaacatcttcgagaatgtgtgaccaacttcaccaaaacatataaaaggactaatgggtgtcaaaccatcacttgcgcatctcaaaggactttccttggatgtttctacacctttacatcatccagattaacttcagatgtcaacttgggcgttagaaactgatctgccttcagtaaaacaaccataactcactcaattttcatttgattaacccaattcaacttgaattttgaagttgtttaagccctctatcaagtcttgtttcatacactagtagaaattttgaatatctatcgtcgccaaaatttatccccaagagagttacgaatataagctccaagtaactcgcagcgggacccaccaaacataaaaaatcagccatcactatatcaaatgctaattttcaccgttagatcatcattaacggtggaaaacactttgtttttaatttatctcctatttttgtgggcctctttcacctataaaatgagagtttccttagtttagtttttaactttcagaaatctacccataaggtcaaagcttctctctctagaaattgaagtttctgatacttatacggatgcattaattatcatctcgtgagaaataaaaactcaaagtagacatagctacattactattgcaacatagaaggtgaactgctataaattgttgtgtctctcttattaattactttctattttttatctcgtcaatctaacgagcgggtgtgacttagaagtctagtctaaatttttgagtcaacacgggaaatgatattcgggttgtctgatttgacaacgatagtaacatttgaatattagtttttg

SEQ ID NO: 239827 - DNA, 761 bp, Cannabis indica
aacatgactaacttgctattttctttgccaatttatgcacaagagttattgattttaactaacaacttcaaaatacacacacaaacataaaacactgaaactttcacaaattaagagacaaacataacttaaatgacacacaattacaataaaaaaaaatgcttaaagtgatatcaaataactctttactcaagagttatcaactattaccgccaattttcgaggttggggattaatctgtatcaaccctaagtttttggggacttttgccgcaattatcccttgttaaaaaaatttagaactatgaattataaaccacggttttgaagcaaatttatctgcttttgagtgaattggtttagtttggtttaatcattaaattagtttgctttaattttgaatttttacaaaactgtaatactagtttgatttaaaaaaattaaaaattcggaccaaaccaatctttaaacacccttaaaataactggttggtctgaattaattttatcatatatttttttaaaaagatatgtacattttttcttacaaaaaatatcatatttttgtaaacttttactaaaaagaccataaaaatataaaaaatccggtacattttaatattttaactatatctatgtatttttcgaagaagcccaactcagtataatcataagcccaagcccattttattatgtgaaaattacataaaatacgggattttgtaaaaaaaagttacaaaaatatggcatttataggtttgcc

SEQ ID NO: 239828 - DNA, 1357 bp, Cannabis indica
tccatctaattcgtgaaatctcagccccaaaaaacccattgttttagcaatatcatcataagcaagctcttcatcctctttaattattctcaatctttgctcctcttgagtatactcaagcatttcataaagttagttgattgcatcagaagtagtacggatgtcctttgattaaaccttaaccatcacattctttcgttcaggttaattagctaagaattcacaagacatggtaacattggctctttcatggacatcgacaaatgaagcccaattccaattttaaatttaaagctttatactctcaaacttaggatgtctgttcattgggacattagtataatcaatcccttggtcttcaatatatggcctaatctttaaaaggaggaacctatcttgagcttcttcactaacaaacctattcttatcaaacactggccttgaggtggctcgaggaggattggaggaaccacccacttcattcacccttgatctttttagacccattatcacaatcaacaattgactttttcacacactaaaatttctctaaaaattttgacaccacttccttttaatttttcacctcccgatgtcacaaaacttcacaaagtcacaacaaaccaatatccaataacaccaatatagcccataaaatctacaaataaattcacatttccccaaatataatcttcaaaatcttcaaactaatagaaaaactaaatcaattaaatagttcttgataatgatacttactagcgaagagaccattaaagaaccaccattattgataaatcttgaaaagttgaagattgaagatgatgaatggtaattttcaaatttgagtgaggatgagtgattagggtgtgattattgtggaaaaagaaagtttgatgaataataatatgtttgggtttgattggaagtgaaagattagtgatgagatgaagaaatttgaaatttttagagagaggtggttgtacaactaagaattgtgtgggaagtggttatcagattaaaattagatgaagaggcgattaagggttaattagatttttaaaggctctttagggttcacttgcgttcagtggtcgcgaccacaaaaattgtggccgcaaccatagtgtattggccaaaatcgagttttttacccatgatctctggtcccgacttcataatggcctagttgcgactaggaaatttgtcacaaccatggattagtctggtcgcgaccactggaaggtcaaaattttccttgtttctctataacctctagggtcacgaccatagaaattggtcgcgaccatagaatttgctagtcgcgaccactgtagaggtcgaaaaaaaatattttttt

SEQ ID NO: 239829 - DNA, 1355 bp, Cannabis indica
aaattactaattagcctacttttatttatttactaaaagtattaagccaataatatctaacactatcataacgtgatactttacaattaattaaaaatattaataacataaaaattattgtattaaattatataaaattaatattaaactgcactaataattatgatagcatacttttagtggtgctatacaaagaactagtgaccatgattaacaactagaaggaacaagatttgagatttgcatatttattgaagagaattattcatttgtgtccacacatcacatgatgatgaaattataagactgggtttaataaaatactaaaatttatatagtattaatgtcaacgctcaaaagtctatatcttataaatataactacatacatatatgtgtataaaatatatataaaaatatatgtttttttgtagtttggccatgaaaataaggaaaggaaaaggtggaagaagtaagaacaatccaaagcttcttttgcttggaccacgaacaatttcctttactttatcttttgtttatgtataatattactctcaatcttactccatctattttaattgaattgacttttttcaatttttactaatgtatgaaatacatgatatgaaatacatatctaaatctatccacaaataaattacagatacttgatatatataatatatagatatagatactataataaatatcaacttaccaaccagaactaacacctcatataactataaataaatatctataaataaatcccttttattattattttttattattttggggggccacttacatataagtttaagaatattgttatttagtattaatagtgtttagtatctttaaatatgttactttgtatcagctagcgatgtttttaaaaaattattacattaaattatataagactcgatacttatttagaccaataaagatattgatacatagtagggcgttcggtaccactagtgctttttagtatttctttatataattgagaaatgctaaaaaaaaatactagtagtgcttagtaccatctacgtgtcaatatcgctattggttatcgagttctatataattgaatgtaacaacttttagaaagtatcactagccaatatatgttcagaaagagcattgctattaggcactagtggtgtctagtaccttttcgacatgtgttgcgattggctagcaatactccctaaaaattattatattaaattatatgagaccagatacttagttagaccaatagcaatattgatacataagagggtgctaggtactaccggtgctctttagcatttctcatttaaaaaatgttaagtactattagtg

SEQ ID NO: 239830 - DNA, 1339 bp, Cannabis indica
aaaattattaatttttaattttaattattatttttattttctaaaattaatttaaattatttttatataggtatttatttaaaaaaaataatcacttacaaaaattttgttatcaattattttatgtaattaatataaactttgaatttttaaaaaataaatggtttactataaaaaaaaaaatatatatgaagatagagctaacacacatttgaatttttgataacataataagaaaaatatataaaataacaagagttggaaccaacaattaaattattttgttatatatgtaagagaaatttgtgactaaaaccctttatgtttctatttgtatacacgtaacttctttatcttttattttggtggcaatgctccctttactttagttctgtgagcaaattaaaggtaatagttatattttctagttaaatgccaattgagacgccacctaaaattgtcactgtgtatatttatgattcttttattggaaccactaattttaattattttaatcatttttcaaaattatttaaatggtaaaaaataaataaaatttaataatattataaataaattaaaaaatagactaaataaataaataaaaacctaaaatctaaatctatgaatttatttcctcctgacgttcttttgtcttccctccatcgtcttcttcgcaggtgattggaaatccgactgcagaggatggtggaggacaacggaggtaacatggggaagagatgggatcgagatttttgggtcttgggggaagtcggtgctgctccgttcatctcttgacggagtcgcgacggggagaacaagacggagtcagacaactctaagagggatgatttgaattctgggatggggtttaagtgctaagaggccattcgtggtctctgtttgctcgccagcaccgagaaacgtctgggcttgtttggacagaggttcatcggcgccgagaaacgtttgggcttatctgttcgtcggcacaaatgactatttcttccatttctatttgttttttcatttattaattgtttgagatttgagattctggaattttttttcttgctttgaatctgagatttaattttaattttggataaatggcggcaaaacccccaatactttcgttttggtttcactaaacccccaaaacccaaatttgtgcgggtaaacccccaaaaccaggaaattgttagcaatttaacactttcgttcaatttagctgttaactgtcagattggattgtccacgtggacacaataaacacgtggcacaattttattggtccacgtaaataattatttaaaaaaaataaaaaaaaaacttttta

SEQ ID NO: 239831 - DNA, 1279 bp, Cannabis indica
gagagagaaagagagaaagaggaaaagttagagggagagtgtttgaaatggggagggtatttttgggtatatcttttttttttgggagtataaaaattctatgttatttagggtggaatacaaaaagatccaccacctaatttaagcatgcattatcaaatttcccattacatatctgccacgacttaggactcgggtcgagacaaccctagcagacctagagagacgtagggtcaatatttctctcaaaaaggctttttaattactttctttttgttatttataacatatttttttgacatagataaacatattttttatagtgtaaaatgagatatttgttgatatattttttattaagtagcaaaattaagtataaaaatttaaaattcttttattattctccattggatcaaatttcatggttcaatatttttaaaattgacatttagagtgaaattttttaataaccataaataattaatacctattcagaaatatttcacgccagccgatatataaaattgtggttataacttcgacacgtattcgaaaaataaataataataaaacttgaaatgattttgtttatattaattatgttgtcttataatattttattgattcttttgatttataatatattttaacataaatattttttattaaattaatcataattattcatatattatatatatttgtatgattaaaagtaattatatatattgttaaagttaaattttgttaattatgaataagtttgatattgtgataatattaaagatttattgtctatcgtaaaaattgtaatggagattcaaagattctattgatgagataagtttttttattcctctttatcaaatcaatttaaatttattaatttatagtatatattttagtttattgaattttttgtttttgctataatatttttgtaggggttttttctattattcaagtagattttatggatggagtctggagtagttgtttgctgtttggtctacatttacactttaagattgattgtaatttggcattgagttttgctttctctatgtttacactattgtactatgatcattatatgatttcacaagtttatttaccaattttcctgaagtattcctattttatgatatctcaaggattagttgtgtatacattcatggttaattaaaatttaatttgatggtatatttttttttttatcatttttgtactttctaattattattttgaatgataagttcatttttttttaaaaaaagta

SEQ ID NO: 239832 - DNA, 1103 bp, Cannabis indica
ctctcattttcatttgagttttttttctttcttcaacaagggtctgagaaaggattgtgggcttttctcaaaactttagtaaacatacacatatttgtttatttgtggccaatttttctttttttaattttcagatatgtaaacactgggaaaatgtgagatagaaaatgtttaactgtgaaggctgttttttgcaggcaattatagagagaatgggggaactggaaaaactagattaagaattctgcggtgattgaagagtgtgtagaactaaatttgttttattatgatatattccctattgtaatatttgaaatggaactaaatttgtttcttcttcgtatttgcatttcagcaatatacattccatcactttttctttctatttttgataattcatgtgaaaatccttctatcctttgttgaagaatcattcccattacaatggtgaaattttttccatttaaattaaatttcaaataaaaataaatacaattccttccataaagaagtttaattctagttgtggaataaaaataaatacaattccttccataaagaagtttaattctagttgtggcagaagttgcagatgtagggcaataatttttatatattttttattttatgttttcacctcaaactattcacagtttgaacatagtcaacgtgtctaattgcatattttagactagaatttctgacgaactctacactcatggaaagtttaatttattgtctcatttattatttataaatgatcataatttaagaaaagcttggcatcactaatctaatgatcatcctaacttattattgggaatcattcactgcatcattagtgacattagacaccttaattacatgtacctttggtctttaatatattatacatgtactctaatctaatgttaaaaagcacaatatattaaactgtcacatttgtatatggctaagctaaaattaaaaaaatgggtaaataccattttagaccctgtgtttggcaaaagttacagattagattctgtttttattaaatgacaaaatagatcccgtattttctaaaatagtaaaaataagaccctaagctcaatttttaacaa

SEQ ID NO: 239833 - DNA, 2307 bp, Cannabis indica
cctcataagttagttagctaattatcttttttttcttaattctctctccttctttttaaatacgaattacgaaacaatatcatgttttgtgttatgggtttggggatttggctttactttaacttttattgattttattaaaacttgaactgattggatagttttttattgagttaccctatattattactgatcaatagctaataggcttagcatctatgtgtgtaagatctacttgaagcaaaaatgtgagtttttctagttaactgaagcatttgatgagcagacacaatccaactagatttatgtagctaaatctccctaattctataaatatatattatctcatcacaattgcattctatatgatccgggaggcttgcatcttctctgagagcaacgtttgacttcaactttcgtgttcctttagggtcagtcgtgcactctcgaacgctcatcatgccttcaagagaatactgaacatttttttgaacaaaaatgaaacttttattcaaaatgaccaccaaagtacaagctcaaaaaaggccgcaggaagactaccaaacccaaaagcccctacactatttcaataccttataagataattgtcaaatctattttgttgttcgtacacacacctaacactctaaacttaattgccttttggatatcatcactgacaaccttggcagttttacaaacaagattaaagatccaactatttttatttaaccaaatataatacacggtggcaataataatagagttcactatcttcccttgtaaactttttttaggagccgagaaccattcacaaaaatcagtaggccaatcaagtaagccaagccaattgctaatctcaacaatcacctggatcgtgaaggcacactccccaaataggtgactatgcgtctctcgagctctagtacaaactggacaaatgtctgtagtaatcgaaaagattttgctgagatgatcacgggttaacagtcggttgttgatcttgccaaccaataaatctgtgtttcataatcaccatcttgtgtcacacattgtcagcatatttcacttttcaccatacggttttgattcaattagattgaattggatgatcgcccacccctaagtttaaacatttagggagcatggctggacccctacagagaactattattagttctacattttgcatgggttatgacttgttagttataaagataatataaatattacatatcactcgtaagtaatgtgggtcaaaatacacaatacaatttttttaaaaaaaaataaataattaatcacagatagcattaatccaattaccaaaactctatcattacgtgtgaagtaagaaactaattctacattatgtgtgattggatcttactatcttagtaaaataaaaaatttgagtaaaatttcattaggtaacagaccaaaataatgtaaatacatcaagcataaagactagagggttctatagccaaagacataaaggtaaaccaggctacctaattataggagaatcaattgataaatcaagtgttgaaataaaatcccatattaactacacactgtaaaaccagacatttgcaaagagtttacaaacagtaaaaatcttatgtggccttcggcctctaagttacctagacaaagtagttgggttagttacaaagtttattaatactttgtaactaacttcatctctgtgtgctctaatacaatacatataaaaaccagcagaaacaacattttaaagaaggcagaacaacacatattaaaatcagaaaatacaagagagaaaatcagatcttgaacaaaacaccagatcagtacagaatcaacacaagggacgaattgagttcatggtagaggcttacagcgattatgccttggaaccctaggtagggttcggagatccaaactcagaggggagttgttcatgcacaaagggaaaagaaaacaccatcaacactggttttagagagaataaactgagagaaaagagaggagaaaaacattgtaaatattagggattatcatttcatacctgtgtgtttgaaatcccagccattgtaaactctgatcattgatagtgaatcgaggcgagctcaagaggacgtacccgcacaatttcggggaacctctataaatccggtgcattctttcctttaaattttctgcatttttctctatattgtgtttatgtgtgtatgtgatttctggggtattaaaccgatctgggaaggggttattttctgggttttatctctgctgttcttcgtgttcttcagtgaagaacat

SEQ ID NO: 239834 - DNA, 3488 bp, Cannabis indica
attctggttacctcaaataaatattctgtggtttgttaaacttgtgtaatttgaaagcaacatttactgaacatacgaaacagcagtggaacaactcaaaaataatattagaaacaacatgacagctccagtattaatggttttaatacgtttacttcatctggccgaataatggttatttttcggttgttcggttgttcgggtattgctatggtagttctttccattgtgtggaagattgatgcctcgttttttatttgcgatatttacagtataaaagacaaaaacaaaagtcaaaacagttataagttataactttagctatgtgacagtataaatgtaaacttttactcaaaatttaatatttctgtaaaaatatatatataagaatgaaaaaaataccaaaatatatataaatatatatttatatatatataaaaactaatgttggaatgcttatttcccaaatacacttggttttcgaaatgaaaggacaatttagaccaaaactaaaaatgcctttttttgtagaagtagtactgtactggtaaaataattatgagcgaataggcactaggcagaccatataaatacatatataactatgacccacccagctgttataactacctttctttctccattccatcccccatgtgcttcctttatagcccatctctagacgacccccataccctttcgtccttatgtttccagttttatgtatgctttggtttagcatgccctaagatgaatcatatatgaccacttaatttaattaatatagtacaaccctagttgttttgcgacaaattatatttattttagataggacacattttttttaagtaatatttaatttggtgcataatttaggtgcgtacaagtctatggtacaccaactttcccaaatttatacaagagccctttaattcctaactttttctttgcatgaaagtatttattatagtaatagtgaatgtcctaagttttttcaaaaatttgaaatatattttacattacaaaaagtacaatgttcaagagaattacttttacaaatgtatatacaaaaaagaaaaaaaaaatcatgtgtagcatggcaatttaaacttagttttactactattgtaaataattcaatatctctacctacaaaacatatcgagaatcactataataacaatgaacagtactgcaataaaaaaaatatagaattaaattacatcaattatgccaatgtagggtcgtgctttactagtagcaacatggtgttatctgttatgtactagagacatgccctaatagattttagactaatttttgaatactcaaaaaattattgtttaattgataaataaataattcatagattgaactatttcgtatttgttaaacataaaattattttaattagttaaataattctttttctaaacaatcattcatcacaatcttaccctatatggtatggtaaagacattattatctcaaattttagacgaacacacgtgccactaaagagcttgcctagtgggaaaagggccccgacttaacagatattgataataatcccaaaatgaaaatgggagccatgaatctgactctaatattccgataggcctaaaaaagaattattaatgatttattatacattataagtaaataagacaattagtgggattatgatcctactaatttatttcagcaagtctttatttttttcaataagtagataaataagtatatataatttattaattatgaagatttatttgaaatatatccatataatgtaagttatttgtgaaataaaaagattttcaagttcgacgaccctgaagatccgaaagtggataaataagcatattttaatagttacgaagatttatttgaaatatgtgactaaaatataagatattggtgagataaaatattttcaagtttggcaaccctggatacccgattggagaataaaaatgtaacaatagttttggtagaaatattgatgggattatagaataagttaattttagatatatcgggatattttagggtacttagagttggtcaaatagactaaaattaaagattttttagtggttaagaaatcataagataactattaataataaacattttatgaacattattattaatattatattatatattattattattaacttttatctccatatatatgttttaaaacataaattgaaaaacgaagatgaaatcatcggttcgacgaaaaccttatccctctctattcattttttttgattttcaacttaaaacctagcgattcaagctccggtagtagcgggatagaaaattattgaagagggagagcttaaggtaaggatttgtttcattttaagttgaatacgattaattttatgtagtgattctatgatttaaaatagttacggagattttgaccatatagaatttttcttgggtagttatagaactaggttttgtgtttacttgttgaatttgaggagattttgagttagaaattgagtttggaactttttaaatcctagtacgaatgtttgcagatgctttctttggaaagggtagagtcacatggatggtttaggaaatgtagcttgggacacactttgcaaatcaaaaaaagcagaaggcttgggatttttgaacatatcagactggaacatagcatctatcataaagcatgtgttgtcaataaccaataagaaggacaatctatggatcaaatgaatacacagtgtatatatcaagcaaactaattggtggggttacaatgctccatccaacaatagctggtattataaaaagattgttgaagccaaagacagagtaaggcagattgtaggtacccagtacaattttctggggaaagatactacattgcagttggttataaaatgctgaatccatctcaagaacacttccattggagtaaagaggtatggtgtagtataaacattccaaagcctagctttgtgctttggttggccatccaaaataaattaaaaatgagagagattatataagttcaaaataatagatgatctaatgtatatactctgcaacactgcagctgaaacaaaggaccatttattttttgattgttctgttacgatcaactgtctttcctaggtgaagaggtggctggattggaatgcagaaacaggctctttagaaggtctactttgaaagatcaagacaaagcaagtttaagaaacaagttttctctactgctgtggcagctttatagtgtattaaatttggtatgttagaaatgataaaatttagaattcaaatgatgttaacatgcaacaactactgtagcagacgaaatggttagttaagaagtgagttacttgtgtaatgccaagaaacattataaggaggaattgagattggtttgatggtttataatagatgtatttgatttattatcatactatatagatatctccttcgtatctgaaggt

SEQ ID NO: 239835 - DNA, 2016 bp, Cannabis indica
ttgtttgaccaaaaaagtgtggattggatcggatgaacaaccctagctgcaagaaataagattgttaagttagttaggcaataacactacaagaaaaattaaaaataggggcagacacattattggcggagcatgtccacccatattaatgggcttattaccagtagagttgaacaaatttttttttttaattaaaatgaacaatagcggcagacaatagttattaccggcggaatgtctcgtcggcagtgggcaatgtggtttgtgcgggaaaattcctgctttttttttttacttttgaaaataattaatggcagaattttaccagcgaatcttgccgctaataaaacaataatttgcctgtttatactattacaagcagaacccactaatatcggcgggtctccgccggtaatagttttatatgtgtaaaaaaatcttaacactaatcatttcgtgactcttcttcttctctccttcatctttcatcttctcactctatctcttgctctctccccatctcagctcctatccaagatcccaccactatctcagctcatgtataaaaaaaaatttcacagtttctcaaatctgaatttttcactggcgtggaagctccgtccaagctctgtccaagctcccccgtagtccagccaaagcttcagtaacaattttcttcagatatatatatattgatatgtataaaggttaaatttatttttcatcatctctcaaattgtaaacattatcactaaatccaaacccactaatttttaatatatatcaaatccccagatcaaccatatctatattcatatcccatcccaacgagaccaaatcttaaaccccaaatcaaaactcacatagatctcttttagtataatgtatatatatatatattttatatctatatataattttgtttatatatatttatgtttatatatattcatgtttatttttatggtatattgtgattttagtataatttaattttttgtgtgggttgaaattgtacttttactttgtgtgatgtttttcttcttacaaccacttcagattggaaaatgtagtttttacttctttctcactaatccactctctctttgtctttattatttatttatttatttatctttatttggaagatttgtaggacttagttatatttactgtaaagcaacagaagaggaagcttttaacatcaaagaactgctgtatacgtttgaaatggcttcaggccaaaagattaatttccaaaaatcttcagttttttacagctgcaatactagtgttggtgtgcgtgatgctatctgtgacttacttggtatttttgaagctgatgaaaatggctcttattaggggttaccgtactcgattggaaaaaataagaatgccattcttggctttcttatagataaactgaggaaaaaaataaagggggggctgctgtcaagggctggcaaagaagtgctccttaaatcagttgcccaagcacttccaaattacgctacgagtgtttttttattaccaattgatacatgtaaggagcttgaacgactcatggcaaagtttcggtggagcacgtgctctaatcaaagtaaatgtaccagttggatgagttggagtcgtatgtgtccccacaaagatactggaggttagggattcagagattgactcatgattcttctttggtagggcgtgtgtacagagcaaggtactaccctgacaattcatttttaaaggctaagttgggtgacaatcatagttttgtgtggcgaagcatatttgaggcaaaagagtaattgatttctggtgtatgtcgttcaataggttctggttttttagtctctattcttatgatccctgacttcctgatgctaatccttttgtaatgtctgatcatccggcactgtttaaccaatctgtaagcagcctcctcaaaactaattcaaaaacttgggatgaagatgttatcagggacttgtttgacactagagatcagaatcttattct

SEQ ID NO: 239836 - DNA, 1593 bp, Cannabis indica
taggaagagtagaagatgggttaattggagggctgacagtagatgcatgacaaggtgggacaaagttgggtgcggaaaaggtattggggatgtttgcagatgaaaaagagtgcccagatgccatacccgaagctggttgagccaagaaggcagcttgactaaagggaaaaaatgtctcatcaaagagaacatcccttgagatgtaaagtctgccatctttggacaaacatttatacccttttatgggatatgctatagccaagaaagacacatggtatagatcgatattgaagtttaacccgattgtaaggtttaagatttggatagcatagacatccaaagactctaagagtagagtaatcaggttgtgtattgaacaagacttcaagaggagactttagatttaattgaggagtaggcatcctatttattaaaaagacagcaaccctataggcttcatcccaatatttgagaggtaaggatgcatgtgcaagtaaagctaagccactttcgacaatatgtctatgttttctctcagcaacaccattttgttcatgggtgtgaggacaagaaactctatgaactataccatgttcttgtaaaagattagtaaaagcttggtattctccccccaatcagactgaatttgctttattttgaaaccaagttgaagctcaacttgagctttgaatgtaatgaaggtttgtaaagcctcacacttggttctaagcatgtaaatccaagtgtctcgtgaaaaggcatcggcaaaactaatgtagtacctgtaaccactagatgagttaacaggtccagcacctcacaaattagaatgaagcaactgtaatggttcattatagacagttttagaaataagaaagggaagtttgtgatgcttccctaaataacaagcggcacataaatctgaaaaaccagtctcaattttattgcttaaatggatattacaagatttcaaggcatgttgtacaattttagcactaggatgacctagtctattatgccaaatagaaaattgagaattatgtacatgagtttggtgattatgacattcaattgtaggccttgagagtgggaagatagatggagcagggggaggcagtattggtttgttgttgagatgggcaagttggattgaatcaaaatggtataggcccttgtcaagcttcccaaccagtaaggtcttcatggagtcctgtgctttgacacaacaatgaaaggggtgaaactcaaaaaacacattattatcttatgcaaatcgagaaacatttagcatattctttgttatgtgaggaacatgaagtaaattttgtaaaacaagctgctatgaatgaaaaggggaattgaaaaaagactgaccaagattgttgatagccaaacctgatccatctcccatgtggatttggtgatcaccattgtaatcttgactgtattgcaggttttgagcatggggagtaaggtgatgagtggctccagagtcaagataccatgaagcatcaccaacagtttcagggctagcatatagaggaggcatttcagctaactgtgcacttccagcaaagttttgaaacgtagcag

SEQ ID NO: 239837 - DNA, 1864 bp, Cannabis indica
aattagtaatatgatggtaacataccaaaaaaaagtgagaagtggaggaggattgatagggtaaaatagacttttgttagtatggaattagctttcaagtgattttatagtggaaaagtaaatccttagtttaggtgaattgtaattcctttggaatgggctttcaagttctaataaagaaaccaaacacttgattgagctttcttaaggaatagcaaatccattccaatgctcattcatgtgaaccaaactctattttttgaaaggagttgaaaggagttacaaaactctatttttgagtatgttgaagtgcctaaaggatttgttagcattaaaatgttcaaaacgttatggcttgggtttaatcccgaacttttttcttcattgttcataactcctatttcacctatttatatgtctataaataggtgcgtgtggtgaaaatagtcatgatgtgttgtgttgtgtgtgtgaatcttcattaggatcatcctaaacattatatataaatgtctaaagttctcatgtctaaagttctcactttgtgaaaactaagtttctaccaatataatattttactaaaaaattataagacctgataatttctaaagctatttccataaaaaaaaaaaattaaggtccgtttggtacgcacaatttgattggattaaatttgtataatttatccaacccaatatttggacatgctcgaggtctggataactaatccagttaatctcgtctgtctaggactacttatctcatctaacagtgtgggatataattaattccatataagtaagatttttttgataattaattccatataagtgagattttttttattcatttaaaaaattaaaaaataaataattaattaaaaataaataattaattgatactaagagaaataatatgatactaaaatgagtaatttacggcataaatacctaagttttatgtcgaataacaaataagtacctaagttgttttcgtcactagtagaacttccgtatgtacctaaccgttacgtgacaggtcagtgtccacatatcactatataaattgttattataaaatataatacatataaatgtctaaatcacacaaattaattattactataaatactattatatttttattaatttcatcgatttaacttttattttcctagttccacattttttattaatataattagaaagttatacctatattaaaataaatgggttagaaaattctcatttactttcgatttatctcttatttttttttcttgttttgttgtttcctattttatattatttataatcgtttttataacaattgttgtatttttataatgaaatgaagaagatagaagaaaaagaaaagggaaagatccgaattggtaatttttcagtgattgtagaggaggatatttgtgtgtacagcttttaaagaattaagctgatactcaatttaaaattaaaggaaaaacatggaccaccgaaaataattctggtttttggagggctttgtggcaactgaaattacctccgaaagtaaaaaatttcctgtggagaacttgctcgaaatgtctcccaactaaatctcagctgagaattagacatgtgcaacttcagactaactgcccatggtgtaatgcagatgctgaaacatccttccatttgtttgttcaatgcccggtagcacaagcttgctggtgcaacatcggcctggcagtgtttcatacacaatcagtcacttttgctgcttggtttcaagtgggattggaaagttgggatgcagccactaagattgaggtttcaatgctttgttgggcgttatggaaatacagaaatgacaaagtttggaatgc

SEQ ID NO: 239838 - DNA, 746 bp, Cannabis indica
ttttttttttgtttttaatgattacaaattaatttgtatgtgaactttacaatgtgttaataatatctacatataaagctgaccacattttaccataaaataatgtaaacagtacatgtactttgttaaatgttagttagttagttacttatcagttataacagttaggtagcttccctaactaactcttcttgttgtactgtatataaagggctgtattcttaattccaaatcaatgaaatctttctttcacttttacacattcaacatggtatcagagctaaaattttcgcttccgccattatagtttttgtttctcaactctgtctttttcgttcacagactctgtttttcttctacatctattttctttttctcctttcatggcctcttcaacctttacaccagttgttttctctcacaaagtttctgtcaagcttgatgacagtaactttctcctatggcgaccacaacttctttcggcaattcgaggtcatcgacttcaacaatttatctctgacactcatcaacctccaagaaagtatctcactcaagaagatgaagttctacagcagatcaatccgttatttcttgactgggaagttcaagatcagttgttatactcatggttgttgtcttcaatgtcagatggtgtccttactcgaattgttggtgctgaaacttctgcccaaaatctggaaaattctagaggtatattcgttactcaaacctcagccaaaatagat

SEQ ID NO: 239839 - DNA, 1032 bp, Cannabis indica
tctcttttaatgacaggcaatctataatatcaagctgctcacgatgtggcagtgatcctctatccattttcaaaactttcaacccttccagctttccgactattagatgtttgagtcttctgaaactaccttcctcaaaatgcaattcctctccatcataagcctggtgcaaacgaatgaattctaaactgggtaaatcttttatgtttctcaacggttcattccttaacctagtgaaacataaggtcaatcccttagattctgaagcactgagatccagcttggaaactcttttaattgacaccgcaagctgatgaaacgcagagaaggaggaggagatgaaattctttcgaagtctagaatttcctcatccctaaaataagttatgaagagctcttcaatgtggctcattttgccaatggagattgttagagcttttcccatttctgtagtcacttttccaattcctaatgacactaattttgtaagcttctgaagctcttttacaaaatcaactccatttttatatgcttccacaaacgtaagtgtttgcaactccttcaagcatccaatccctgggtgtattttcacatcgccataggatttcacactacactcatctccatttatataccgatgtcctaaaaggtgttgaaaattttgcagcttgttaatctcgattggtaactccttaatgaaggtattaaaaagattcaagacctgtaaattgtagagtgacccaatggactttggaagccttttaacatgcgtacctttcaaatttaagtacttcaaatgaaataaatgtcccacttctttggggatatcatatagaggagcaccttcaaaatccaacaactttagaagtttcaattctttgaataaaccagttacaaaagaatcaatcaactgattgacattatgaaaaatgacagaacgaacctttgaatccctgacaatttcttgaacatcttttgtggtactaaatacagataagcgacaactcctccctttaaatttagccttacttgt

SEQ ID NO: 239840 - DNA, 1508 bp, Cannabis indica
ttttagatccacgtgtccccctcacctgcgtccacgtgttttgggaaaaaccaaaggcaacagttaccaaaaaacattgtcacatgccattaatgcgcagtgatttatttaatagataattatttcaaaattttggaaaactatccccaccttttttaatttcctaattatttcgttctcattcttatttcaaatttaaaagagatatttatacgaagagaaattaaaaggttttaggttacttccctaaaattttctctgaatcccttatttgacttgctttctttgaacttctctcccctgttgcctcaaaatttacttcttttctctagctctttgatttcctttgatttcagtgacttcaagatccttaaaggtaagaccatatctgttactaggaaatcttctcctattgtggattaggaattcttgattgaatatgaagacactttcaatgagatatgtgctaagtacactgttctagaaggggtcacttttccatgtagatgaaagaagaactggactaaaatttgaaggatcttgaactggccaaagatgaaattctagtcagtgggaaatgcatggaacttttgaaatttcatgttcctgctcttctggtttacattctttctcttactgaagtctttatgatctaactccttccaactttattcaaaaaattttggatttggctttcgtttgtgctcttaagggctaacattctttactttagaatttctactacttcaacaaaaccaaatgttcttctcattttcccacctggtatgattttgcgaaaagccctaattatttggtccacaatcttccttcttcaaacaagggttttgtctactttgttttttgtaattggtggcaagtggtttcccaaggctataaacctctgagattttctctattaccaatcatattgatggtacaacttctagcttgttggatatttccttacagctcatggagataccttgcgccaattggggattatccatagcattaaggaggatacatatccaataggttttatccttactgaggaagtttataagtgttttcctatcctttgctcatcatgcactgtttacccttctactctgaagattaaagcagaagtggtcagggtcaagttaggtgatctcaccatcgtctacaaagattgtttgataagtcttgatgatgcaaattatcccttggtcattaaagaggttcatgctacccaaattgtagttcttaaagccaagaattacactcatgcccagaatgtttcccaaaaaccaaaaaaaaaaatagctcaatttttaaatctgccactgagctgcacaaggagggtgtttttatttagtggggttttgatgctttcactcatggtgtggacccgattcatcctcattcgagttactctcaaatgaaaccaatatacagtcatatttggccacctcatccactagtgcttgttcatcttcttcctccaaacctcaagctttgatgtctac

SEQ ID NO: 239841 - DNA, 1227 bp, Cannabis indica
aaggagagcaaagtgaggataaacgagtaaggggagggtccaaaggagaaaaggaagagttaaaaactaaagaacttctcttatctgagggaggtcaaggaaatgaggagatggacttttactctggaattttccagtatggtaatgaaggaagcaaatgaagggacttaatattgtcttgcaagttatttagtttattcaaataatttttaaggagttctgattagttggtttcagataaattggatttattgttttgaatgttttttggaagttttatttatcagtttacgttaaaaatggaaataagtatcttcttatgtttaagaagagtgtttctagttttgatgttaagaagtttatttgctcaagtaatgtcttaaataaaagttatttttgcatgataattattatttagtggtgccatatttacataaaatatatctttaattttattatagttgaatattacacttaaaaaatcacagagactattcctgaaaaattagttacaaaataatggtatagctgggttttgatatgtgatatgactagagtgagtattggttgataaatagtttataaatagcatctaaagtaaataaacactaagtaaatgaaatattaggaaaacgtgatgacggaagcaaaatgatttatatatatatttatagtttataaatataattgaaacttatttctacacatatatttaatggttaaagtgatttgtggaataagcattgaaatcgttttccaaaatccttacagaaaatattaatttgattgctttacacttatatgttttaagcgtcattactattagtcagccaaaataacttagaatgaaagaagtatataattattattattaaaagattttatataattaaaataaggttaatgttcttaatattcaaaagacttcttttgagttgaaaagtttggttgtcaagtgtgaagctgaatacaaataattgatgttatgaaaattcaggaaatttgatattataaaattattgatttaatgtaaatattaagtttaaattgaaaggaatgatgcaagtatgaaaggataatggtaatttgatcttttattgtaggataggtatgctattttggaatttagttatacatatatatagaatggtaattaagttatggaaagttactattataaagataatcataatatatttagtaattaaggaagataaaggagtatca

SEQ ID NO: 239842 - DNA, 1394 bp, Cannabis indica
gttgtgactaaaattaaattagagacaatttgtatataaatactatattttagtcataaataatattttagtgtgactaaaagttacatttattcaaaaaaaaatatattgtaactaaaaaattatcactaaatgtaacaaatttttataatgatatattaaattatctaagacttcatattaacttaaactaatagcaatttactattttttgtaccacttaatatttctctattatatatgttatatatgaaaaatttagttaattattacgaaatattttctgtactgtactatgatgacccttgagaagtacaattatcaactgaagattctcaaagacttttttttttttttaaaaagaagtcttactatgctgccacaagaatttgaggacgcgtaaaatgtttactaactaatattattaagtttctacataatataatatattaaaaatttatacaaatttatatttttataatattaaatataattaaaaataaaaaaagtaacaataaaattattaattttaataattaaagcactaaatataaattagaattcaaatcaaatatcattttcttgtaaactatgcacgaaattgtttcctaagtattttatcaaatcctttataactttccaaaagaaaatgaaaattaatagtgaagtaataaagtatagagtgatctcttgatctcatgaactccttatataataatataacaaaggaagaaagaaactatatagttatagttaacaacaaataatgttcaaggaaaaacttaattaattgaattttaattacacttggatttaattaaaaaaaactgaatagaaaaaagacaagatgagaaccaaccaagtttgaacaagttggcatatttatgagtgtgggacagagagagctatttatataatagtacaataaaaataaataaataaattaagggcggctcatataattagatgaagcaaattactaatggtgtggtgacacagaaacaaaagagaaataaagtctaaggttagttgaaattaaattaaaagctttaattgttttcaaaaccgtgtgtaaattcactatcatttatgtttttgagtcaacaattgaccaagaaattccttattccaacgaaggtgattggatatgagagcttctacgtctagaaaattatatgaaaaaacatggaaatcatactcatttttccaccttcataactcttaaaaaaaataaatagtacacatagcattgctattgtgtttaacgatttaaaataaggtgacacctttcaatttaattttggagaattatatttcatataatattttttaattttttttttaaatttatgatttggattgttctgattgtttttacaataattttaatgtgg

SEQ ID NO: 239843 - DNA, 726 bp, Cannabis indica
atatttatatatatatagttaaaaagacatgtttatttttcattggattttggttggttggtcaaacatcactactcatttaaaatttaattgcaaatatgtgaagaaaaacaaaaactaagataatgtttgtggtgatattcaatgttttgcatgaaaacatatttgtcattttgtgaatggtgttgttgttattgagagtgatcactcaagaatgtttgaactaaaacgaatattttgtaccaagtgaaaggttctcaaaagtacatttgcattgagaaacaacccatttatggtaaagggtaattttgatgtgtcaaaaaatgagtaagaaaaagtatcataatatgtgaatgcatgtgtaaacatcatttgatgcttttattaaggaaactaagtatgaacaaacataagaggagtaactcacataatcatgatttgatttgatttgtgttgttaagagtttttttttccaacatttacatgacaattcttataagaataaatatgatttttgctctcttaaatttttacctattcgtgttctcaaatttttaatgttattttaaactcttttaaattattataactattaaattgtatccttatgtttaaaattcgagaaattgtttgatgataattatagtttggggatacaactcggcaattcaataataatttagtagagcacaactcaacaatgataatacttcatgtagtgtgaag

SEQ ID NO: 239844 - DNA, 2417 bp, Cannabis indica
ccacatgtggatcatactcattagacattcttcaacttccctcatacgaggcatgatggcctgaagagatcaattgtttcaactcagaacagttgaatatcaattcaagacaactcgtttttaaccttgtaagggcaagatcaaggtgactgcattaggtaggaaagggagatttcagctacaaacagctcataaaaaattatatttttgatttttggaggacttgtcgaaggagtttaaggatttgtaattagttctagaatccttaaatcaaattaaacaaaagaagaagaaaagaaaaaaaaaatcaaaaaaaaaaaaagtactacttgagaaattgaggaacgctcgaaaaactgatgaagatgaaatcactcagactcacaaagcaattgtaggcgtggagaagtgaagaaaagaattggacagaaattcaaaaaagacctctcttatttatagtgttccaagtatctaaatcctaaatcaattgggagtcttttaaatttaaagtttaaaagaaaaaagataaatgataagcaaaagataaccatcttttctcttctccctttttaaacttaaattttgaattccatattgtaaaaggaataggaatcaaaaatttaaaagctacaacaactcataatgcaattaagatttaagcaaatttaaaatttaaaacgaaaaaataaatgacaagtaaaagataattatcttttctcttctccttttactcttcaaattttgaatggcacatacaaaagggagtagaatttaaactcaattaatcctaaagccatgaggaatacatgaaaaattttaatgataagatttttcctcttttcctttactaatttttttttgaaaattcccaaacataagagcaaagggaattcgaagcactaatcctcttatgaatgcttgaagagtagagataatttctcaagatgttcgaaattgatgcctaccctggtagtttcgagagaaacaggctcagttcacgtcatcaagtcaacctcacaaaagtatgaagttgacttgggggcaaatgttaacccagaaacttaccttgatgatgtggatgtcaatatttgacacgtggcaagaaagaaaatatgtcaaagttgagtagtcctgagtcatagcagtcaacctaggaggggtccctagccctacgcccaggttgacttcgggaaatccgaaatgggtgtttggagcacaccaagttgtttccaactcactatctttcagtgttttgtgccatgaagacatgaaacattcaagtctaaggcacaaggactgaaaacacacgaaacagcaccacgaaaatcaacctaggcacctagggtttcacccagcttctaggttgaaaacctaactagggtttcagtttttgggaccgtcttagtgaaaatggattaaatttggtactgggacatgaactagacatgtcacaaatatatttgaagcattagaatcagattcggagaacttctatttttgagcacccgaagcaccaagtgccctaggcacccagcgcccaggttgacattttgtcaacctaagccagttccaagcatcaaaatgaaaatcctcctcggtcatcttctttgtcttcatcaaaaatgaggaaccaagtgtttttggggaagaaacagaccaacctggaggccaaaataagggaccagcgctcagtttgacaccaggtggtggcttagtgcccaagttgacatggaccgatttcgatgagtttttccaaaaagtcttccgtgcatattcttttttttcatcaaagagtaagatttaagtattcggaggagcaaacgaaactgtctaagggcatgaaagtggacccaacacccaggttgacacctagcactagtctcagaaccaaagttgacatattgtcaacctagattgtttccaatcttatttcttcaaaagtgttccgagcattttttctgccattagaaataacaaagatacaactaaactcggggagaaaacgacaatcacaggggcatcaaaattgatcctaacgcccaagttgacttagtgttgggcctagcgcccaggttgacaatcaacctggtgtgctggttttgatcatccaaatgtaagttatactccgagcattctctcaaaaatggtcaaaaattgggtaggagaactcgtccccgatttcaagaaccttggaagaatcaaaataacatctcggaagctccgaaaagagcaactaatgcccaggttgacatatggcatggtgcactaggtcttccttatctgattctgattctatctcgactgttcatatatttttccatagtaactgagtatttacatggacatcaatgtttgacaggtgataagaaagatgacaactcgaagttgagtagccctaagttatagcaagtcgacct

SEQ ID NO: 239845 - DNA, 1388 bp, Cannabis indica
atgtacagtgagcactgggggcatagccaatctgtacactactttccctatccttatcatatttctgacttgaaaatcaacatctcgtcgctttggatgaacataacttttttgtctacttcatcccagtgaataggcaatctgcactttcttccataaagtagttcataagaagccatcccgattgttgcctaacatttgttgttgtatgagatttcaatcaggagaaggtactttcccatgatccttcaaagtctaaaacacatgcccatagcatgttttacaaaatctgaatggtcctttcagactgtccatatgtctgaggatggaatgttgtactaaacttcagttggcgtaccatagatcgatgtaaactctcctaaaatctcaatgtgaactttggatccctatcagatacaatgggctttgggacaccatggagacgaactatttctctaacatatagttctgcatactgatcaagggagaagttcgtccgaacaagtaagaagtgcgttgactttgtaaacctgtcaactctgacccacacagagttgtactgtcccgtagtcctaggtaatctaagtatgaagtccatagtaatgtcttcccatttccattttgaaaggttcaatggctgcaacgaacctacaggcctttgatgctcgccttcacttgctgacatgttatacactttgctacgtattctaatatatcattcttcattctaggccaccaatacatagacttaaggtcttgatacattttcattgttctcgagtgaacagagtaaggagtcatatgtgactcatttagaatttccttcttaatatcattatccataggaacgcaaacacggttcataaactgtaacacaccaatactatccaccataaaatcattgatcttcccagatgaaatcttatcccgagacgtcactaagtctggatcttgatattgcgcttctttagttctttcctagagagtagactatagagtcatgttagctatccatcccacaataaactcaatgttagctcgggtcatctcatctgccagttgcttggaaatttgtttattgtattcatatggttttgacccttcctacttagggcataaaatacaacattggcattcccaggatgataaaggatttcacagtcataatcctttaccaactcaagccaacgtctttgtctcatgttcaggtctttctgggtgaagaagtatttcagacttttgtgatcaatataaatctcacatttctcgctatataagtaatgccgccaaatatttaacgctaatactactgccgcaagctctagatcatgagtagggtacctttgtttgtattcttgtaattttcgagaagcataagctattatctt

SEQ ID NO: 239846 - DNA, 964 bp, Cannabis indica
tttcttctatcgcaggttatgttattggggaggttgcatcacagaaaccttgtgaatttgattggattttgtgcagagaaagggcagcatatgcttatatatgtctacatgagcaaaggcagcttggcatctcatttgtacagtaagttggcgatgaccctttttttctcataatttgtgccgaaatgtatgtattttttgatacactattatgcatgaaactgtgttaatttggctcagaacagtatgtaaacgagctttctgtgttgtgtttgcactacaacattttatggtgtcaactgatttcactggatcattggacttgtataaaatcatcacttctagacttgaaattatgcaacatatagtaattggaaattggaaacgctaattgtttagagtcaaattcttacaaataagttggtgaactgtacaaattctgttacattaactattaagaacaatgaaatgtagattaataccaacaaatttcattgtttagatgaagaccgggagccactgagctgggatttgagggttcatatagctttagatgtagcaaggggtatggagtatcttcacgatggggtaagtaatctgatgttccaacttggaaactcctgtatttatttcacaggtatgcttgttgtgcttacttttctatgttatgcttttggttcaggctgttccttctgtaatacaccgggatatcaaatctaataatattctgctagatcaatctatgagagccagggtacgttcacttatcgttcattgtgattctgttacttcattttaaagcacaattaccatgattaatttccgttttgattttgatatgaattatggattctgatatagccttattacttgtggatatataatttcaaacaaggtttgtagtattgatggggttatattatgatttttgttagatctgattatgtttaattaacaggttgca

SEQ ID NO: 239847 - DNA, 1321 bp, Cannabis indica
aatcaacatacatgttagtacatgtagatcctaggaaaaataattttcaaaaatttgccttagagtcatggtaataatttattttcttgaaatatagattgaaaacaattttgattgatttatatgtgttgaggatagtttatgtgatttttatgagtttatgtaaaaatttgaaaatttctatgataaataattttgatttggttcaaaaattattttagaattaattcttgtgaaattttaagcaagtttattttccatagaactttattttgataaaaaacgagaaagctttggtgttttgaattttgagttccatggctgccatgcgtgcaacacattgtgtgtcgcacatctcgaagacaagccgtgttcccacgcgcattttgtctaatgaccgtccgtgcacccgttttttctgaacacagaggatgcaagcatcttcctatgcagatggatgaggttgctaacagcctcttgcggacgcggagaagactggacgcaccttggtgctcgaacaatggtacttttgcacccaaaatttgatttggggatttttttttttttttttggcctaaattttgattttttaaatttcaaaaccctaaaaattcttaagtttcaatataagctattatttctaatatatgaacataaatattaagtttagaaaataataatatttaattcttttaatagtttattatgaatttttgattgtttgaagattgaatttgttgacctcgttttggccaatgacaccgagtcttgaaagtgacttaaaattaattgaattcaatgagaatatatcaaatttaaagtatgaactaagaatacaagattttatagaggttcaggcccatttatttggtaatcgcctactcctctttctgattgtatttcacttgtgagaagaaaagaaaaaacaacttgatctctctcgaaagtttttgcaaatatttgagtagtgcaatagctctctttaaagtataattttggatccctcaataatagaatgactcaattatttttaggaaataattataatggaaaatagtgttgggattttatgtcctaaataaagatcatttcaatataatcagatttactaattattaaaaaataagaatcatttaatgttgcatggttcacataatttctttcatgattataagtttaatgtgtaaattttaaatctaaaacgtatagttattaatgattatagtattgtcaacgcagtggaatataatcatgattatatgtttcaaagtttttgtcctatgatttgtcagtacatcggatttacactgacatgatgatc

SEQ ID NO: 239848 - DNA, 1391 bp, Cannabis indica
actactacaaaatagacttttggtgtcaattcgatcgctttttttaaaaaaactgacactaaagaccaccccaactctttggtcaatatattagttctctcttccacatcagcttatttttaagggcaacgccccttagaagggcaagagtcgttcaagaatatatcagtttctcattttggtgttgtcattcaagaatatgtaaagccatgttggctaatttatgtaatgtcctagtttgttttgttaagcagacagttaatagagtcgctcccgagtttgttagagcatttttattatatcctgatttgtattttcagcttgagaaatattacaattgagttgttgctactattaaaaatcttacttttattcacaacaaaacttgtgacttaaagtaaaaaatttgtgactaattataaattattattcttatgttgtggctaaaaggtcagcggctaaaggtattagtcacaaaaattacaatttgttgtgactaaatatatttttataaaactaaattagtgacaatttgtgtctaaatgctatgttttagtcaaaaaaaattatgttgtgactaaaagttatcactaaaaataacagctttttgtagtgtgcttaccttagtgaatgaatttgaagtttaataaaatttgatttttcttttaaaaaaaaactattagtatccaatatcaacaattatatattcattcttggtgagaaacataaaagattccacttatgcatttttagcttccaaataaagaaagttaaaagctgtatgatgagtagtggagaacccagatttgttgggatacaattctattgactttgtaattataaaattctaagaatattattgaccaatatgcagctggagatcctagaaatcttagaaaaaaatagacttttagataacttatatatgaaggattactcttatcactagttttagctgtgaacacattaattgcaacataaagcacatgcaaactgcctaagattactgttttaatacacaattgtatgaagtctttgatttagtttaaaaagagaaattggataattcattgtctaactaaaagacacgtcatgttgaaatataagtcattaaaaaacacgatgacacttatgtgatagaattacgcaataaaactatacaaaaaaacataaaaaaaataattcaagcaacttaaatagggatatttataaaatacacaatctaatctgtcggatatctacacttctgtatattgaattggaatgaaaaatcaaaattttcacttgtgcagatcatatattaattaacatgtaaaagtaactaatccaattaaatttgcacatgtttatataatttttaaaaaatactatatatacaattaatattttaa

SEQ ID NO: 239849 - DNA, 1498 bp, Cannabis indica
gtggtcaaatatcacactttaacacttctagaaaaataagacttacaaatgatcccttaatatatattttaaaattacataagatgtgattaaaataatggagtaactcttataataaattaaaaatagttgtaataaaataagatcacttgttagtatatatttacaactataatattctcacaattatatagtcactaaatagttagaattaataagctggaaaataccaagataatacttatatcatctatcatattcctcatcccaaaccggtcatgtttatgtaactgacacagaccatctgttaataatcagatacatatccaatctttaaagaagagttaatttataattaaggtagtactaagctaatctcgtcgttctccatcaacgacttttccacatccacaggtatccaattgagtttttgaaaggaaaatatagggggtgagcttataaaacccagcaggaagaaaattattatcaatgactagtagtttaataaaaatctctgcatgtttaactctttaaaaataaaatatctcatcatctcatggataaataaagtagagagactacaaataatcacaagagataagctacccatgcatatcacactgtccactagaccccttgctctcaataccaatcataaaaatgacatcttaaactgggtagtcccacctgataactaccatattatcggggctcaaagtcaagtcacttctgacagattctaagtctttcacctataggtgagtgcacacctgttctacccatgatgatacagagagtaggtcatgaaacaataatatgcacaaaatcatgatcaacatgactctcatcagaaataaatataaccaaaagcaggcaaacaagaatgacaaaagaatatattcccttttattttaaaaaatctgctaccatgcatatcacattatccactagatccctagctctcaatcccaatcatagaaaatgacatcttaaattgggtagtcccacctgataaccactatattatcggggctcagtcaagtcactttctgtacagattataagccttttacctacacgtgagtgcacacttgttctacctattgtgatacagagactaggttgtgaaacaataatatacacaaaatcatgatcaacatgactctcatcagaaatcaatataactgaaaagcaagcaaacaagaatgacaaaagaacatatcccctttttatttaaaaaatctgacagcataacaattgtacaaaaatatatttgccactcagtgtcaaaacagttcaaaaatatatgcagattaagttttcaattttttaaaatattttataattcataaatatttggatatatctaatgtcatttaacacatataaaatcaagtccaataatcaagttgactccccacctcctaacaatcgtaaagctttctccaaaagagacgctcttaatcctctaattcttaagttcagatagcttagtcac

SEQ ID NO: 239850 - DNA, 1465 bp, Cannabis indica
tccttacactaaatataaaaatgtattagattttttgtgagggtcattgttgatattttactcaggcactataagtcaccgtaatgcaccatgtataatgaggtagttgtttttttttttttttcactagctgtatattggaaagttaaaataaccaaaaccaaggtgtgaccatagtcttggtctctgaagtttaattatttcttagcttaattcaaacgtgttataatatatatatttatgaccatggtggatataagcaactgcattggctattccaattttgaatcccaattcttaacttgctttcaaatggcagtggtggtggtccattatttcgattgagaaaacgagagaataccttgaataggaaagtaatcatatacctgcataggcaactctgtgtcaactgtcaagacagtatatcaagagcttcagaacgtttttgtttttgtggttgctcatctgtgatgccactggaacttcagtagcatttttttcttccaaataatcagcccttttaaaatatggttctgatgaaaacgttttctcaattttctttttcaccatcatcaattactcccctatacaattgataacctccaccttgttaacatggaagttctctttaatgctttcttgagttgatgagaagagtatgtacgaagtggattggattttcccatatgaacaaacaaatggtttgctctaacaacgcacctccgttcttcaaaaacaaaccatttgtttcttctgtaatactcttattattcttcttgaagcataaaaacataatgaatagaggagatgaagacatggatggatggtctctctctgatcttatttgttaatctctctttacaagaatgatgcttggagatttctactttcataatttcttgatcttgaggcttctactattgggaggccaaaatattgagctaaatctaataatgcaggacttcctcagtgtctgtccattattgggagacaaatatttagctaaatctgattcatttaggaagaaaaaaagtaattaataattataaatatcaacagtttgatttatatccaatatccaagtactcatttataaataatatccattaaaagtatacaagatataaaacagttcccaatgggtaatacccattttttttgggcttgaaatcaacggtaataccgaactcaaattttcctattagtaatacccacgcatgatcagaatataaatgtaattactaactaccctcaactattgctaatgctgatacatattaaaaacaataagccaatctttggttaaaactttgttttacaggtcgttttacaattagttttcacaagataaccaatatttattgctgatgtctttatattgtcataaataacatatcaactcatttgttagtttgagtgtttgtatgttagggatttggtatcttaatgtgggtgatatatatat

SEQ ID NO: 239851 - DNA, 2607 bp, Cannabis indica
tcttggtgttgatttttttattttatgtcttaactattttttggttttccactacactgttcatccctattttttcatttaattattgtttgtggtttgttaatcttgccattgctaagttgttttgattctacactattagacataattttctcacaataaaccttcaacttaaagagtaaaacgagtcttcacctcgttatccatcattttcgcatctcgaaccctcaatgatatctatggttttaataatattttgactaagagattagagaaagaaacaaaaaaggaaaaatgcttaagttcaaaaaggagacaaataaagttaagtaacagcccaagagcatcggcctaggggaaaaagactacttcccgactgacgctgaaagagaaagagattccaagcacacattgtgttttgagacttttttttttgaatgaaatatcaacttcattgaaataaaactagctttctgaatacaaaatatcctgaagttcagaggtaattgggaattcagaaacgctacaaccagcataaaatcgagactgcctagcaacataatgtgcagcacgatttgcagatcgtttaacaaaatataagtggacattatgcaaagataataaagcaagacgatagtcttgaataatcaagccgaaagtagaccctagtgtttgtgagctacgcaccgcttggaccacaactaagctatccgtttcaatcacaacatgagaccaatttttagctttgatccaactaagtgcctccttgatgcccaaagcttctatgactgcagcagggtagactccaccaaaactgcctgtccgagcctctaaacagctgccaaaatggtcacgagccacaataccgaagccatattgctcttctctttcaaaaatcgctgcatcaaatttaacttgattatatccatgtcgggtttagtccaacgctcaacaccatcatccttattgctgaaacataacgatgatagtgagttcttgtcctgagctttcctccaatgatcaagtgcaaccgtggctgatacaatgacattcaaaacagatgtctttttacctttccaaaccgtgttgctcctagctttccaaagagtccagcagaccatggcaactgtactcacttgttctgcagtggccgtggcaaagataagctccaaccagcttcgaaaatggccaccaggatcaaagacaaaagaaactccaacctttctccagcaggcaagagcaaagttgcagaaaataagagcatgagatgttgtttcgggctgagatgtgcacacaggacataccatagcaacttcaacatgcttgatgacaaggttcacacaagtgggaagggtgtttgcagcagcccgccacaataaattcttgactttaggaggtatgtgcaagccccgaagttgatcccagaaggttgaagcaacattaggaagctgagatttttctgctattgaagaaggttatacgcactctttaccgaaaactcctcagtattctcatacatccaagaccaagaatcacagtttgcattttgactgaggggaattcctaaaattgcagcagcatctgaggcagtaaacatgtctctgacaatgtccacatcccaagctctagtctcggttagaaagagagaatcaacatatttatttactaacccaggatgatgcattgaaacataaggattcttcaaattgggaagccatcgatgattaagaatattaacatttgtaccagatccaattgttctctgaattccagaacgcaacagctcttgagagctccaaatgcttctccaaacaaagctaggattgttacctaaatcagcagaaatgaagtccgactgaggataatatctagctttgtagatttttctcgcaagggaatcgggattgcacaagagacgccaactttgcttggcaagcatagcaagattaaagtcatgtaagctacgaaaacacaatcctccatcagactttgcagcaatcatacacttttcaaatcgtaaaactgaaataagaaaatttcaaaggtaaagaaaatgataaaactcttattgaactatataaagaaatatttttaatttttattgtaaacttaattagtaatttttttcgcaaggttattgtaaatttagtaaaaaaatattattttgaacttatttacaatattggataaagtattaaaggtgatcaaatgaactacataatattctactttcctttattttatagtttataggatgttctattgttttggcatttagaaaaaaaaaattaatctatttttttttcataatagtatagttatttaaaacattctgtaaaatttttacgaaatttaggataaaagatttacaagtgcaacagactgtctgaactctgttttcgatttgttaaaattttctaaatttctaaaaaaatttacaaaatatcttaaataattataacatacacaattataaaaaaaattaaactaaaaattctcctacataccttaatagataagaatacactagtgcatccattttttttttttttgacgattacagatgaattacaccactggaacagaaccattccagctcatttcttt

SEQ ID NO: 239852 - DNA, 1606 bp, Cannabis indica
gagaacacatttttttttaaacaagtagcatttagtttctgatgttaagaatattcagttttaaaataaaataaaataaatgtaatgcatctgaacccttcacgtgtccatatttatgagttaatggaagtactggtagtaacggtgtaaaagaattgtaacattacgtattttcgccactataaataaatattagatatttaagtgtataaaatcaaaaatataaagtatttatgccgcaatttaccctccatattattatgttattatatgtgcatggcattctgattaagtcaaaatctcataattccacaaattatatcaaaaatactttgaaattaacgaactaattatattgggagttattaatattgttacaattttctaataattgattgtgtgcatatttatttacaaaggattaaaacattgatattgaactggtcaaccctaatattaataatagtagtttgttatttgttttgtgtttgaaataatttacttaattttttgaaagagataaagacaagaagaggactaggcgccgtatggtggagacccaccacccaccattctaggagagttgtacatgtataatatactataatgtgttgtgttgtgtttttttcaaatgtgaatgaaagaaagataaagacagtgcttcttttattataatcattttatgcatatagcttaaaaagaagcttcctcaaaactaattggttcaattctttactatttgtttgttttatatgggacaatattcacaacattctcttgaagatgatgattattttttgctcatcaatcttaaactatatcagagtgtacataattactatctgtataggtacgaatcggatatgatcacttacgcgcaagggatatgattctgataccatattgagaatcatagagttgcatctgaaaactaattaacttaattttctatttttgagacaatatccacaataccatatatccacttcctgaaaaattgcattttgggattatatattatgggatacgattttgtcccgtgatgtactttcacggaatgtattccgtggtacattaaatgggtctcagggtacattaaatgagtgttagagtacgtttttactttttaaccctaattacccctaaatcaatctcagccgtcagatcaaataactctctcatctgacggctgttgtacatcacggattacaatccgtgaaagtacaataacgggacaaaatcatatccctatatattatatacataattatcatatacactatagatcgactatagtactatacacacacatgtagtagtggaccacaactacaatgatgtttaaatatatatgcactgtaccgcaaataataactagctcaaaaacaaaaccttcttttatatatatagagagattttcaatcttttttttcttctatatatgctttttatttattgattagatccatatttgagatcatcacatcgtaatcgaccatatatgtaatgtaagtaattaactcatttacagaaacatgcattatattagttacccttttaatacataggtgatcagtattgtaaatatacacacattagtttatta

SEQ ID NO: 239853 - DNA, 1413 bp, Cannabis indica
tatcatgatccgtgatacttcattatggcggagttcggtcgtgcatgttctcggataaccttgggtgtttttttaacctttttttttatggtgaatcatattttggagatctcgggaccccaaacctcatttaaacttccaaaactctaacaggaaacatgtgccatcttttggctagggcttgtaggaatcatttgatggtgtttcttttttagtttagacgtacagatgctagaaaaataatttcacaatattaatttttgtccaaaatgtaagtccatccaacaaatacataataaatatactaacgaaagtcgagtgatgagtaagatgttcatataataaaaaaagtaaagattgtaactaaatatttattttccttatttatatcattattattatttacttaaaataagaagcatgaaacaatatacacattacataactttactcaaagttataattatgtatagcattttgtaactgtaattgttttttttttttttttcaatgtaactaatagtttttggttaaattaaagaataaagttaataaaaaaaaaaggaaaaatgaaaagaataaatagggtaaaagaaaaatattagaggaccatcaccaactttaacaacatgattatatattttttaaaaaaacatgattatatatatggattggaatatgtgtccgacttatatgatattctatagtactagtatacattatgatatttatctaatatgaagagaaatttaagttattatgcttaaatgtaatgtatgaatctaaattaatttacttattaaatgcataataaaaatatattattattctacctaagttgaaaaatacttttcttatttatttcaattcccgttctttccattcttctcattttctattttctctcccataaaagatcacctaaactcaccacagcgcaccgcttatcaccacacacctctcattttctttctctaacatatctatatattggtttttgtatttcgttgattttttatccgaaaattgaattttgaattttctatgttttttttttcaattttttttacgatatttttgtaatatttagcgatgtatttgcaatgatagattatatctgagattatggatgaagtttagtgatgattagcgatgtttaataatgttttgcgtagataattttagcaatgtatttgcgatttgagactaaaaaatgcaaagcacgttgctaaacatcgctaataattatcgtgaaaatttaaatgaatttaacgacatttagcaatgtgttttagcgatgttgtgatttaacaacaactagcgatttagcgatgtttagcgacatcgtgaaaactagaaaaaaatacaaaaaacgagcgatgggttgagaactccagtcatcggtgggaaatt

SEQ ID NO: 239854 - DNA, 1912 bp, Cannabis indica
acgggacactgatatcagtttaacaccttctaatgtaggagcgaatgttgcacctacccaagatgagtttattgaacaaataattgcatgaaaattggaaggcatggaggccatgatccaaataatcctaggagtgccgactctaataaaaaagagcctacctagtagctttgtagatccaccctttgtagatgccatcaccttggtcgaaatgccaaggaagtttgtgttcctagtgacgaaaatgtatgatggaacgaccgatcccaacgaccacatagctagctacaagtagaggatgccatcaccttggtcgaaatgccaaggaagtttgtgctcctagtgacgaaaatgtatgatggaacgaccgatcccaacgactacatagctagctacaagtagaggatgttcactgccgcaataccttgcgagttacgcgaggcatgtatgtgtaaagggtttgggtctagtgtagttggcccagccctttagtggtatacaaacttttctaataattcttttgcttcttttgctcaattaattgatatttttgtagagtaatttgctagtagcaagaaactggagaagctatcagatgacctcaatagaattagacagagaagggatgaatcactgagagactatgtagcaaggttcaatgatgagaaggtgtcaattacagcctacaatgtggacgtagccgtcacaacctttcgaaaaggccttctggtagaacctgacatatataaagaaataactaaatacccttgcatgactatggaggatgtgcttgccaatgcatgggctcaaattaaatgggaggaagatgaatcgaacatgcaactgatctctaactacttaacctctcgtgagaatcacggtccaagatgagtagagtgcaagtcatcttatcaagttgaatcgtaccccaccaacagatctagatcatttcaaggcagtggaagagctccgccataacaatcatgtgattaccacaaaaggggaaaatcatcccaaaagtttagaggctatcaagataaagtaccaattccagagtatactttaacaatagaccctattaatgtggttgctgtaatgaaaggcattggaaataaagtcaagtggcttgggaagattcaaaagccagaagctctgaaagatatgaccaaatggtgtgaatttcatagcgatcacagaaacaccacagctgaatgtataacactcaagtttgaagttgcaaggctacttcgttgaggacaactccaagatctcctttgtgataaaggcaaagcaaccatagcagaaggggataaaagacaagatagtccacctcaaccccctcagaatgcgaggattgtgaatgtgatctcaagaggatcaaaagttagtggaattatattcagcagctaaacaccatgcatgagaaccaatcaacagtcaaggaaagctgagaaagccagagacagtcgttcgacataccattagctttgtcaatgatgaagccataaatttgctccaccttcaccatgatgccttagtcatttcattatattgcaagctgatttattaaatgtgtattggtccataatggaagttctgctaacattttatttctcaatgctctcagggatatgaaagttgacgagtcaacaatcactcgcaaatctatagtcttaatcgggttcagtggtgagcataagcactcgattggagaggtcaacttgcatgtttgggtagaaggagtaaacctccaaaccaagttcatcattcttgattttccttcttcataaaattccatccttggccgaccatggatccatgagatgaaagctgtgccatccacataccaccaagttctcaaatttcctacaccattaggaataaagtagatatcaggggcacaaagagcagc

SEQ ID NO: 239855 - DNA, 1534 bp, Cannabis indica
caaggactttagtcactcctttagatactagttaagtgagaaatgattcaattgtgatctgcagagtgttctgcatctattctggtgtgcacttctcagtttcttccttgttgcttataatggcattatctatgtcatttaacatcatcctagtaactctttacctgcaaattcttatcccaactataatgtcattataactcttccttgttgcttataatggcattattcgtatatcatttaacatcatcgtagtaactctttacctgcaaatccttattcccaactatatctgtgtactgattatttggtctcttatgttttacaggttcagatagcagatccttttgaaaaccctcacattaaaagtttatacaatgagtggcttgagcaacctggttcagaaaaagctaagaaacacatgcacaccgaatatcaccctttggtgaaaagcatcacatctcagttacacaattggtaaaagttttgctttgctttccttacaaaccaaaccaatccccattacgagcaacatggggattgcatttatggaatccagttttgatagtcaaatcctatactttgtttcagttttcaccacatgtatgtatatattccaacttcattagatagataaaaaaaaagaactggaaaaaatactccactttatcctttgacagaattcaaataagcttaagtctgttcatgtattgtgtttttttgacctctcacttcagttgaagaggttaagaaagaaagaatggcgcctagtctttagtatatttatcgattctttttctatgtaactcaagtaatggaaatttaaacgaggtcgacctgtgttggtatttctgctttctgttattgataagttgtatttatttgtgtaacactttgttgcttttatagttttattctcaatattattgacttctttaaaacagatttagaagggaatttattacattttgttttttcttaaaaaaaagttcattagaaattatttataaagtgaaaatgtacacaataatgtatcatgagcctttatatataaaggtacatatgtgtgtgattggtaagctcacaaatattttcaaacattaattataaaaatatattataaaataatgtaaattattattgttatttttttaatagatttcaatgacgcaataatattaatccaattaccaattatcaaaatcttattatgtgattaaggcttgtaagttatgagtgtaagcatacattttacagataactcgcacatgaactggtctatatggcctcatgcaagctctaagagcttaaaatgacaagctcaagaccactctctttcaatgggactttcaacattctaaatctgatacctctttattcatttttggctttagacactcacacctagtctatgttgatgaatttttcatcacagatcctaatcaaaaattgatccaaaaacacattgatgatctcaatttcaactttgctctcaaagatttggaagcagttacttcattgaggttgagattgt

SEQ ID NO: 239856 - DNA, 1728 bp, Cannabis indica
aaatttaaacaatatatatttcaaccctagtgatgttttatatatgaatgtagtacacacctgtggctaatacgaggaggaccatgagtaacacataaccaagcttcaaacaagagaataatttcatttcttactatttattaatgttatcatcatacataaacacacacacacacatatatatatatatagtgttgatcacagcacatcatctttgaaaatatattgtgaaagcttactaaaactacttgggtagtactattcatttggagaagaattcaacatggaaatcgtgtctaattaataataatatttaattatgtttggcgtgtttcattcactaaagacctcaggtcatccatcattataatgccagacttagcaagaagccaatcaaaatgaaattttggccctaaagaatatcttattctgactagaaaatgatcaaagtttgacataaaactggcttagattcaatgagcacaacccccaaattaattaaccatgcatggatgtagacgaccgccacaacatgtatcaagtttaacaaaaagctttgaaaattgtagatcaaacaccatatatatagtacacgatgatgcatgcccacggtgacatttttggccggagaatcactcattaatttattggtagatattattttggattctgtgttttacaaaagttatcaattgaactttctattttattaaatgacaaaatgaactctctgtattttttaaaatggtacaaataggaccttgaactaattttttttatcaaaataaaacttaattataatctaatctagatgtgttatgacaaaattgtctatattttctatatttatttgtattaagaattgtcctcaagttgcttatattaaaaaaaattatagaaaattgaactttaaggtcatatttttaccattttgaaaagtacgaggtcaattttattatttaacaaaacagagaatccaatatatcgataaatttttgcaaaacacaaaatctaaaatgatatttactcttaatttatagttatttgaaattaaaagttcagaatggtatgtaaaaaaaaaagagatctcaaaatagtacctttaaaaaataaatcaatatgataattcctcaaattatttcatattattaaaaagaaacatttttgttaaaatttgtccaatatagtcaataaagactaacatacactacaataaaaaagagctttaaaggcattatttttgaacataagacgtcaattttagcgaaattcaaaattgacgttgttccaaatgatgctaaagtaggtatgaaataaccgactccataggggcctatgaagtcggttattatgaaataatcgaagccatagagtccctatggaatcatttatttataataatcataactataaggtccctatgaatcagttatttataataagacaaggtgaagcacaacaatgttattcttaacaaatatttcaagaatcattgacagtactatgatcaaatatgatttaaccaactaagctaggaaaataaggagaagaactgatcaggatgatctaatagaaaaattatgttcatcacctcaaagagagataatatcacatatgtatacaacatctcattcgaaagatagcacaatctcaatttgctcgagatacactgctctgagaatatcgcaattgtactatgctgatcgtatacgacatgctcaaagtaag

SEQ ID NO: 239857 - DNA, 2456 bp, Cannabis indica
tataatttatttttgtttgaaatttatattttttaagaacatgaattagaaaaaaaaattaatacaattaaaaatataattattaaaatatggtgttttagaaatttttggtgttttcactctataccaaaaataccttctccctctctttctaaccaaccaacacaagcatcatgccaaaccaccataactccaccattacatcacgctggagctccctattcgcccactgtccacttccattcctcaacctaaataataagtaagtaatttctatataaattgttgttaggtttcattatatgttgtttgtgttgaatagatccacacattttactttgggttttgttgattttctcttctagaatgaacttatgaacttgagtattactgcggaatttgcatttttttctgggtttcttgtatttttgtgatatttttactgatttcttgtgattaattttgtggtgtttggtaaaattagaggttatagaagatgtttagtgatatttatcgatattagagttataaaatgggttaaaaggtaattttacgatgtttagcaataaagttgataaattttgcgatatataactgaaaaatgccaaatttcgtaattaggaatgcttgtccacatgttttcaatgtttatcaatttgtagttgcaaaatgaggattttggaggaatttgcaatatttagcgattcttttgcgatgttatcctaatttttttttatgtttgtggggtgttttttcactttaaatttgatattcttctaaatgacaggttcaattgtgtttgtgcttatactatatgatggtgtttgggttgtttagggtttcaattggatattcaaaagccaaagtataagatgttgatgtttgagattgacacaaacttacagaagatgtgtgacattttgtacgaagagttgaaggtggtacgcaatcacgtgagatacactttagcaagttgtacacaacaagaaagaattaaaacaagtagtgggaaggtttgcaatggagaacaactttgagtggatggtgagaaagtctaacaccaatgtgttttacattacttgcaaggatccaaattgtaaatggagatttaggggaaagaagaaaattcattgttacatgttttaggttactgtattccacaatgaacacacatataacctagattttagatagtctgatcactgtcaagcaacactgtggattgttggccacctaattatgggaaactacacaacaggtggaactaagtacaagctaacgacataattagggctatgaaagacgactatgacatccatataagttatgagaaggcatggaggtgcagaaaaaatgcacttgtgtatgtgaagggtatgccaaagatttgttatacaaagtgttaatgcagattttcgttaactgataatgaacctttttcgtaataaatttatcatagatatatatgaaaattaaaaaagtataataataataacaccaagaattttacgtgattttgcagttaaatctgcatactccacgagtctatcttattcaagatatttctaagtatttaatacaatatacaattagtaatctttttctctcaaagatttttttgtccctttttctgtagaatccacccctatctataggaatataggttgatagttatttacatttaaattcgaattgcataaatgtttcatgaaacgtgcgtgggatttgatcacgtttcatttaaacacatgtaaataacaattgataatcgtataactgtttatcattcttatcttcaaggcggttgatgctgacttggacagtggtatctcgctttacatatagatgaccaataatgactgggtttaatcatatgccttccagcaatggcatgagctccagtgtactgaggaaacttaagaactgctctttgactataaggcctcgcagactggacaatcatgtcgtgtatatttctaagttgatacacttagttattataatgtggaaaatatgctaaatgtttaacaaccaattcgtctcgtcgatattttcttatgtgtagcgaggtggatgtctcgttatacattgcccgtggttgattcaaataactttacttaaaaatgaatcttgttctcgagactgcgtattttgaggcaggctagtgtctcgttaatacatatattaatagtctgtttatccttgtcttgcctaagactatgcagtcagcgagttatgaatatactctatcaattttatatttaatgagttattccttttgcattaaatgatataatcgttattatatctggtggttcatattctacttaattgacacatgtcactctctgaagtgtagccaaatttcagatataataattgccccttaaaaagttcttttttaataaaaagtacttttaaatgattagaaagggtatatttgtcttaacccaatt

SEQ ID NO: 239858 - DNA, 807 bp, Cannabis indica
aacatatattcttgattttttttcaaattttttgacttatttgtaatatttcattaaattttaattatttaattatttaattttatgtttttttatttgataaatatctaaaattcttaataatatttttttttgacgtgatttcttaataatatttaaaataattaaaaatataatttataaatatctatatatttataaagcaaaacataatttatattagtacttttgtcataatcatttcgctcaatttatatcatttaattaaatttttataataaaagacataatttatttcatgaaaataatttatatattttttaaaaatttgtcgcaaagcgaaattttttactagttaacttaaaaagtgattgtactgaacgtaaatatagaaactccattaaatattttatgtaacatgtgtcaaaattcattcacattatacactactattcaagtatgaaatatgaagatagactaaaaagtgtatacatactattagagaaggactatcgtcaatctcctattacaatctcttaatctacttttgtgctcgaaaacacatgttgaaatatttttttttttcaatttttttatagcagtgtttgtaatagttataatatcatctagatctatataaattttttaaattttttaaacacggtaaactgaaatatcaagaactttatttttgatactataaactatttgaaaattttaaaaaatttacacggataatattgtaactattacgaataacgacatgtgattttgagtgtaaaaattgattaaaaaattataataaaa

SEQ ID NO: 239859 - DNA, 1125 bp, Cannabis indica
gctcaaagatcaatggctggaggtacatcgatccttttattgcatatattattgatatgattacagtttattttccgcatttcatatcatttgtatatgctatattacatacactatatatatagtctaacacatgatccatcggttaacagaccatgatgagttagattgattttagtggaaaactaattatgggacgttgtgtactactgactattcaaacaataaaaatccatgattcattcattttctagctaagtttattcttgttcaattcaattaagttttacttttgattttgtgattgtatttagttttgaattgtgtttcttagacattattactgctgtaataatcagttttgagggtaatcatttaccacaatatatcaaaaaaataatcatttattttgcacccaaatatttaaatcttaggctcaaattgatcggtatgatcaaataaaattttattgattgtatatacatttgagtttagatttagaaaaccaatcatgtaggatgtcaaattaattagggtgtaccaatctgtaattttgataaaatattgagtaccaaataattatttactaacttaaattacgggtcaaacaaaattttcttgtcaaaaaaatttgagggtcaaacaaaataatcttatattatatagcacacttgattaaatgaacaaaactctaatcacataaaaaatatatgcaaatttgcaattaacaaatcaagaaaaaggtaccttgtaatcattactcaattttaattttgattcgtctactaacaagtgagtttagattaggttagattttacttttcaacctctactaataacacttgtatttagtagtgttgtaaatttgtacgtgtcttgctaatttggcatgtatttattttatttttttaaaaaacggattgtactacaaaatatatgagtcgtaccgtatcgtaccaatatattaagaggtaggcctggcttgatggctcgtagacccgatatttttctgtcgtgctcagattcgtgtcgtactttacttgtgccagcctgtagttcttaaaggggtctaggctcactgtgcgattgcattgatggcaaaaatacattagcagacaccttacc

SEQ ID NO: 239860 - DNA, 2402 bp, Cannabis indica
ctatttatttatgcaattttgtgttagttatcatcttgttaatgcttgatcactattaattagtatagatattttaggttttacacttgagaggtaatctaaaatcgaacttagaattgcatgagatatgaaaagtgtgagattgagagattccactaattgtgtgtttcatttaaagagaatcatattattttattattgcttgattgattaatattgaatagagatatcttgttagttaaataagttaattctatcattactcgagataggttaatagattacagtaggattcttgaaattataaattatagaataaattaggataattgataaattgagatttatagtttataatatggaaataaatgctctaggtctttattgtgtgattaaaatcgatgtttgtgtatttacttcttagttattttattatttcatttcttaattattatttactttgaattgtctaattaaagcataaaacaaaaaaagtatagtaattggtaaaatttaataatcaattcttgtgggttcgataatcttttaaaattaaaactttggtataataacaatttacgcttgtagtaaaaatcgtgaatcaagtttttggcaccgttactagggattgaaagttttgtaaattattgctaatattattaatacttttttttttgttttaaattagattttattttgttttaatattgtttgttattttgtgattcaatttatgcaaagaacttgaagtgctacaccttttacaccgcttaattcctaaattgaaaattaaagtagttgaaagcaaataaaatgctggctttcaccatggcagctattaatattaataacaataatgtgaacaatgcttttaataacaaccaactagcaccttttgtagttgatgcacaaccacaagccgctcatcactattgcttaactgtagtgaatgaaaatctgaatagtattctaatttagtcatcactagaaactattttaagttgaagcttgctttaatcaatatggtgcgaaaaaattagtttggtgggttggctattgaagataccaatattcctctagttatattttttgaggtatgtgctactgtaaaaatgaatggttttattgattacgccaatacgactctttctttactcttgaagggatagcgaaagaagttgtttgcaatatctacagacatgatctattactacatgagatgatatggctaaaaagttcatggtaaagttctttcctccatcgaagtttgcatagttgagaagtgaaattaggaaatttagatagtttgatatagaacaactatatgaagcatgggagcaattcaaagaattactacatcgctgcccacaacatagctatgaaagctggaagtctcaattttctactatgggttgaatggtccaactaggaatattattgatgctactatcggaggagctttattggctaagcgtgtaactgaagccattaatttataggaggagatggctactaatagttatagctggattaatggaagaaatactccaagaaaggtggttggcttacatgaagtgctaagtagatgacttggccttcttgttggcgagctgtagtggcacgtggcattgatattggccatgtagacatgccacatcaagtggaaaaaaaatcaagataacaaaatgagttgccaaatctactactgaaaagtagcattcttataagttggtcactggtagtactttctaaggtgttgtccattccaatactttggtaggagaactaactccatgttcttattgtacctgcgaagcttgtaggaacccttaattattattcctctccttgacttgtttgttgaagtgccttgcaaccttctgctggcaggcctacaacttaaggctggcttggtctcttctttcttctattttgtcaaaggattccaccaaaaaagtattatttacttcttggtcatatgttatccttctatgagacggtagcactaactctacaagaaacattgcttcatagccataagttaaagtaaattgtgtttgcctagtggtcatcttctcggtggtcctatgtgaccagagtaactctgagagcaatttaggctaattgccttttacctcttctagatgctttttcaaagtgaccctgaggatcttgttcacaacttctacttgcccattcatttgaggatgagaaacggcagaaaagcttttgatgatgtcgtgtctgttgtaaaaatcaaagaacatgtcactatcaaactgcttcccattgtctgacacaatcatttgtgcaagtccaaatcgacatatgatgttcttgacaataaagtcgaggacttttttagaagttattgtcccaagggattcagcttctgtccactt

SEQ ID NO: 239861 - DNA, 2749 bp, Cannabis indica
agatcctggtaaaaatatttccatcaatatgttataattagacaatttaaaatgcgttggaaagatgagaaagagatctatggatcttatgtttataacaagatctaaatgaatcattacaaaaatcctccaacaattaccacgtagtaagttgatcttacccacggctcgcacaaatgctcccccacttgtataaggctccacgactcacacaaatactccacgactcgcacaaatttttcctaggttgcacaccgactcatgggatcacacaatggctcatgggcttgcataatggaacatgggctcgcacaccccattgtcacatttcaatgatattagtattttggccataactctcttgatatatgtttaaattggacaattcaaaatgcgttgaaaagataagacagagatatatagataatatgtttatgacaagatctaattctaaatgtagaattataaaaatcttccaacaattgccacttagtaagttgatcttactaactccactcgtgagttgttacatgttaatctttaagttgtgttaataccctgagaattgaaagcaacgattctcaggattaatgagccatgggccatacatgttgattcaatcattcctcgactgactcttaaagttaatgttttagctccttgagactaattgttgactaatctcgaaaatcaactttatcagtttttggggttaacacttgctccctagtctacaagaattcttttacgtattcttacttcactaagtgaattggggttttgcttggctagagtgcaagccttaccttctatgctttttttgaggctgtgcccactatacatatggggcctcccttgcttgagtttcacttcacaatcagcaccttggagtagtggaaaattcttctaacattgtctaggaggtcttaggtttgaacctcatctacccctttttttctcttttctctttttcttgtcgagtgacctaagtcaccatgcggtcaaatgaccttggtcaccatgaggctgagtgactttgagtcgctattggggctgagtgacatttttttactctttggtcgagtgactctagtcaccgtgaggttgagtaacatttgtccactctttggccgagtgactttggtcaccgcgaagccaagttacatttgttcactctttggctgggtgaatttggtcaccgcaaggccgagttatatttgttcactctttggccaatgacactggtcactgcgaggccgtgtgacatttgttcactctttggctgagtgactctggtcagcgcaaggccgagtgacatatgttcattctttggccgagtgactttggtcactatgaggtcaagtggtatttgttcactctttggctgactgactttggtcaacgcaagaccgagtgacatttgttcactctttggcatactgactttggtcaccgcgaggctgcatgacatttgttcactctttggccgagtgactttggtcactgcgaggctgagtgacatttgtttactctttggccgagtgactttggtcaccgcgaggctgagtgacatttgtttactctttggccgagtgactttggtcaccacgaggttgagtgatatttgtaattggtgttggccgagtgactctgacggttactctttggccaagtgacttttcccactgtggtaaacatatttacatttgagggagcattactctttgagcggattcatcctcttattttttctttaactgcttcattcactttgacaattttaattgacaagtatagtgagcaagccaagcagacacgtggagagtgacgaatctcatgtgtaatgtaaaaacttaacatttcattgataaatatgtaatcacctgaatttaatcacctaaatacacattctttcttcaaaggcctatatgagcgccctctttaatttagtgcgacgtagaaaatgtgaacttgccattgctaggaacaccttctcgcatagtggaactttacttagaggaatatcttggatatataatttttatgggttgtataacagagacttcacttgaatgtatcagcttatgagtattaggggtattatctaatagacgttgtaggggtctaacgaggttactaaagtacactcgcttgtgtctgtctctaagactccattacccttctcgatacggatgtatttttttgctcactcatagaagtcttcaatgccatccaattccgttttcaacatattctcccataatctacttctagggcgtactccaacagctatggtgaacttgagtttatcgtcaaacatcctccctactttggtgactttggcattaaagcattggacgtatcttcttaagatttctttctccccttgcttcacattggtgataattgttacaagaataatgtaatcactcatagcttgatcttgttgaaggaattcctccaaaaaattgtttctacatgtaattgttcttggtccaagccttttgaaccatttatatgtggctcctttgagtatgaacacaattcaccgtcatgttatcttacatgacaccttttttatcttcattagcagtgcaaaaataatagtaaagaaaaaaataaaaataacagtgcagaatttaaaacttgacacaagagaattatatgtggtatcaatgttcttttaaacactacttgtaaagaccgcttagtttaatttggaaattaacagttaatcacgtttaattat

SEQ ID NO: 239862 - DNA, 2420 bp, Cannabis indica
aaattaaaaaaattgaaaaaagtgaaattcgcgtacctatggcgtcggttgctacgctacatatggcgtcggttattagctaggaaccgacgccataggtatggcgtcggttcctagctaataaccgatgccataggggtacatatggcgtcggttcatttaaactctttagcgtcgccctgatcagcgtcggtagtgaatttcgcaaaaactgacgctgaaagggcttaaaaaccatctctaaagggggttattgtagtagtgacgagagcagacatagctcacgcacgccttaagcatcctaagctggttcatgtccaatccaggcatggaacattagacagcctttaaatggttattgggatttgtgatgggcacttggaattatggtctgaccaatgaaaaaccaaaaggagaattagaattgaaagggttcttggatgtagactacgcctcgaatagagataccaaaaattaaccacttcttacgttttcttgacaaactggaattgtatatgtgtgaaggctcgattacagtctgtggttactctttccaccacggaagcagaattcatcgcgactacggaagcattcaattggaagctttatgagttaaaacgaatcaaaagatgagtgattgcttattcagatagccactcttccatccacctttgtaaaaatccagtttatcatgaaaagagaaaacatatagatattagactctaatggattagagagaagatagaagaaagactggttgatttagagaaggtcagaatagaagatacttttattgatattggactaaggtcttaaccttaaacaagttctagcattgcttgaaattgatcaatctcagaagttagtatattgagattaatggaacaccaaccaatgatggctacattctttcttcattatcttcattcttttaatttgaagtaactagtggaatttgtcgtatagtttctccaaataaaaagatctccgcaaacatcatttctagatatttgtttactcacggttgccagtaccgaaaggagtcttgtggaatgatagtcgggtctggaagggagttctcgaatgactataatgtccactccgggtccaattttcaggaaactagcctcactccgggatggagttctagttggccagttgtctctccggtagttccagatagtcgactccatgaggctctatcatatctagaagcatcttcagcaagtgtccttggtttgtgagtaaggaagctcatatatgttctcggaggccctgattctaaagctaacatggagacatgactcaaagaggaattggttcagttagttatttctaactaacttaacaacttcgattcttgcagcccctgactttagaatcttgatccaaagtctataaataccaccttgacttgttatttcgagagataagtttaagaactcagagagatgacattgatagagattgagaggtagagagagaggcgcaaagaaaagagagagattggatttgggttttgcaagaagaatcttctatagatgaagaagattcttaggtataagtatgagagttaaaacacttagtgattaggactcaacagagaatatcgtctcgactgtattgtacttattccttactcaattaataaagaaagatgaaggtggtattttagaactacagtagagccatagatcacatcgatctatcggacttgaaccagtatatatcatggtgtctattactttttgttttttgcatttattgttttttgattttacatactctgcttgcccctgctttactttcgatttttgttcttaatttgttaatcttatcattgttaattatttaattgtttagagtttcattgatttgattctgcacatttcgtcgtaattttcctacaaaaccctttcttttattgatgactactcttattactgtaaagtattttagcacttccatctaacttttccctacataaatcacacaatcaagacacagtttactttttgttccagaacctttttaatatctatatatatttatttagtttacgatttaccctgagcaaacaattacttaaaagtcatcaatcttctataaataatataacaacttcaaaaacgaaaaatctttattgcttggccggattaacatatattcaaaacataaatacttacacttctttaataataaaaaaaaaaaaaaaaaaaaaaaaaaaaaggcaaaaggtggcaatattaataattgctttgttattcaagtatatgtgagctgttttcttagctagctcaaaagaactaattattttttcttcgattctagaggaatgttttgatattaaacttcaaactatacttccaaaatattgttgataatattattatttaatcctcaaactaacacttcggaag

SEQ ID NO: 239863 - DNA, 875 bp, Cannabis indica
atgactcatttcgctcagatctccaacttttgctcttttctgtcgcagagtaataactaacttaaccaacttctttctgagcgaaatctccacgacagcttaagtgccaaggcctcagggaacacaaatgagcttccgaacacgagggccacggacctttgctaaacctattttcggatagaatgaaggcatgttgaagtcgactatccagaattgttattctagaaggaaaagctaaccacctggaactcctttctagggaaggactagctatcttgaagactggacccgaagtggacatgatagacatttaggaactccctttcggactctactatcattccacaagtctcctttcaagactaacaatcgccagaaaataactttctaaaaatgacgactgcgaagacctttttatttgaatgaactatactacaattatattttattatatgtgtatatattacttttaattttattgggcttggagccaaggtcccggtcgccccactttttggccaactctagttttgatatgaggtgataattacatataaatttctaatatcttgtttggcaaatctaattctcattgaaattagagggtataattgaaatccctcaattattattatgaatcatgtctactctcaaagcaacctagccaatatattgactatctatttcctactaatttcaataagattgtatcgtttttatactccaacttaaaattatatttttttttgttaataattatgtctagttataccgttattaatatattaatttatataattaatttcaattagacacaaaatcaattatatcacgactttcaaaacacgctcctaattttttttttgtaataatat

SEQ ID NO: 239864 - DNA, 967 bp, Cannabis indica
tggagaactatagttgcttaataattacttactagtacaagtgggttggactttggatggatttatgagccatagggcctactctaattaattattaaacaactctatgtaacaactagtagtaattaagtaattaagagttagaattagatgatgagcagcccatccttaagattttaatatactagctagaatgaaaatttaattaaaatgcatataacaaaattaaggaaatttgtattaaacttttcagcgataattttaattttaataatgtcaaatattgatcttctattctgtacgaagctcatcttcattacatcataattatataaataaattaaagatgacagctatatacatctataaaaataaaattacctttttacccttaatttttatatgcttctattaataaaggaatttaaaagtacggaattttttgtcaatacaccattgtatacatcataatattattctcatttatttctattataatccattaccaatgtactgaaccaatccagaaagatatatttgtaataaataaaagtgtgatgagttgtttcggataacatttgaataaataaataccaataaactttaatcaagaactcttaaaagtctttattatgtttctctccacaagcagaaattattctttccactaaatttcactatgcccaccttgatagaagtcatcttcttgattcttcaagctacgtaatgctttcttcaattatgttcttccatacttgatgaaactttattcttgatcttcacccttgagattatgttgctttaacctgatctccaacctccacacaaacaataactttgaagaggttcaaacttgctcaaatgaatttgagttcatagccattcgatctctatgaagtttggagtgaatacaatctgtgtatgttagagttctctcttcactcttttcctctatctctcaactcac

SEQ ID NO: 239865 - DNA, 1071 bp, Cannabis indica
tgcacgattgagggactttgagaggggtaacaaaggctagggaaaacaaagctaataccaatttactgacagagagaatataaagataagtgatatataggtcacacttaactatgttgaacgtattatggggaagaaagaacactaatagacaagtgatataagggtgtagagagaggtatgaagacactatactagaccacagagagggattttggtagggaatcaaagcttgggcggttaagttatatagaggaggagcaagacaaagatatatactattgaaaacatgcactaacaccaggtacgtatgactctgtagggaatgagggatgttggagacaagattgtatgctgaagacctgctcatttgcacagctatacatagaaatttgcctacagagtaaatacaaaacgcagcagtagtagtcccatctgcaacatttaatgaggagtagagttgcttcctaggggatttgaatttaaaactggacagaacacatttgcagataaaatttaatgtggattttgaactcaaattggcaaaaaggattagctcccttctgtcgactgatttgagaggtttcccattaccccaaatccctttgaaggtacaaattccaggatacaatttaatgggaaggccaaaaatatacctaaattgctcaataaaaaaccaatttctctgagcagatttgacagtgaataggagaatatgtaagggaaaatcaatacctgtaaggagttcatttaaacctgtactggtcgctggattcgggaggaggccggagtaaatgttgattcgactggggtggttgggtttctgcaggggagaacggctcgcttggcttgggtgggtcgagctgttctgcgtctctgtggaagaggagtcggagccaccgtgatcgaacaatctggggcttggcatgggtttcaccgtgtggaaactgtgatgaattgagtgtgaacacgcctgagaagaagagaaatctctgttcatactgagagagtcgagagaaaagtctggaagttattatttagccaagagaatagttaagttcctaaaattat

SEQ ID NO: 239866 - DNA, 951 bp, Cannabis indica
atcgtcatgtcattttcaataaaaatcacttttcttttgccactcacttagggaacttggattctagttcctctgcctccaaattacaaaatcaatggttctaagtgggtctattgtctcaagcttaatcctgacagctccgttagttgttacaaagctcgtttagttgccaaggggtatgatcaaactccgggccttgattttcatgagactttgagtcccgtcatcaagccgacaactatccgattggttctctccattgctgtctccatttcttggcctattcaacaactagacatacaaaatgctttcttacatgaggacttaactgacactatctacatgcaacaacctcaaggctacgttgatgcttcttttccttctcatgtatgcaagctcactaagtctctttatgggctcaaataatctcctcgcgcttagtttattaaactcagtattgctcttcttttctggggattcactgcctccaaagccgactctttcatgttcatttttcactctgattccaccatggttgttgtcttgatctatgttgacgatattatcgtcacgggttcttgttcttgtactgttcaacaactaatatcatacttacatactcagtttgacgttaaagatctccatccgcttcatttttttttctagcattcaggtcactcagtcaccttcaagtcttcatctatctcagaccatgtattttcgtgatttgctctctaaaactggactcttagatttgaaatcggttgccactccaattgctcttagttctctttctatccatgatggcaccccactttccaatgcaaccgaatttcatagtctgattggtgcactccaatatttcactttcactcgtcccgacatcgcttactctgtcagcaagctatgtcaatttatgcatgctccaaccgacacacatcttcaggtggc

SEQ ID NO: 239867 - DNA, 1472 bp, Cannabis indica
gcaatatttttgttagtgggagctagcccccacattgatactagtgggtctgtgtccctgtacattatacaccaccattaaattttaattttttgagcatgactaagaaatttatatatataccattggagatacaatgatcatagaaagaggagaaatgctaaaggacaccagtgatcagtgatgattagaattctcctatttgttaatatcgttattggtccaattaagtgccgggtctcatataatttaatataatagtttttatggagtatcgctagctaatcgcaactcgacatgtcgagaaagtactaactaggcaccacggatgtctaatagcaatgttctagaaagagtcacttgctaatattaattgactattcatttatttcatatgggagaccggcccggtgtgtgtctctctctcttatatcattaatattaaatggtttggttagttgtaccaatcatgtaaatggaattatatgtaaataattttcgtatatgaaaacaaatcataaaggtgaatttgttttaacaaataataaagagtttcacatctttagggcactgctggtataatcttatttgagtttgttttaatacacctaaatcaacataattagacacagcaaagtaagccttgtaaacatcttaaagttgtgagaaaatgtagaataattgtactctttcactgattgagatctcgatcttcatatctttattattatctcattggagatatacaaaataataacataaaataatccaatattgtggagcactgtaaagatgcctgacacgtttggtagaagtaaccatccagccacgtgtataaaatagtatagtatatcgttgaagctcccataagaaaaggtatcaatgaaatataccaaaagccaagccaactaaagctttatagctccccgatatatagctctgctcaacttaaactcacttgcttccttcacataatatcataaggcattgctttgcttagagactctgaatatggattcagtcattgaaacaaagaaggctcacgcagtgtgtgttccatttccagcacaaggccatgttaaccccatgatgcaattggccaagcttctacactctagaggcttccatataacctatgtcaacactgagttcaaccacaggcgattgatcagatctaaaggactggactctgtgaaaggcctatctgactttcactttgagaccatacctgatggtttgccaccatcagatcgtgatgcaacccaagatattccatcattatgtgactcaacaagaaagaattgtttaggtccatttaaaaagcttttacataagctcaacaattgttgtgaagtgcctcctgttacttgtatcgttactgatgggataatgacttttgggatagaagctgcacgggagtttgggattccagaggttgtgctatggacagcttctgcttgtagcttcatggg

SEQ ID NO: 239868 - DNA, 933 bp, Cannabis indica
agtgttgctttggtgatgtgcatcccagtaccaaatttgattcttgttgacttccctaatgcacactgctcacagaactccaaatctggcaccagatttttcccaagcagcccttgtttgtcaagaatcccaagccctttgagactcacatgaccaagtcttctatgccacagcatagttgaattggtcatacttttcgaggccacagatgcaaagttgctagtggaatttccttgaagaacatagaccccattcatcatagcacctttcatcaataccattgctcctttttgtaccattagagtccctgattccaccttgactgagcatccctccttgtctaacatggccactgaaatcaaatttctctttatgttgggaacatgtctcacattctgcaattcatgtgtgttgcctcctgtcagttgcagcttcacagatccaattccaatgatctcacatgctctattgtccccaagtctcacgaatccaccatcaactctcttgtattccaagaattgatctttatcaggacaaatgtgaaaagagcatcccgagtctataacccaatcaacaccagagtaatcttttgaagcaaccattacacctgcactttcgtatccatcgaagtcactgccttctgaagctatgtcaacattcccatgtctcttgaaatcttgtttctttaattcaggacagtcctttttaagatggttagttttatggcaaatataacactttttcttgtattgagaactagaattgaacttacctctcgattgtccatgagagtttcccattgctttgtttccttttctgtcatttcttcctcgtacaatcatcagaccttcaccagaggtttcttccttcagttctgactttctttttaattcctttgacatcaaggcactttgaacctcctccaatgtcaaa

SEQ ID NO: 239869 - DNA, 2302 bp, Cannabis indica
cagagcatatccacttcttactgtataacacccatcgaaatcataatgccaacaccaacggtctctacaagcactacttggtaacagaataccaagtattatatctacatccattggcaagaatacatggcataacgctggtaaactccaacaaccattatcatcaatgaactccttaactaaccaatctaccccaggcttagatattataggacaaaaagctctaggctgcggcatccaaggatctctaaaagccttaaaatgcatgtcgtctcccacaaacatcctcaaccccttacgcagtaatccaacccccaaactaaacttgaccacaaatgggaaggccatttctatccttagcctccaagatagataagttctggaaatacttatgtttcagataacgaccaggtaatgaattaggctcttaaagtaatcaccacacttgctttgccgcttgattaaacaactccaaatctttaaatcataatcctcccttagactttcgctgacaaatattctcccatttcacccatgcaatttttttcttgtcattgttagttccccactagaactgtaatataattgagcgcaacttatcacaggtagccacaagaaattgaaatatactcataagatagtttgggaccatatcagcataggtagtctgttgtgatcatcaagtcatatttaatattagaattcaacccatccaaaatacttttctttcttgataaaatcagttggtacaattctcgaagccaacctagccaatctattaaactatgtcgtatattccataacctacatattctttttctgggccaactgagtgaactcttttttctttgcactacggacggcattgttgtagtattttacattaaatagctctttaaattcttcccaggtaatcgtggtgacatccaggtgagagataccatgtcccaccgaaccagggaatctttttggaattgaaaggtagcacaggtcactctattgttactagtgactcccataaagttcagaatccgattaataatagttagccactgctcaactttcataacgttcagacctcctagaaaaactggaggtttatgcttacagaatcttttatacaatggttccattcggttaacaacaacaactgaccccacctgaatagcaagggcaggagccacctgcacctcaagagcaggcattgcaggagcaccctactatcttaaacgccatatttcttcgtcttgttcattaatcctgacttgtatttcaacaaacttattttcccaatcctgggcagcctacggtgggttagcatcaccccgaccgcattccctaccccttaggcctttgcctcagccacaaatatttaggggaagctgaactccttgattgccactggatccaacagaattacccccgcttctcgtgttctgtctgtcgtccattgtattagaacaacttgcgaaatggtgagctagcccggttagatcgcaatcaaaattaaattctaattatcgcttacttgagaaaataaaacatgcacatatttaactatcaagctactaacatgcttcctattagactttttttataacataataataaacaaactactaaagtaataaaaacttactgaatcgtgagtcaagcttatctctaatgataattgtacatatcgtgatgatctttagaagataagttggagactttgataccaaattgtaacacccgattagattaggcgtgttatccaaatttaaatattgactgtgcaacagttgctaattaacgggtttattaaaattcatgtttaattaaaacttttcataatttaactttaaacttataataattaaatgttacataatctgggatcctgattttaaaagttacaactattttacaaaatgtacagttagaaaagttgttgcctagcaactgttaaaataaagtctgttgtcctaaagatcgaacgctccaggtctaaccgctccgatatatacaatcttcatctgctcatactcacagctgctcagccttagctttgcccttacctacacatataaataacaattgtgagtcgacaaaacttagtaagaaaaacataatcaaaacataaacataaatcggattataattaggcccccatacacccaattataaccctatcccacatcccacatgtactgagtctagaacgtttgtacgacagtactattgatcataataacatcctataatcgctactctagttgtaccaatgcaataacgttaattagtatttatgccaaacata

SEQ ID NO: 239870 - DNA, 820 bp, Cannabis indica
gcacatccctttgggtaaaacccgagtccccccccccccctatatacatcaacaacactctgaaaactaaccacgagctcttgtgcaccggagccacgagatgcctgaatagtaacccaagggacaaagagatcagagaaaaaaagaagaggaacaacgctccacagcacagcccatgctcgcgcctgagaaaggccaccgtaactcgccgtccccaaaatcgaaaggtagatagtccaaagaaacccacctacattgcctcccaccagtccaagaaactggatctctacccacgaccaccaaccttgggcttgagcacctcaacagagacatccatcaaccgtggtcggcggtcccttgccaaaaatctcgggcatcgaagggtcggtctcaaggaaagagaaggagggcagacgctcatcccctccacacattaccgctgctcgaccgaggaacttccgccctcaacctgcagcaacgagtagctaagaccctaggcgccaccagtcagatttggccggtggcgcccaagcaccaaaaaccctaaaacgggaaaagaaagaaaaaatggagcaaaccctaatagaattgagagagaggcattttactttgtaagagaatttttgaaaaattagatagagttttcaaaagctttaattttgcctttttaattgccttttgcttatttgtacaagcactttcataaaatgtaagactaatctataatcaccggtgacgtttggttgggaggaatataaatataggaatatgaatgagaatgggaatatgaataggaatggaatagaataaaatttaaaat

SEQ ID NO: 239871 - DNA, 1174 bp, Cannabis indica
acattactattaaaatgacattttgatacttaaatacaacaacaaacatagataaaatattttctctcaattccatctcattacctccaattaagcgccacctaaatttaaaattgaacaaaaacttttaatataagagaaatttaatttttcatcattatagggtaaaattgataattaaacccatgtacaatgtcatacatgtaggctagtttttacaattaatatcaattcttttctcttctctctattttctcaccatctcctcccccaacctctcattcattctttttactaaatatcactaaaatcttgcttaaaagtgaagattattgttgcaccaagcacatattggaggtggaacgaggtacacagtaagttgaggggaaccaccgaaagcatcaataggaatcaatgagtaattggtgtttttttttttttggttattatatttgttttagaatgttgtttagatatttgatttgtgggttactggtgttttttactgatttttctatagaactgttattctcttattttttttgcgattttatggtttatggtttttttttcttccttttcattaagcccaacggtgctcgatatagggacgatagaggtccaatagttccttcagttcataggttagggtgatgtcctgatggtgatataggtacgatgtagggtgcgataattttatcagtttagtatttaagagctatgtccgatagtgcctaatataggtacgatatatggggtctgataatttgttcaatttattgtttaggagctatgtttgatggtgctcgatataagtactataatgtgtctgttatgtgcatttttgctagcatgacacgtgaaaattaattagaaaaagtcaagaaatcgttaaggctaccctagtgcctccctccgtgctccgggaaggtacgatccctaatatcgcgaaacaaattcccgcacgagaagctttcccagatgcgagccccatgaagacgcccgtgagccagagactcactcgactatataagctgagaccctacgttcctgcaaggaaaatggatcttcaaccaagaactgctagcccgggatacaccttaaacccgcagaagctttgcgcaggcatgacaggctacagacccaatggaagagccctttttggtacgatgtc

SEQ ID NO: 239872 - DNA, 1589 bp, Cannabis indica
aaaaactgattaaaaaagtgttaccgaacgccacctaaatattttagatatttgcttattaaagttgtacatgtgttaagcccattgtacatgcaagtggggaacaaagagttgtagaggcaactgtcgtacacgtcccactatactgatgcacaagcccgttatgctgacgtgttgcatagacaaatattcttggatccattgggcctctattttatttttaaaaatactaatttcatttcttttgaggccttatttttacttgtttgtttatatatttttttagatatgacacaaaaatattattttattcgtaaaacaaagctcaatttaatcaattaggactcttgtaaccaacaaaaaaatcaatcatttgtaagtttaatttcaaaaattcaagcttactatttaaaattaatttaattaatgatatgctaatgaaattattaataatgtgaattaaaacatttgactatatataattccactaatattaatactagcatctcctaataacctcattggtcacttaggagccttaccaataaagaaaggctaattaggattttcgcccctaaactttgacatgtgccaaatcatgctctctgaattttttaggttgttaaaaattcccccccaaaatttgaatttgttagatttaagaacttttatctaattttattcaattttattaatatgtcaattgttcatgtacaattttatagcctaaaatttttaattacgaaaattagctagtaaagttttaaaattacaaaaataaactttgcttaacaaaaagtaaaaaaaataactaaaaaaaatgagaagttaaccccacgacaactataaattaactataaaacaaccagaaataactagaaaaataatctcatgacaactataatacatctataaattaaccatcaaataactaaaaagtggtttagtatttttactgaaaaagtatttttataaataaaaaagttaaaatagtaaaaatattttttttttcagtattgacttatttttgtaatttttagtttatgtaattttttcttaaaattacatataatttataacttattcagacaattaaaatggatgcagttcatacaatagctaatatttaatacactcaaattcctacttgggaatattttatatcttgctaatatttattaattgtgtattaaagaattcttgtttaaggtttttttttttttttttttttttatttttttattgtaatggtaaaattagttgactaaaattattttttaattaatatgctatttttattgagcaattaattgattttattgtgttaattttgtgcctctaattgctcattttctttcatgcaagaaaataattctctttatgaaagttgcctatttttggaaaacttgtattttcttttttttttttttgattgattgatttcagttttgcctatgtttttagcagatcaaataatctttggctaggtttaacttaccaaaaaaaaaaaaaatctttaggcaggaataaagaccaaatcataatcttggacttgtatggaaagttttcttattttgctctatgctatg

SEQ ID NO: 239873 - DNA, 879 bp, Cannabis indica
ttagagttagtttgcactgtgttagttatattcttttctaactaattctgttattcttactgctactgtaattgaactgtatttttctataaatgcaatagaagagcctccaatggaggtaatgtttttcccatagttttgagtcttcgtgttcccctgttctcccatgttctctggtttatttaagaatcaagatgaattgataacctcaattaaattttacttttatgtgccgtcgttattaatatatagaagtttaccatagtagtacaagagattgccaaaatgatcttattttaatgaaagaaataggagaagtaataaaactttgtatttgagaggcgatgactatgatcataagtatgataatgatttaagactttgtatttgagagtgtaagatgaacagaggtatcagttttggatcaaagaaaactccatttaagtatgagactatgtttgttgccgtacaaagtcttgtttgttttgcaaaaatgcgagggatattcgcctgtcttgtatttaatctttaagatccattaatttgaactattatattggttcctgaatgtgccgaattatatttcgtagtaaaacttgatatttgaattcattgcaattgttcatgagggtgtcatcaaggatatataggtcatcaactatctccactaagacctcaccgtttcgttcttggacactttttcaaaaatccttatactaatggagatatgtccatctttatatagtcacgatctatctatttttagctaatgtgggacttttatttgtattcccaacagaggggtctttcaaggcaggcttgtttatataatatatgatggaatttgagatggctgtataggcttcgtttgaacaatta

SEQ ID NO: 239874 - DNA, 1519 bp, Cannabis indica
gtaattgacaataaatgggtatacaaaaagaaacttaatcctgatggctctcttcaacgttgcaaagcacattgagtagctaaaggttacactcagtgagtgtacctggtatcgattattttgacacctatgcccccgaggccaaattcaacactttaaaactcatatttgctttagcagccattcgtgattgaaacttacatcacttggacataaacaacgtgtttttacatggggatcatgaggaagtttacatgaaacttccccaaggttatcaaccaaaacaccccattccccaaaacgctatctgcaagctccaaaaaagcatatatggtcttaaacaatcatctcgccaatggtatgctaaattgagtaccacattacttcaacacaattttatccaatccccaaacgatcactctctattcattcgaaaccaatctggtatattcatggccctcctcatatatgttgaggacatagtaattgccaccaagaacatccctgccatgcacaaattcattaccactcttgacagtagattcaaacttaaagacttaggccctcttcgttttttccttggcttggagattgcacgttgttcaaaagggatatcaatttcacaaagaccctttcctctacaacttttacaagactcaggctgccttggttctaaatcggtttctacccccatggaacctaacaacaaactaagtaaagatttaggagaattactccaaaatcctaccccatatcggagcctcatagggaaacttctatacctgactatcacacggcctgaccttagatttaccgtgaataaactcagtcagtaccttcaagccccatggctccctcaaatggaagctacaacacgcattctacattacctaaagaactccccaagacaaggcgttttcttctatgcttctccaactaacactattcagctccaagcttttgccgatgcagattggggagcatgcctcgacacacgacgatctataacaggctactgcatttttctcggccaatcactcttatcctggaagtctaagaaacaacaaaccatctctcgatcatccgcagaggcagaatatcgagcaatggctcatgcaacttgtcaactcacatggctcaccttaattctcaaggatttcaacatcaacatgtcactcccttccacccttcactgtgataacaatgctgccatccatatctctgaaaatccagtctatcacgaacgaacaaaatatgttgagatcgattgccatacagttcgagaaaagatcaaccaaggtgttcttcgaatgagccatgttccatccaaagccaacttagcagacatacttactaaacctctttttcccagtcactttagagatattatatccaagttgggcgttcgagatctatacgctccaacttgaaggggttgttcagagttagtttagtccaagtctgttatttttctggtttttaccgtttattctgttttttctatttttctgttacaagg

SEQ ID NO: 239875 - DNA, 1377 bp, Cannabis indica
tggaggagtggctatgttatggaaacatgaggaggaagtccaattgcttggttatggtccaaactacattgatgtagtaatagaagctagggagagtgggagatggagattaactgggttatacggggagccaaatagagcttaccgtaagaagacttgggatcttatcagcggtctaaaagctaagtatgatttaccttggtgcattgtgggtgatcttaataatgttacatcgcaacaagataaacgtggtggaaatccatatccgaactggttaattgaaggcttttgtgggatgctagatgagtgtggactccatgatctagacttgagtggttacccgtacacatgggaacgtgggcgtggcacggatgagtggattgaggtgcgtatagaccgagctctggtttgtcaaaggtggttgagtttgtttcctacggtcaagctatacaacttggaagtttcaacctcggaccattgtcctttacacttggtacctgcaaacttgagtcatacggcttctactaacaaagtttttcgttttgaaaattgttggctgaaagagccatcatgttataaggtggttgaggatacttggagtcaatatgaaggaagttcgattatggaaaagattaagggttgtggagaggttcttgttgaatggggaaaggactactcgggtaattttaaagcgagaatcaaggaatgtaaagatgaaattcgtcgttggaagaatgggagagactcggtggcaattagtagttataaagcagcccaacttaagcttaataatgtgttactgcagagggagattttttggaaacaaaggagcaagcagctgtggcttagggaaggtgatcaaaactcgaagttcttccatgccaaagctactgctaggcggcgtaacaatgctatccagaaactaagagatgatgtggggaattgggttggttgggaggatgaacttcctactgttgtatctacctatttctctaagctttttgaagctgaagccgtggactttggggctgtacttgcttgtatacagccccgtataacagcagttcagaatgatcagttggttagtgatgttacaagcgaggagattaaaaaagccttgtttcaaatgcacccagaaaaatctcctggaccggacggaatgaccccgggattttatcagaaattttggcacattgttggtgaagatattattactatggtacgaaactttttctctactggagttattcctagtgatttaaataagacaaatattgttttaatccctaagaaaaaactccctgaacatatgagtgatcttagaccaatttccttgtgtaatgtcttatataagattatctctaaagttcttgctaa

SEQ ID NO: 239876 - DNA, 1305 bp, Cannabis indica
ccagtggtgccctttagcatttccgaaatactagagagaaagtggtagagaaatgggcgtaagcctagcccagcccagcccagttaaaagagttcaaaggctttacccgcattacaaacacaaaagacagatgtattgtaatgagagtgagctttgtagagagactaagataaagctgtagagaaaaacagaaaactaaaaaatagatttttaatcaaactaatgaaggtactgttacaagtttataactatggtggtataagaatcaaaaaaatatacatttgtgaatgaaagtgataacccagtatagaaattgatacaacacatgtatctcataaactaactcaacattctccaagagacccaagctcccaacaacaatcttcatattggaacaatcttgtgagttatgttgtttagttgaaattaatgttagacaatatccgtctagaccctaatgaactatttagctactcatgttcattatagcaatttcacacatattaaattagaatagaagaagaagatagagaaaaaaataatgctaaaaactctagtgagaaagctttcaatatcgattttgctctccaaaattcgtactccttgattgcttgttgaaaactatgaaagttcacttcttttatagccaaaaactgataaaaaaataaataaataaaagacgctgaaaacctatttttttttttctcaggattagatagccttttccaatcttttccttcttctattttgtttgtaagtcttctcaatttcaagatcaatatgcaatctggcaattgcaccttgacgtctcataaactagttgaacctgagaaaaaaagataagaatttgaaaccaacagaattagtactgaaattgaaaagaaaaaccaaattagaacaaaatttaatttttaataatattaaataacaattcccggtaacagcgccaaaaacttatcatgatatttgcaacacgcaagtatacgtattattttaacaagtaatactcacaaagagtaaggtcgatcccacgaggattattgttaagtatgttaaaattaaattcttatttctatttggctaaataaagtttgaagagaaaatttaaatcaaaaaaacaagaaaaatagcgaaagtaagaagcaggtaaattaataaaggaattaacaatgaataaaagatagggctttcgatttcagttgcatctattgattatggttaaatatgattctattcttattaccaatttcaatgcaatagcagatttactaaggtaatttatagtcttctcagatatataaatct

SEQ ID NO: 239877 - DNA, 1354 bp, Cannabis indica
gactaggactaccgatgcttgcttaggaacatccaaggattcagaatcttcacatacttggtatatcaggtaagacagtagttagcatgtagagttaagcatggtggcactcatgtttggtattatgctagtgattaggtgagaaactgtgattaggttattaacctaaagtgagcggttatatggtctagggttattaccctagtgattaaataattttgaatgtaatgccatgcaatatatatgttgagataaagaattatgctggtaaggcataagaagcagatcactgtgtctaagtcctctgttgaagtccaatacaggtcctagctaacaccacgtgcgagatcctttggctcatcaacatcctctctgactttggaatcaaacattcacaacctgctaccctctactgtgacaaccaagcttccatacacatctatgagaattctgtcttccatgaacgcaccaaacacattgacattgactgtcacattgttcgggaacaaatcatcaaacactgcatcaaactctcccatgtttcttctcaacacaacatagcatacatcatgacaaaggccctcttcccaacataattcaacacattattgtccaagatgagtgtcaccaacctcaacacctcatcttaagggggagtgttagaaaccatgagtgagtatgtgagggtgcactctgtttcctctgcactctactgcagcatagtttaattccctgcaactgacaggttgttattatgcaatcattactgagggaatattatttcccttttcggttatgcattattttttgtgtatgacacttgtcactattgtattgattcttattgtattgtaaatgcctatttaatgaaaagttatgcatcagtctcaaattgggctgagaaatccattgctgcattttctctaaaacttaacttggtatcagagccaatccggccttcgccaatgtctacaggtaactctcagactcccctccaccctaccaatcctaaccagagtaatcatggagtcgttactggaaatggtagcagctctaatacctacactcacaacttcactcaaccctttaataccctaaacctaccattctctctcaaactcgatcgcaacaactacacactatggaaaacaatggtatcaaccatcattcgagggcacagactcgatggtttcatcaatggcacgcgcccctgtccaccaaagttcataccagcaccaacctcaactgaagaaaacctaaagtttgtcttaatcccgactatgagcactggatattcagtgaccagcagctcatgggctggatttatactcaatgactgaatctgtggctaccg

SEQ ID NO: 239878 - DNA, 1364 bp, Cannabis indica
aaaaaaaaaaaaatagttataaacgagcaaaaaaataagacccccaactcacttgctcttgtctaatcccccaagtttcccatttcatttttcttgatttgaaagacgaagaaggttaagtcgacgtttaaagatccgtggcgacggagaaagctctttatttttatgcttcttctttcttttccccagaaaattccgtaatacagaagagggttctggatttcagagtcagtagttaggttcttcaaagtgtgcagggctaaagtcctagtcgagtccgttttcaaaaaatgattgcccagcgccgtgagctgcaagattcaacccttcgttaagaggttacgtttcctagcactgaaatataacttgaaatactgcaggggtcttcattttcaatcttcatctccaacaagtctccaattttattttgaatagtaagaaataagtttgatacggatttctctgtactgtgtttcttattaattttcatagttgatttaatcatatgatatgaatgtgcttatttatttgaaaaataacctcaaaaattacagtaagcgactctgaaatttcctaccacttaaatcactgagcttattttacaaatttagttagtttgacaaaatccacatatttgattctatattatctactgtttttctatcagatttgtaccacttgtttaaatcaatttccctttcatttttgtttgcaaatgaaagagagagcaaagagagttccaaaatttctcattatgttaaaatcattttttgtatacacttggggtataagtccttagctttctttctcatgatgacttttgtctttctcacaatttattaactgattaaccctagtgtgtaatttctatacgttgtaaacatttctgaaagatgattcggtttcattttttgtaatttcattagtttctcttctctaatgcaaataaggtattttggaaaaatgcctcagaatgacacgattatgttgtttttactctctttttcttttttgttttgcccttcctcgggattaggcgttttgtgcccttctattgtttttgttttgtatttttttttttaaatatttatctatgcagtttgcgaattcatccatttgatttgggcttttaagatatctgatacagttattttgcatattctgtatttggactaaatttagttatttttgtggttgtcttttgatagaagaaagacctttttttaatgattaatgcactaagcgaaatttgaagcttagattcaaaagtctcacttatgatagcttttcttcatacatcatttttcatattctagcttttactatttggggtaactatatcacttgtgtaatatttaatatta

SEQ ID NO: 239879 - DNA, 603 bp, Cannabis indica
aaaaaagaaatattatttattaaaaaaattaagtaaaatgtaacgacgttgtcaattaagtacaccgtaaagttgataaaaataaataaaatttaattatataattttatgtggactgttttgggtgttttggtaaattgaaaagggggaggagtgtgatgaatgaaatgactaaaatgaccttgggtgaagtgaggtgtcaatgggttgtattgggaaaatgaaaaagggtaaaaagtgaagatatggtgccggtcataacgcaaaggaacttgattttcaacccaaacgaggagaatgtaggagttcgtgaatgcttacttaactcttataccaatgtcttaactcttaactaaaatacataataaatatactaataataatattactaaaaagaatacaataaaaaaaaaatagaataattatatgactcacccataaaaatgaaagtgaatatcactatttactttgaagatattttgtatcaaaattaaagtttgaacatttattttatacagatgtaaaattaattatttgattctatttttttattgtaaattataaatacataatagaagcacctaataaataagaaaaatatta

SEQ ID NO: 239880 - DNA, 2357 bp, Cannabis indica
ttttttttactataaataattgataagaaaatttaagattaatttatttttattcatataatttagggtaaataccattttgaatcttgtattttgtaaaagttactaattagaatctatattttattaatcacaaaatgtactctgtatttttgaaaaatgtacaagtaggaccctgaattgattttttgtcaaaataaaacttaataataatttgatctaaagatgttatgacaaatctagttacattttctgtatctgttcgtgttagaaattatcttaaagttagttatattaaaaaataaaactgttaaaaattgagtttaggatcctatttttaccattttagaaaatatagggtccattttgtcatttaacaaaacagagggtctaattgataacttttacaaagtagagggtccaaaatagtatgtatcccataatttagttaataagaaaatattttttagaactttaaattaaatatgtagcactgacaataacacatcaactacattgacatgttttagcagaaaaaacttcaaggggtacgatacaatcattgtaatagttcaaggttataaaacttttaaatagcctaattttattaatattttctaaaaagaaataggtaaaaatacaattcgcttaactttcctatttggcctctcctcgggtttttgtctggttccgccactggccggtcctgagttgaaatgggcctatccataggtaaaaaaaaattagggcctttactattaagataaatagtatttttaaaaattattaaaataatatgtatatttgttaaaatgtattttcttatttgagctcctaaaatgtgtgggtcttaggcgcatacctaacccgcctatgcttagagccgaccctgcataacacctgttgtacattttccccaactataatgatgtgcgtacgagatgtcataagtgaacgatatgctgaaatttcggtaaataaatattgttaaaattacacccgaattaatcaaaaaaaatacaaaacaaataatagatgactaccaataatacaaaacctatatttttggtgatattagaaaatgattacctaacctttatgacataatatgaagcaacatatatagacaacaagttaaacaaagacagtggtaaatttcaaaaaaggacataaaatggtatttctcaaaacctatatatttttttgtgtgtgataacctttgcatcataacaagaataagaaaccaatacaacttatattcttagtctctctctatattactattaaccctaattatgctctagatttgtcatgtgtcatgtcttttttatttttagctttgcttgtatttattcattgtatttcgaggggtgtgcataaattatccaatccaataacaaccgaccgatctaattacaactgaccgccaaacaatattggatatccaattgtgatcagatcagattgaatgttatttttgaaaatctaattgtgatcagatcggattggatgttatttttgaatatccaattagatcaaatcggatgtaggatggggtgtctaaaaatttaatacacccaacatccaatcgaactaattagtattttcatttactttggatgagtaattagattttatattgttatacataaaatatataaatatataaatgaacattaaaattttactcattttttcttggattggatggatccaatccaatccaatacatactagacctaaaatattggatggatccgatctgatccgaaaactactaagtctaaaatattgaataaacttaaattaaaataataaatatatataaaatacatccaacggatagaaccgatctaatccaacatccagtggatgttggatcaattggatgactgaaattaattggatcggatcagatggtaaaatctaatattcaatatacgattgaatcagatctggatagacctaaaatattagatgtggtccaataaacacccctaatttcctttatatttaaaatataactttaaattcttaattagaataagattagtttaaataaaatattgtcttcaaaacataaaaataaaatattatgaaattaaatattaatttataactagttaataattatataatttgtaactaactagtaactaattttattctaaattattaactagtaactaactataatatactaaattactaactagtaactagttagtattaatttaatagttatcataattctacagaaatttcagcagcataacgtctacaatttaacgttctcaaaaaaatctaaagctactaataacaacaaataataatccaaaactagattaaacaatcat

SEQ ID NO: 239881 - DNA, 1554 bp, Cannabis indica
tgttgatgaaaacccttagcaacagacgagctttaaacctgtgatgtgtcccatcagaattttcattttccctgaaaacccacttgcagcctatgggagttctgccttctagtagaggaacaatagtgtaagtttcatttctggttaaggataacatttcatctgtcattgcttgattccattgtcttgctgcaaagcctctttcacatttcttggaattttggtagtgagataaactttgggcttatgaatgccagactttgcccttgtctgcattgcatgagcattggtggtgatttctggttgtacagcagtagcagaaataggttcacaagcaacgggtgctgatgttcgagtatcagatgctgaagcaggagcagtatgagtaatttctggtgctgcaatatctgttcgaatagtagcagcagctgatgaaccaatgttggtatcttggacaggagcagggacaattggctcaggtgcttgctgctgagtgacaccagtatgtggcattaagggtgctgagttgagatgttcctgtgaattaacagcagtgcttgccatagcaggcaagacattgttagtgctaacaggagtagtattcaaacatgtattagtgagagggatttgagctgaaacagcaaattcagagtacgagtaagactcattgacagatttagaaagagaggcaaaaggaaaggatgtttcatcaaagataacatctcttgagatgtacaaccggccagatgaatcaaggcatttatatcccttatgatttaggctatacccgagaaaagtacatggagaagacctgaattgtaacttgtgtttgttgtagggtcgaatatttggaaaacatttgcaaccaaaagttttgagagtagtgtaatcaggtgagatggtgaacagtttctctattggtgatttgttttgaagagtaggagtgggtagcctattggaaagatagacagaagttctaaaagcctcatcccaatatttgagtggcatagaagcatgagcaagaagggttagaccattttcaacaacatgtctatgttttctctcaactattccattttgctcatgtgtagtgggacatggatgcctatggatgataccaaattgttttaaatggtcaataaaggacctgaattcccctccccaatcggtttgtaggcacttaatctttttcccaagttgtaattcagcctcagttttgaattgcaaaaatgtttttaaagcttcaaatttgtttttaagcatatagatccatgtgaatctagaataggcatcaatgaaatggatgtaatatttatatccatttaaagaagttgttttagcaggaccccacaaatcagcaacaattaattgcaatggttcattgtacacagtaagggaagcttttggaaagggtaatttgtgaatcttgcctagacaacatgatgaacaaacagagaaaggatttttattattaactgtgagattacaagattgaagcacatttttgacaatctttttagatggatggccaagcctattgtgccatatatcata

SEQ ID NO: 239882 - DNA, 1553 bp, Cannabis indica
aataacaatttgagggatcgagttctggaaaactcggccagagatcactttggccaaacactaattcaaaggacacttcgcacacgatccccacgagatccgtaagtacataactgaactaattaaaacaacatatatatatttatatatatattacatactaccatcatttggttcttaactaataataataattttttcccacactactccatcatatattaggtacaggtcttttttcaaaactctcgattgattcctctataaagtatatatttatatatcttacttctttttcgaaatattgaaataatatgactaataaagatgatttgaaagagcttggatattcttttcctccatctctaaactctgttatttgtaaatgacttatctgtttaacaagtttttatcctaaaaaaaatgatttgaaagacttgttcttattttgattgcatgagttcagttatcttaacttttgtttcagtgtactagtacagcggatgaaacttatattatattaattaggcaaaagagtaagaatgagatctgtaccttatcattttttaatttttttttttattcattattatatatttttaggatttttggttcttcctctaaaacataactaccgagcctctctttcttatcgatcgacatgaccgtatttttatttttttggtaaaaaaaattgtatatgtgcactgtgagtctctgcacatacatatcattagtattactttataatttattattatcattattattaaaaatgtgttctcttctaattatgcaggtttgttggttaattctttgagtacgggtaagcttttatttcggcgatctgtatttttattcagaccttttgttttgatcttttgttggttttttgtttttaatattagaaaaataaaaataccttctaaaattatattttataaaaatagtttttcttttttttgattgagaattaaaattttaatttttttaaaaaattactttcaattttttttaaataatttttttattaatattttacacacccaccccaacctagacttgaaacccaaactccgacccaaacactaactcgaaccccgattccgtttcggacccgacttaaataaaatcaaataaaaataatgaattttattgaacacactttcattttttatttttaaaaattaaaaaataaaagtaattgtagattacattttttatttttcaacaaaaattttgtttttatttttgtgattaaaaaatttaaaaacaaaagtgttattaaatgctactataattaatttttggatcagagttttgtttaaaaaaattaaaagtaagcccctaaattaatttgagtaaatactatttcgaactttttaccccctattttgttgaataacaatatagattatgtattttttcaaaaattgtataaatagaaccataaatatttttcattaaaataaaacttaataataatacgatctagatgtgttataacaaaatgtttacactttttgtatctgttcttgttaaaaaattccttt

SEQ ID NO: 239883 - DNA, 1263 bp, Cannabis indica
tttaaaaaacaaaaaaaaataatgtgtatattaccaactaaccattaggaacatattttttgtgtatttgtgttcttatatttaattttttacctaaaaaacagtatatcgaaatgggtataagctatgaaaaaatttgaatacaaattttaataatttgaatccaatatacagattaatcatacacccacaagcccaaaaatttacaaacagttaacccaaaacaacaaacaaaacacacccacgagtgtaacaaacccagaaatctaacaaacctatgaagaatacagtgggattattcataaagtttaaaacatatatcaaacccagaaaattacaaacaaaaacttaacagaataataaaaaggaaatcaaatccttcatgaacgcggtgatatctagcgatcttcaaatgccaccaaacacgaagcctcacaccatgaacaccgagatgtaatacgagcatcaaactacacaataaacaatgagatccctgtaaagaaaagagagagcgagggagagagagagagagagataaatgagcaagaacagaggtcgacctttggtcagaacactcaaatcttcagtagccatccggtgttctaggcgaggcagagagaccgatcaacccaaaatagccacccattaacatcgttacaaaatcggcgagacccactggaaagataagtcgtccattgatccgtttggacgttcttccatctgggttgggaaatcgcggccaagctcaccgtctgtgtagaagacgattcctcatgagccgtctgttggcatgagagagaaggggcggtttaagagatgaatagactttgcacaattttagggtttcaaccggccttataacttctcaaaaataaaatccttttatttatattacttttaatcatttttagcatattaaaaaaacattattttaattttttttattgaaagtaatgaacattatttaaacttttgattgaaccgagagaggtaatattataaattgattttttttcaatatactgtgtatagcgtcactatatgcatgactgcaaaagttattccagtcacgcgtggagtgacgtgcaaactaattattttttcacaaataattaaataattaaataacttttagtgacacttcatatgttttagagtcgtgcatcttgggacataaagttaaatgtttagtgttgaacaatgagtgtcactaaaaattatttctatacatttagtgaccctcacctttaagcgggtcactaa

SEQ ID NO: 239884 - DNA, 2177 bp, Cannabis indica
tcacccttcaacttaacctcacgcttatgttgaataagctctttcacttgctctgctccctcagcccagccagacttggacttcttctacctccccttcacaagctggggtataaagtctgccgaataaagcttgtacttcacaaagttgtcgtttgaggtcaacaaagtgatatcctgagcaacatctgacagctggagaattttctgggccctttacctaagtcctaatgtgaagggtggacgtcaatacacatggatctgttggaaccgagtataggtagcttgcatgccctccaccaagtaatactcttcaataaaacccccaatcttgccaaccaccgtgtccacggtacctgtcagccacttgtagtccggctgagagaaatagaagtaccccgacctcctctgcttaggtgtagactttagatcaaaaagccaatggatgtcatgcagggatggcacaccctatccttgagtggcacagaggatgaacagggcagataagtacttgatgcccttgggtgtgaattgggtcagacagaggcggaaataatctgcaactctcttgaagtatgagtgcaacgatagtattgccccttgcttagtgtgggcaccgatcaggcacaataccctttctttgggttagttgcttggtgatttggagaagggagataacactctagttcgccccagtacccagccttatccaattccctcaatcggccctcagttatattggacgaaggacacaccatctggcccctaaggcactttgcctcctgtgggggaccgcctcgataaactcttcggttacatagtcttcctcctcaaccaagacgtcaccttgctcagatactttctcccaagccttattatatcctccaaaatatggatgcccgaccactcctttctcctcagccttggaagggcgatcatgacggacatcgtccttctcctttatctcctagacctcaatgtccccacatcatcctccaccacagcgagcagaccctgttcggtacttggcagcgtggcaagctaggccacgtgagggtcagatgcattaactctccgcattgtctactttgtgcgggccatcatccttctcttggacagatgctggtgtgtatgctgcgcaatagtaatgacagggacagttattggaataccaaagttaccagaacttggacgacctacgggaagggtatcagcaacactagggcggacaatatacgtttagctagacagaagataacgtctccaacccttctttagttcccaaaaaaagtgaccgtaacattctcttgcaatctgctcggagtaagagtggtgttacacttcgggttctggagtaggagaacgttcgctactcacatcccaatcctcgaaactcaagttagaaagtccatcactacaagaggacggactggcgcgaagacaaggttggtcctcgtacagaagttgaagcagatcctggtcaatacggtgttcgtctccccaaaactcaccagggttcatctacaaaagaaaatacacaagatgagtatttggccaggatatcaaaaaaaaaaggcaaatataccgaccaggtctactcatagattaaaaagacgaagaacacgtgaagattaagttataacccaggagtttgaaagttttgggttaaaggataaatttcacgaagctttgaatgagctaggtgagaatcaaacatagcgagattaaagacaaaatgtcgtaagtaacaaaggcgtacgaactataacagagaaaattacaaaatttcaagcctagattttctacgtatctccaacaacaagtcaagaacaaccatactttctacaatggaaacctagaaaattaaagatataaagttaaaggagaaaaacatcgaaaacttactaacagtttgaagccaaagcttttttcaaatgaagttgttcggatacttcagctataaatctcacgataaacttgaaagaaaacacctttttttgctctgaggttatttcgtgaagaaaatggtaaaagtaacttatgaaaagtttcagccctatttataggctaacttgtgaaaaggggtaatcaattcaaaatcctcagatgctttgatttcccccaaaagtaaacattgggaaattaaaagcaatcacactactacaaaattaagtttta

SEQ ID NO: 239885 - DNA, 1255 bp, Cannabis indica
accgacgtaaatagtgtaatttgtagtagtgttaataatgtatatttatatttatggtaaatatacctaactactattaccattgactagagaaatgcttacgtgtcaatatcgtgtaattaataataaaattttatataattaaatgtaataaattttataaattatcgctaatcaataataaaataataaaataatgacagatccatttaaaaaaaatatattataaggtgatacgttaattttaattagtgttatataaataccgttttaaatgaatttttcctccaatgtttatatatttatatacatgatctcaaagattagacctttaaaaaaggactagtagtcgtcgatcgtagcctttacttatgcataatatgaaacttaatttgcaattgaagtcgattctcatccataaatttaattaattaaataaagagtacagtagtgttggatgttggtaatgctagctgagaccatttcagcatcatccgttatacactctctccactctccaccctaattacttaagtctcaaataatgttataagggaaaccttttgccggaaaaggccgcaacatatacaaattaaattatatataaaattgttggtagcctacactttttacctgtattatatattatttatatgccaactcggcaatgacgtgtcctacctttactttgcccatgtttgtaggagcgtccaatacacaagctcaaatcaatgtcttccacaaattaaagcctctccaatggtttgctaacaaattcagtgagtaaagttgtgacttttccatttgcaaaatctttccacatttacagcccaagttcataacttttagcctaataatttcgctgtcttgacctcttcaactcctgtgatcatcaacgtatacatttatatatatggccatatgggttaggtaatagtcctacacattattttatgcattcacttgtttttttttttccttttaattaatttctagtttcatacttaaattatcacacctcctttgattaattacctgcttaatatctcatataaacccatgtatagtgttgagacattgaaattgtaattgccatgttgatatttaagtaagttttggataaaaagcgtatatataaaggttgggtaagattcacactactttatttacgttgtggcagagattttctagaatttggcgcaatattcaataattataaaatagaaaaatacattacatatatatttttcctacc

SEQ ID NO: 239886 - DNA, 2409 bp, Cannabis indica
  modified_base (2269)..(2269): a, c, t, g, unknown or other
cccattttagatccatagcttgcaaaatcacagcaaggtctttctcgttcgtcctaagcaagaaaaaatcaattaaagcaccacttttagataatataggctcttttcgagattgagctagtctccttatgcaaaactgcaatttcattcagcataattctcaaaatttttacaacttttatttatattgagttgctaacaaactattgctgactgaatttgggtacacatccacaatccctcaatgttccagcatcatcacaaaatctctcatcaagcaagctctacaaaaattcttacttttagtcacgataaaatttgtgactaaaagtaaaaaaaatgtaactaattatagaatatcattcttatgctgtgactaaaaggttcgtggctaaatgtattagctacaaaaattacaatttgttgtgactaaatatgttttaagtcacaatacttgttgtgactaaaattaaattagtgacaacttataacaaaatgctatgttttagtcataagtaacattttgttgtgactaaaagtcacatttagtcacaaaaaatttatgttgtgagtaattaaaagttgtcactaaatgtagttattttttgtagttgagaacacactcgctctgtcttgctacatgctatttcttcttctcttttactgctggtactgtcgttctcttaagttgtaatgttgcaggtgccttctttcatttggtcttcatcagtaggctgacccgagtccctctcccaacttcccatatgctcatgtattacaacagaacccaactcaattggaccatccttttgggccttctgacagtgatcgacacctttatttgccgaggcaaattgtatgctagctttgccatgaagccaagtatatttccatttaattacttgcttcccatgttcaagggaatatattcattcaaaaaaggcatttaataattgataacattattggaataaagtttaggtttctgttgcctctttatgcagatgtgacaacaactaacaattgtctttccttatctactcatataacgaccagatatctatacttggtaattagagcataattttccaaatttaattatcattttaatcatgatcagtcttcattaccaaattgaagcttgttcatttctttaactagtagtaaacactgactgaggtgctaagactcggatccaaatcttctgtccctaatttctgtctcatctcctgtcccactaattgtattttgccacgtcaattaaaattccatctgtatatttaacagagacttacatcagttagctccgtttctttgtttttctattatttaatatatatctttttaattattttcaaaaaaaatatatatctttttaattaattatcatttcacatctctttttaatggctcactaagcatcgcaactgtcattactactagcattttataaaagaaattagtaatcaatcaatagaacatatctactctattacatgataattagaattatgacttttaacataatttatctactaaaaatctaactaaaccaactaaatcaaaaagagtcaatttgtagaaaatcaattcacggatctggttctagaaaaaaactcaaactcttctaaacaatttgagagcaactatacatgcaaatggtagttgagatttgttacagaaaaaaaaaaatcagagacaaactaatgcaaacccaaaagactactaaatttaaattgcacactagactttttttttagaggtgttgtatagattgtaaatgattgtttgatgcaatacacagttttgatttataaaaaaataataattaaacaccttcagtaaagcaagatattgaaaaagaaaaagaaataaagattgaaacagatgagagtatcgcgaattagaggaaaaaagaaagagatgatgagagaaaggagagagagaatgatgatatttttttcattaaaaaattaaataaaaatcaacaaactgagctacttgatacaaagttctgttaaatatattggtaaaattttagttaagtggcaaatgtaattggttgggacagaaaatgagacaggaattgggacagaagatttgaatccctaagactcaatgttttgctcagcattatttgcggcataaatattatatcttttcaattgcatacgcttaacacattttttttgatggattaaatactatgtgttattttaatttctacggattaaatatatatgttatattattttgtttgctaaatttntataaaatctcactaaactaacttgtatcaattaattaattggtgttcttgagcagtgatattgtgtttctgtccccttatctcgaggtgtcatatttctttgttttatgggtatatagggtactcagtctttgttggaa

SEQ ID NO: 239887 - DNA, 983 bp, Cannabis indica
acttgaacaagaacttgacctttaaaattattaataataatacagttttacaaacatattaattataataattatatataaattattcatttaaatcaacacaagtacaagaataacatataatataattaaggttatgaaatgcagaaggcgtagagtgaagttccagtggtgaaagaaaggaaagcaccaagactaacattatatccattcccaacaaaaatacacccatcgctcactgacatgccaccataaactgatgccccaatctcatatgaccacaaaatatgtcctgtttttgcacttagagcatatatgggtccttttttatgtgtggaaccaccaaaaaccactccattagccacagtaacagggccagaagcagtgtcattggtaggattagctgttgaccatagaattttgccactgccagcctccattgccacccaaccaccaccagtagtgttctttgtagatggctttagagtgaaattttttatctcagaattggcaatgttagtgtacaccctcttttcgtccgtggcagctccccagtatcctcctccagcagcgccaccaggtccagcctccttattttttttttttttgaaagtaacaaacaaattcattgaaaatatatgaataacgttatacataataactacatacggtaatttttctttcaatatttatatatctcttaatctaattagtcttaatttggttaaattaaaagcaaaacactatcaaatgagtcttatataggggtgtacaaaatatgggccaaaccattcaacccggtcaacccaacctattttttgtagtaaaggattatgttaagagtaggccatggctcattgggttgaaaaatgataggctatataattatgggttggttatgggttgatcacattttaactctatatatataacccaaactaactcatttcttgaaagattttccaaatttgagacaactttca

SEQ ID NO: 239888 - DNA, 2203 bp, Cannabis indica
acacacacatcaaaataaaaattaaaccataaatgaggatttatgttactatttttcgaatttcaatatttattagcaacaaatttaatattttaagtatttaagtcacaaattttttaataataaagttaatttttaatataattttattaagtaattcttattaattaaaatgtacgatttattttttttatatataatttaaaatattttatatatcctccgcgaagcgcaggatattactagtttatagtatatagttttgaagaagtatatgtttaccaaaatgattaaaatatgagagatacaaaataagtagatactcaagaatcaagatatttgaaattgtattcttttacaatagagtataatgtattgtatatagtcaatcaaagacttgaaaattcaaaaggcaagttagttttattctatattaggtctagcaataggtcaaatccaaagtggcaattttgtttttaagtttaacttcaatcatcaaaattatattaaacattcttttctcagcatatttctattcctctttcatctttttaatgacacaaaattaaactaagcaatatcaaggatccacgtgtacggctctcaatctctaacaagtcataaaagaaagatcggaatattaagactaatttctctctttatgtaaagaaaggtaatcatgaactactttgcttcaataaacaaaataaacccattactaatgaaataaaggtactaataattattcattctctatatttataacttagacccttatttaattacaagaaccatttaaacatgctaagcatttaaggatgtatttatactctcctatgaagattttgtttagaaagatatcaaatttctatgatctgtttggtactgtataaattagattgtattgtatagttttatacatatattatataattttcaacacaatttaattaatataagagcactcacatcagtgagaagttttcaaaaatttaatgaatatatctaaaaatatgttagcaaatgctctaacttattttttattttaaaatttctttataatacactatttatactctatatttataaaatattatttattattctaaatatattttattaattatctttagttttaataattattttttttatgaggatatgtatttattaatattatatatttgaaataaaataaatttttaaagagtgaggttttggtaatatattttaaagaagctgatcgatgtatgatgtaatgtaaaagtgtactataaaataaaagtatttggtgatgtaaagaataatgtagaaaaattagtgggaatcacaacaacctcattataaaagagattttctatttttttttagctaaatgtaataaaaaaggcttccaccaacttatttaaatcacatatgtaaacatgcattcaaatcaatgaaacttactctatattatatgtagagaatgaatactatattctctaaatttattttaataatatacagataatattttatttatacatatttatatgataaaaatttattattttaatagtgtagaaagtaaaaataatattaatttaatgatgttgaaaaaaatatataaaaaaattattgtatgttgtaatataaaaaatgtgttgtaaaaataaaaaaataaaattttaggtaatttattttaatgacagtaaaaaaacctctaactcgtaccatacgaatacttaaaaaatgagcattgctattaggcaccagtgatgtttagcacctctagacatatcgttttacgattaattggaccaatagcgatattaacacatataaatgtgacactactgataacttttagcatttctcttaaaaaattaatcaaatgaccaacaagcaaatagagatctcccaaaagaaatgacgaacacacaactttattatgtaatttgcaatatattgatattttaaaacacaactgatttttttttgcttcgatgtattgatgcaaataaaagtgattgatttaatttaatatatattgaattatattggagtcccataataattataatactactagcaaaaattacgtgcgaggcacgtatactaaattttatgctagtattttttcatgttatttgaaagtaatacaattaaaaatttaagaaaaaaatattattagttattaggtgagattattattatgtgt

SEQ ID NO: 239889 - DNA, 1801 bp, Cannabis indica
aacttgaaatgctctgctgactgatgtttttcttaagaaaagctacgtcattattgatatagtgatctgtagagtatagactatagactgctgatctgctactttcataacacttttgcaggctataaaatcatcaatttgtcgttacaaaagctctgctgacagtgattttaatgtttttagccagtatgttgttcaaattgccactacatctattgcgcaacatcttaaccttgtcaaattatatggacgctgtattgtttataagtgtaccttgaaaacaagtcttgatcaagcattatttggtttgtgaacagcaataatttgatcaactgattggggcaaaaacaatgattatctgcaccttgctgctgatctcaagtcggtgaagttttggatcgaatctgactgtcttcaagcggttcaactccttggaaagaaacatcgaggctgcagtgatgttgacagattgtgttagtggctttctattgtttaacaaaaaaagcaggctcaaaagaatgtaggtaacatttaccttatcatgcactgaaacctcaccaatgtccatctatgtcaaaagtggtggggatgatcttaagagatagtgatgtgagcactgaaatttcaaggcctggtttcttgggtgacttgaaattcaatgatgtctgttccctaatgagccagattacagaagggactgattctatcttctgtggctcatctgcaaccagaagcattgcccacaacaccatcaagagtgaaggtgatgaaaaattggtttgagttttgtttgtgtaatgaaatgttttactgctttgtagctgtgtaatataagattccaatgagaatttagttagtttttattttaaccaaaagattattcttagttgaaaatgaagctatcacactattcacttgtttatatatattttttttgaaattgacctgttatatttaatatattattaaaattattaatttatagttaaattattctttatttttataaaaagtatatataaattagaaagaaaattggacagtttaattctttttcataaaattattttgaattgtatttttttttggtcatttattcagtttaatttggatagtttatttaagttgggcggattgtaaattttttttgaacagcggagacaatttttgtactttacgtgtaaaacttagtaacgagaataaaatgaaaataaaataaaaaaaaaaaaattaccagcacgcgaaaggcacgtgtcatcttttctcgagcgagaagtacagagcagcacaactatggttcgtcttcttcttcttcttcaaattcgccattgttaacctctacaaaccctaatttctcacttctttaactgtttctcctgcattcttcttcttgttgttgttgaagaaagagaagaatcaaaaattctactgcactgcacctacaatctaagtatgaatcattcttagtttttttttttttttttttttttttttccaatacatatacatatatatataaatgtatatttaacatattagaaattcatctcttctggatgagccgtacgtaaattcttgaaattttataatctagctttacaggaagcggtttctctaagtttttattattttttttatttaaattaaatatcttttgttgtttcagtcaacaatcatcatcatcgttttcaacttttatggctaaaaagagcgtggaagaaaacgatcttcttccggcgagtaaaagagttaaagcaacatcatggatcaataaggctgaagacgaggacagaatttcgaa

SEQ ID NO: 239890 - DNA, 1330 bp, Cannabis indica
aactcccaaagtgaaaaggaggggcatagtacgtcgtagtcactgtagactactttaccaagtggacaaaagctgaacctctagcaataataacctccaagaaagtcctcgactttgttgttaagaacatcatatgtcggtttaaacttccacaaaatattgtatcagataatggaaagtaatttgacagtgacatgttcattgatttctacaacagacatggcgtcatcaaaagcttctctattgtggctcatcctcaagaaaatgggaaggtagaagctgttaacaagatcctcaaggacactttggaaaagtaccttgaagaggaaaaaggcaattggccaaaatttctcccaaaggtcctttggtcacacgagactaccgagaagatggccacaaggaaaacaccatttgctttagctatggctatgaagtgatgttgcttgtagagctagtgccaccatctcacaggaggacaacctatcaccaggatacaaacaacatcctactggcagaatcccttgatgaagaagaagaaaaaagagatcaagtcaacttaatgttgtagacctacaaacaaaaggttgcaagacacttcaacaaacaagtcaaggataggaaattcttcataggagacctagtgctctgaagagtgttcttaaacaccaaagatccagtagcatgagtgtttggacccaactgggaaggcccctaccaagttacagagataacaagggaacctaaaagctaggaaggtacaatgagaacatgaagcttgttctcctacccaagatattggattagggagcacctccataagtactaccagtgaccagcttgccaaatgatactctttagtagtagttctaccaactcattagtaagagttactttaaagagctagtacccatggccttttggcatggcctctaatcgttcttcaacagtgacctttgcctggcatgttaggctgggatagccacttgatttctagaagcatactttttattatgtaagcttgtagagccaatttatctatgttgcataacaacaaagaccaattaataaattaaaacaatgtttcaattcaaatatgttttgtctaaatcacttgctaacaagattaacttcttaatgttattcttttttagttccacattcgtacaactggtagcaccccaagatattcccaggaaggtctataaaacttggtgaattgcaagtgaccaagagactgtacgtctgggtgctcacttaggggcaccaacaccatataatgcatcaaactagcacagagaaattttagcacttagtataagctactaaacct

SEQ ID NO: 239891 - DNA, 1315 bp, Cannabis indica
atttcacttgaatgcgctgttgtgaaaccttgtctcaaaaatgatgtagatcaatttttatatgttttgtacaagaaaagatagaatttgcagcaaggagggttgtgctgtgattatcacaccatatcaaaagaacaactacttcatgaatttgaagctcatggagaagcagcttaaccaatgtaacctcaacaacaacactagcaagactgtgaaactctacttcaattgatgacttgttgattgtaacttgcttttgagatttctaggccacaatgttacctccaaagtagatacaacaacatgtggtggagcgcttgtcatctgattagatacctaatcggcatcatagacacatcaagaaaaaaaaatctattactggtttaagcaggagaccatgatcaagagtacctgcaatatatctcagaattcattttactataatctagtgtgtatgcaaaggattttgcataaactgacacactttgttgacacaaaaagaaagctcaggtctggtgatagtggcatactgcagaccaccaacaataaacctatagagagtggcatctttcacaggttcattgcctaagtggagagtttaagactactattcatttaagcgttgtgtgtgtttatattttgcccatctgacttagttaagtgttcttaaagatactttgtttgtgtgagtaagtggccagctggagttcgtgtgacttggattccgaagaagtagtcaaccaagccaaggtctttcaaagaaaaggtggaactcagctcttggataagttgatcaataggtttgtcatcactacccatagtgaggatgtcatctacagagacttagatgtaaatgcatgaatgagaggtgactctaatgaagagagattgatcatctcttgagaattgaaaaccatagctgagaagtattatagacaatttctcaaaccaggcctttagagcatgtttaagaccatacaaggccttgtttagcttacacacatgattagggtagtctagatcaacaaaccctagtggttgttgcatatagacctctttctgtaagtctcattaaggaaaacattgttgacatctagttattttattgcccatccttttgtaatagctacaatgaatacaattcgaattgtaattggctttactactgggctgaaagtctctaaaaaatcaaagtcaacttgttgatggaatccctttgctataagccttgctttgtacctgttgaatgagccatcaacattttgttttactcttaagacccacttacagcctataaatgttttattgttaggaa

SEQ ID NO: 239892 - DNA, 1600 bp, Cannabis indica
acataaatggtagagcaattatagaatataatatgtccaacacatgcatttatagtattatattttttaatatattcaatttggataggcctcaataatggatggtaaagccttaattttgatgaagttgtagcgagggaagcctccttgctccaaaatagtcttccactgtttctgagttctctcttttccacctgtggtgtgagccaccattacaaggtcaagcaccaaagcagtgtcaccaaacacctcattattattattattattattgctttcttcttccaaaactgactccacaataataacttttccactttcctctgcaattgctttccggcaatttttcaagatcttcacacaatcttcctcactccaatcatgcaatatccactacacatgcatatataaattagattatttaattatcgtgttctttttctttttatccttttgtgaccaaaaagacaattgctctatactcgttaatattttacaatataataattaatacacaaaaatggaaaagaaaaagaaagtaaacaataataacattaataataaaaggaaaacgatacatttgacaattataagtatattgagcatactgctcctgttgatttgaactctattgtaatggttgacaattgacatgttgtcaggtttgcttttatgcagagaaaaaaaaaaaccaaatattgatgtcctttcaagatagatattgatgtcctttcaagatataataataaataataagtatttgattaatttgaagttgaagatttttcatgtttgtgtattacttggtagactaattatcatttttgctgtaggtagttaattattctctttaactattaagataattaaatttaaggatttttgttgaaatacattcaattttactaacggataattgtgcatgtatcaaattgtgctccaaaattttatgcctaccaaatcgtaacttttaacaattatcaaatcgtatttcttgaattttcatccacatcagacttctgttaataaatttgaacaaaaatacttaaatttcaaaaatctcaagagttcaagaaaaatattaataatctaaaaagttcacgggacatcatatcaaaatttggaatcgaacaaaaaaattaattagtgatctaattattatatgtcagttaagggtatactatatcacattttcatctgttgtgcgtgacaatagttaacctaatatttgtttccatttaattaattaatattttaatctatttagatctactttatataagtttatttataatgaaactttgtagttggtttcaataaataaaaaataattagcaatttttttcctttcattttcgacacatcttgcctcctaaaatatatagcttgttaaaaaaattttctaaacttattatttacagaaatttaattcatttattaggtttcatctcattattctgtttaaatactaacatgtctttgtaaattaaaagctttgccccctaaaagctttgacccctaaaagctttgacaacaatcaaatcgtaactcctccaactgaaaataagaaagtttcaacatttttttttgtaaattttta

SEQ ID NO: 239893 - DNA, 1550 bp, Cannabis indica
tctctctctctcctctctctctctctcctcatttctctagtgggatgaaagattagttgacttgaattgggtctctgttgcttagtacactggctttctttcttgcaacttagattcttccttatatgtctctacaaataaaagcttagtgatgttgctatactggtattctgttgttgatggatactctactgaagtttattttaaatcaattctgttcaattttcaaatcttaagaacttctacatctatttgctattatagctgaaatcctccagttaaaaagtcatataattataaataaatgtaatctgtaggatatgtgctgaaatatacactctgtagtgttattaatatttatgaaatgaaagtgttataatttgaactcatgaatgtaatctgtaagttttattgttttccctatttttcgaagtctaaatgttgaatgtttgtcaggatattgggtgatgttgtgtataaactttatttcttgaattatatctgtaaccatgatctcttgggatgctttgattgcagaaatctgaacaaggtgctgattacgatccaacgccaattgtgatgatagatcaagattcagattctgatgcaaccattgtacagcttagctttggggatcgccttggagctctcatcgacacggtgactgttccatacttttttttttcactatatacacatggatagctattctttattttatttgggtagagaagttctgtaataaatgttagagtttctttctttataaaatcagtcttttatagctttaaaattggaataatcagtagtttgtatcttaagatggtgtatttcacgaaattagattcttggtcatatgatttattgcatcttcatggttttttcttttatttttcctggggcagatgagagcattgaaggatttgggactggatgtgtctaaggggactgttgcaactgaaggttcagtcaagcaaacaaaaatttatataaaacgattgtaagtactatgtaaatttatattatatatgtatgtatttgtattgaacaaatgtactttgaaggagggttttccatggatacgaaaaaagaagttattccttcatgggtgtgatttgcaaaattttctatcattttggacatgatgctcccatttcatatagtagcatatcacgtggctgtatcaatatttgttgttgtgcatctccttggtgattaacgatgatgatgatcactcgatgaacaaaataagacaaaaagaataaagttacaattacagatgattcaatgtaatcacaaaagaaaattttaaatgtaaagtgaatgctcaattttttaaaagtacatcaaatgtttattttaaaaagattgcttatgcaccatgaaggatttattattattatgaaaatggtactttaatgcaaattctttttttgccaataataatgaatgattcacacctaatcaatttaagaatatgaagtattattgaatgaagaatccatagttagtcaagactaataggaagggtagctcaaacggtcatagtt

SEQ ID NO: 239894 - DNA, 1834 bp, Cannabis indica
ctagtgagagacacgctaaaatatttttcggggacttaaaatctaaactaggaatatccctatcgatgaataacatggaaataccccaaatataacacaaaaatggggaaaacctagggtttgaaaaaaggcccaactggcataccagttctcaactagaagtctgattccttagggaccaaccaattgatcggttgttacaagttcccccaaaccggccgagaggttcagcactgggaaacctaaaatcgatcctaacaccacaatataaccccagattcaataataccttccaaaatacctgtgtacactataataaatcaaattcaaataataaacctcatcaatatacatagaatctcaaaccttgctcacacctcactacaaccaacaattccaatgcaaaacagcataaacaactccaataatacctttgtacacaaaatcaaacaccaatagctaactcagcaacaaaataccaaaagttacacattaaacttaatttaagcttaagagaaagaaaagataaagaagctagaggatgataccttaaactaaagcactcaaatcctataaaaaaatccctgaaatgagccagaccacaccaaaccctagttgtcaacttgaataattgagagagaataaaatgagttgtaggagaggatgaggtattttctagattcctaagttacaactaattatactgactatagcttattatttatctaattcatttacatcagctccactaaggtaagaaaaagcaaatattaattaaccaaaaagaccataatgcccctagtcaaagttcaaaagttaaaaacaaccatgggtagtttggttatttccaaaccccgtcaattacccaatacaaccaagtcacacatattgccctattactagaaaaattccaaaccatataaaacgtcactctctaatggcccaacgtcgccttccactacaaccgagcataatcacaaaaaaatgaggaattcacatatatagcataattaatacatgctgaagttaaataaatctagataattacacaaatcataattaataattcaatttcacaattaaaccctaattatttaataatctaatatattaaacttaggcggtcattacagttctaaaggtgatggtattcgtttcgggtggtcttctcgctcggctacttactcttaatctcaaatatcaaattctacgaattcgtcggcctatggctcagctacagtgaacgtgacgagtccgaaatccttcaaagtaagttcctctccattgctagttaagaaattaactcttgcttagattcgagagaagcatgagcgtggcttgtattttacttgtgataagaagtatagttttagtcacaaatgcaagaatcgggtattaattttgtgtggcaacggatgaggatagagaggatgaagtcgctccgattgaggaatctgataaaggagagtcggatgatacgaatgttgaagaagtgagtttgaatgctctgtccaattctattaaccccagaatttttagattacacgccactcatggcaaggaaactgtggaagtcctcattgatatcgacatcaacaataattttattcaagaatctttagctactcggttgagtcttgttagtgaggatacaaagtgcttcaaggtttatatgggcaatgataattcactactttgttctaaactatgtcataatattgagctatgtttacagggtcacttattttcagttgatctatatgtgcttcctatttgggggtttaatatagtgttgggaatgccatggttttgtactcttggtccttgtttacat

SEQ ID NO: 239895 - DNA, 1081 bp, Cannabis indica
aatttttcctttacacaacacatgtcagtatgaaattcaaagaacacattattatcttgagcaaatttagagacactaatgaggttctttgttatttcaggcacatgaagtaaattgttaagtacaagaggttgtgtaaaagatgaattggaaggaataataaaggattgaccaatatgtttaatagacaaacctgaaccatcttcaatgtgcatttggtcctgtccattgtaatcatagcagtttgcaaggtttttggcctgaggagtgcagtgatttgtagctcctgagtctgggtaccaattggtatcactggtgttgttggcagtggcaatattggcctgaggttgggatgttgatgctgaagtttgactactattcgaacctactggaggccctgtgaaattcttataaaaaagataaaggcagtcttgcacaacatgaccaaatctaaagcaaagttgacattttattctagtgctgaagttcataccagatcgaccaccacgattgaaattgaaattacctctagtgccaagattcagacctggattgtgatttggaacctgaccagatccattgaagaaccgtgagttgcctctgcaaattgttgttgctgtctgaacctcctgaaagcaagattagcttcaatagctgaatcttcttcaccagtgacaatattggcactcagataaacatctttccctgacttttcaattcttgatttcgaagctaacaacagagcttcaatctctccaacagtgtaattttcgattcgagtattggaggagattacgaatgtgttgtattcactgggaagtcccttaaaaatagctgcaacgtgatctcgatcactgagaacttctcctacagaggcaagcagatccactgtttgtttcaatttgagaagataatcattgagagataatgagcctttctttaagttctgcaacttagttcgaaattcctgaattttggaagagacttgtaatgtgaagtgtttttccaatgctctccagatctggtgtgaggtgttgcagccaaccattcttgttaaaagactttcagtcatggatgatag

SEQ ID NO: 239896 - DNA, 1345 bp, Cannabis indica
tactatgttaaactttaatttatactaaaatattatatatttaggtatccataaaagttaataccacatatagttttacataaaaatattgcataaaatacaattcaatataatacaatacaatacgacttaatacggcgttccaaacgagccctcagactcttatttaagcaacctgagtgtgtgacaattctggtaaaaattgtctcaattgattgttcaaataaatggaactctcagtttttacttcatgtagttctgtggtagctgtagttgtgaagtgatgatgtcttcattgattgcatacttcgatcgtacgttgtcttttctgttggtgttggtttcattgtgctttggcatactctattttgttgttatataccatttgcttgcaaattggagattgagaggaacctgacttctgaactgaggcttaaattcaaagaatttgagtcttgactcgttaagagtgagatataattagaggcgtttattatggtaggttgggttaagtcatttcagttaagggtaaatagcgcgcgacaaattggtgggttttgattacccgctaaagttccattaaaaaaaatactactataattgattttttttattaaaaaaaacaaaaccatttttataccacttaatgcttattttattacttaatctaactgaacaattttggaaaattttcctgcgacattcaggatttttatttcatgtattaaaacaaattttagtttttttttttgaaccaaaaacaaattctagttagtaataaataagttttaggcttttccttttattttataaaaataaaatctgcttttctaacaaattatagaatatactaaattactgatttgaattaaattattgtggtgcccattctacgtcaccacagtaaaattagccataaattcaatacaaaatgtatttatcaatttgatatatcctctttctatcaaaaagaataataaaaaaaattgaacaacgtatatcctcttaaattaattaattaataatatatatttatttaatccaccaaattgattgcgaattttttttaaaaaaaaacagatatccaccaaagtcaaattgatctacttgctctctttgttggagtgcaaatctttttatgggccgtcggccaatgttttgttttccatttgtgtgacaagaaaacgactccttgaatacaaaaaacaaaggttcacttcaatcgtacacgtgtgatacagaatccaaatccaaaggaccacatggttttgttctttttcagggttggctaaaatgacatcttctcaacttgctcaactcagagtttcatttcatagttttctca

SEQ ID NO: 239897 - DNA, 1143 bp, Cannabis indica
aaggaactaatataatttttttttagtttatttttttattatatttttgacttttaatcccagttatttcataaaaattgagacaaaaagtctctttgatagtcattttctaacaaattcaaagcagagaaccgttaatcttgatcttcgaaccaaaatttttttcaccaacatcggagggcgtagtctctgcctttggggttgaaacagagtctgcaaattctgatgtcgaggaagatcggtccaatgactgaagctagctctcaggcaaagacgtgcattgtggaatgttgtaggagaagaatcaacgaagacggtggaatcagagaacaactgagagaaagatgagactgagatgagaaatatgggttagggatttgaaattttactttaaaacatttagtcataaagtaacagttgtaactaaaaagatattggaaaaatagtagttgtgactaaaagatgattattagtgacaatacaacaaattagaaactaaatgataattacactactacaaaaaggggtttttgcgtcggtcaacacgtgtggtcaaacttgttgaccgacacaaaagtcaacccacactttttcgcttcagttatccaccgacgcaaatagttattaattagcatcggttatatatccgacactaaaacaaaaaccgaagcaaaatatgaaatataaaaaaatttatatacactattagcgtcggtctacagccgacccaaaaagtcattatatacactataagcgtcggtgcacaactgaagcaaaaatgcattaaaaaaatcagctatgggctttaacccattttaaaacaatctaaccctacaatataaacacttttaaccctaattttcttctcagacgtccctctctcatctatctctctctctaacctaatttcctctcttcacccatcatcaccttcatcttcttcctttcttcttaacccaacccaaagcatgaactattgggaatattttaccaggatctagatttactaacaagtatgttgattaacatcctaaatatgaatatctctaaaacaatgaaaataaacacataagggtttaataaaaccttacattgattgcagtggaatataacgactccttccgttcaagatctctagccctt

SEQ ID NO: 239898 - DNA, 2005 bp, Cannabis indica
aatgtttcaaaaatgatgttcgtgagtttcttcaattgaaaaagtgtttcaaagagaacaatgcaggttcacctgttggctcaagtatttcatgtacagaagttagatgttatgttaattcattgttgataaagttgcatcacttcagaggaggctcaagtgaacttcttgctaatgctgaaatgcagtttacattatctgcagtgttgaaaaatgacattctttcaagtttagatcttagattctcttccctggagttgctttctctaccttaattttgttgtgttagcaaaatgtacatctccatcctcaatctcatctgttcttgacatttcattttagaagtaaccaagctgaaactgaactatgtctttcttttccatctcttgtcatttggattcatttgtttgagtgggttgacatcattgatgccgtcgttcttatgctggactgttctccaaagttgcaccattgaatacatcgatgaataatataactctgggtgaagttgaaaaatgtggataataaactaaaactgtttctccagattctcttcattcttcaagtgcttcaacctattctgcatctgggagcacaaagcaggattcaactgtcctgactgtgaagctggacaatgtctcaattacatgtaatcttcccgtgggcatcagtaataaagcatgtgaagagtttctggcaactaaagatcaaagggaggtctgtccaattgagtcatctaacatgagagatagaagtgactcgaaatacatctctgttactgtgcatagtaaaagcagtgaaatacttctaaagggaagacatatgaaactgaaggctaatatggaaaagtggattggcactatatcactttgtgaggatgggaataatttatcttggcctctttttcagatgtttcatgtttttatagaggctgaggttagccatgacatgatgcagtctgttcatgtcagagtggagtttcagtgtgataatctaaatgtgtggctttctcatcattttttctacttttggcatggtgtgacatttgttattcctgaaggagggccttctcagttccctcttggtggtattgattttgaaatcaaaatgaaaaaagcttcttttcttctgagtgatggaagggtatgataactttcttgagtattttgactctttatggtttgtgtaattttctcttacgcatgtaattggcatttttaacgatcccattccccttcctctgattctttaattcgtggctgttttttcaatgagtttttatgtcatgatcagttaattaatacaaataaacttgcagagtctaatttaattgatggttttcacatgctaacttcctatttttctttcttcaagtggagttgtagtggaccgctgtttgaaatttttgtgaggaacatggtcctgaatggtaaaataatggaaagctatatagaaagcttactcactggtgagattcaaatgaactataacaaccttcacaaggtatgtaatatatatttttttaattatccttatccaatcatataatataccgttcttatctgcttctaattttctgaaggtcttctgggagccttttattgagccttggaagtttgaaattaatgttgcaaggaaacaagaaatgagtctgaataacaccatggtgacagatatacatctcaattcatcaacacaacttaacttaaatgttacagaacccctcattgaggtatttcataacaaaagctctaatggattttttgacagtttttttgtttggggaaattaagtgccaagcaaggtgtaaccgcaaagcagtaactcatagtttgtttaaatttaattgtagtgtgcttcatacctaaaactactcttgagaaatcttgcatgttctgtttacctctcagttgggtgcaaaagttcactgcccttaaattatcaatatcttaatacttatttatactggctcttgcagtgtattttcaggacaattgagatggtt

SEQ ID NO: 239899 - DNA, 1348 bp, Cannabis indica
tcgatctttacatgtcttatgtaatcaggtcttgttgaattttttcaagaacaaatgacaatcaatctcaatgtgcttagtttgcttctgaaatatggaatttgaggcaatatgaaaagcaacttgattatcattaaataatttttttttttttaaataattttattgatatggccatgaattacataaggaaaatttgattttctatacttacatatacttaatattttttccctaaacacaccacttaatatttgtagaatatgacatattttagaatatccttgaaatacccccccctcccctttctcttcttctctttgctgctgagctcctaactaactaattttttttttttcagtcattcaccactcattttcttaacttcataacactataatctactacactacaagttattctacccattttttttttaaaatttggagggagcatcatacacagagcacacatatgcaagcaatggataatgtttttttttttgtttgtgtaatcttgtttgttgttatatttagtttagaatgttgttttgatgcttgatttgtggattgttgctgttttttgtgttaaaatgtatgctgcctgtgaatactgcaattttcttggtttttgcatttttttcgtctggcccgatgggggtccgatgctgtccgttggggggcccgataccttgtcaaaatagctgacaagggtgaaggcctgatggggtccgatagggacccgataggggttggatggtaccccataaaatttggtttgtttggttttttgggtcgagtccaattggggtgtccattggggggcccgataccttgtcaaaatagctgacaagggtgaaggcccgatggggtccgatggtaccccataaaattttgtttgtttggttttttgggtcgagtccgatgggtgtctgacgggtccgatgtgggggtccgtttgtggtattcgaaatatagttttgggaattttttaggctcgattggattgaagtctgatatgtgtttgatgggtccgattatagtccaaaatatagtccaaaataattttgggtaatttttaaggcccgattggatgggtgttcgattgtggtccaaaaatttgttttttttttttttaatttttggtatcgggctcgattttgttttcatatttattgcattgaaagattttttttcagtgagatttttgttctaaattataattatattttttttaaatgtatgtgacaggttcaactgttaatgcgtgtgttatgtataatagtgtttgggagcttcagcttgatagtagagattggatttataagcggggcaaaaatttgacattt

SEQ ID NO: 239900 - DNA, 647 bp, Cannabis indica
caggagttatgggggagaaggcttaagctttcggggtatggctaaaagcagaacaagcaataagggatggatttcaggcaggctttacagctccaagtatagaacagcaaaaggggataaaggaacataggattgggatagggcctgataggggaatgacactttcgaattccttttctcttctcacagaccctatgaaaaccaggaagctcactttggatggaacacaagagggtaagggaaaagacaatagtacagtagaacaaggctcaacaagtgccaatgttttgacaccacaaaagctaattgcaagggatcttagggaagatttgggaaaccaggaagaggtgaatcgagggaaaagaaggatgttggaagttgaatctatatcgggggttggcaaacttcaaagaactgcgaacctacctatgtcaaccatggatacacaacaaccatatgatgttccaatcacgtttcaacaagagaaagatggggtagaaggaggaccatctttcgtctttggcccgagtcaacaaccaatatctaaggcacaaaggcgaaaggtggcagtgaaaaaagatggaaaaataggaagagcaaggcggagaagataccgattggggtttctcaggatggggattcgacaa

SEQ ID NO: 239901 - DNA, 889 bp, Cannabis indica
gggatgataggacccataacatgattgttatgcatgacggtatatctcaccgaagtaacacaagccatgataagatttacccacctttctgcaaatcccatacaaagcataacagctcatagataatcccattcaacctgatcataagctttgctcatatcaagttttaaagccatataaggccttttttacctctccttttccgcttcaagtagtgcattacgtcaaaggccaccataatgttgtctgaaattaagcggcctaggatgaacgcactttgggtttcagatataacaagatcaatcatgttgtgcatacggttggcaagaacctttgaaccaatcttatacaagacattacataaggcaataagccgcaagtcacccattgaggagaaatttttctttttgggaatgaggacaaggttggtattattaagctcctgtggaaaaacacctgtgtcaaaaaaatcagtaactaatttgacaatatgagatcccacgatatcccaatgttgctgataaaaaccaggtcatatgccatccggccccggagctttgtcaggatgcatttgaaaaagagcttacttaatatcatcaggaagtataggccgaagcagatgttcattttgctccctagagacagagcatttaatattatccaccacattattacaagtagctccatcgacagtgaagattgaggagaaataatttgtaattagatcatccagacttgaaccccattctttccaattgtcatttaagtcttttaactgcagtgtctgattgcttcgctttcttgaacttgcagaagtatgaaaatacttgctatttttgtcacccaaatgaagccaatgttactttgatctttgctttcagtaaatctc

SEQ ID NO: 239902 - DNA, 1085 bp, Cannabis indica
aaaatatttcgacatatatttttagtcacatgaaaattaactaaaagactataataagagagtgaagataatacctctctttgtttcaatataaattggtgttagtatttgtgaaaaacaaaaagaaaaaaatacaaaaccaaataataatttaataattttacaattggctcgttcatcttttcttttgggtagcactattattatttgtcctaagtttcaaaaagttttgattccaaagtgtagtagtacttttagtagtgatgggtcacatagaatagtgttgtgtgtacatacatttgattttttatttatttatttttaataaaatgtgtgttgtaaataaattaataataatgtgagtaatttgtaatataaatacttaaatttaattttggttatagataaatatttaagtttaaatttttacggtaataatacatatattataaatctaaaacttttgtagatacataatctgtcaagtcaatgcccacatggtagtccttgattaattcagattattaaatttttatttttatttaaaaattaaattaaatataccaataagaaaatgaagcgtagataataacttgacacttaacgactagacatttacagatgttctaaaaatataacttatttattaataccgtcaaaaatttaacttaagtatttatctacaactgaaagttaaataaaaatatttacgtcacaaattattttaataaaaataagaaaataaataagaaatgtggtggtcatgtaggggagtgaaaaaaaaagatggcgtcgtaggaatagtttttattgctatctttttccatttaggtcaaaggttctaaactcactacacggttccttccgaaatggattaaaggatttgcccttctgaaagctagcttgttgtacgtggtgttatctattgatgactcaattaaaacacactaaggtataaaatctttataattgatacataatccctaaaattattaaaataaccgaagagataggaaaaagaatctgcaccacttaatcgtcttatagttagcaaagatgaaaaaaaaaaagatggcggctggcta

SEQ ID NO: 239903 - DNA, 1474 bp, Cannabis indica
acatcaatgtttgacacatggtaagaaagaaatcatctcagagttgagtagtcctgagtcatagtagtcgacctgagaggggtccctagccttgcacccacctttacttcaggaactccgaaatgggtgtttggataccaccaagttgtttccaacgcactatctttcaatattttgaaccataaagacatagagcattcaagtccaaggttcgagagctgaaaatacatgaaatagtttcacccagcacccaagttgacagcctaactagggttttagtttctgggaccatcttagtgcaaatgggtgaaacattttactggacatgtcacaaaaaaatttgaggcatcaaaataagattaggagaactttcatttttgagcacccagaacacgaggtgccccaggcacccaaggcccaaggtgacatatgtcaacctgagccacttccaagcatcaacttgaaaatccatctcgggctttttcttcatcttcatcaaaaatgtggaaacaagtactttcaggtaagaaacagacaaacctagaggccaaaacaatggaatagcgcccaggttgacacgtggtgctagcccaacacccaaggtgacgttttgtcaacttgggccaattctaaggagattttttgaaaagtattccaagcacattctatgtttttgtcaaagattaagattctagtatttttggggaacaatagaaactgtccaagggcctaaaactgcacccaacagccatgttgacatattgtcaacctgggttgtttccaatcttatttctgaaaaagtgtttcaggttcaacttatccgattctgattttgtctcgactgtttgtctagtttttcatacttattgagagctatgaaatcagaagactcaaattcataacttcatattttcacttttctagaaagtgacttactcagaaatcagtatggttcatagtggaccatttcacaaagttagctcattttctaccggtaaagactatttatacaatggatcagtatgtagagctgtatgtggaggagacaatttgcctccatggagctcctaaatacattgtttcagacgaggatttgaagtttacattaggattgtgaatggggcgggtcaaatctgatccgactctgatccgaccttatccagattatatacggatctgccccgccccgccccgccccgccctgctggatcagatactcggatcggatctgatccgacccgccttatatggatcagatctgatctgacccaactttattttttttccaaaaattatttgtttaagaactaataatgcatcattttttcttatatattttatttaatctgtcaaaatcaacaaaaaaaaatatatcaaattcttatcacataaaaatgtaattttactattgaaaaattaatttaccaaattttagaaattccactaatataatcatcaataataatgtagtatg

SEQ ID NO: 239904 - DNA, 857 bp, Cannabis indica
actgaaattggatagtgtacctgaaagaaaccccattctttgcaggcaaagtctagtttgtgtagttcatcttcatctccattgatcagcagagataaatctatggctggaatttcattaaacttggggtagaaggtggaatcgagtggcctgtctttgctctcctgtatgtatctttccggaacaaactcggagtcattcctcaccatctcctggacacttggtactggtaaagactttccccaacccaattctccatcaactttaattcctccattttcaagttcaacctctgaatccattgttcgaacttacactactttgtccaagtaagctcatatatatttacatgcaacttgcccaggattggagtgcttaaatatcgagtttatgactagtagaatctatattttcctctgatcgaaatgccctttttaacgcttgtgccattgtctttaattgccatcttgttacgttaaattctattttgccaatcgttatgttcaatgattaaaaatgaccaaaccattggagttttcttgtagaatctcgctggagttatctgtttgtcaccacaaggacaaaagataatgagggaaaaagttgaaatgattattgcaatgataatggagcctgctctttagtgataattgtaaagttgtgaggccatgacagctaaactatctctatctctttcgatggtaatgatatatgaacaaaaacattacacacaatgacttgatatactttttaaaatagttggttgtaatttaaataaatataattagttaaaaaaatttgtcatgattgtggttctcaattttaataattacaagtagtattttttttttaaaaaa

SEQ ID NO: 239905 - DNA, 1135 bp, Cannabis indica
tgtcactacagattcgacaaaaattttgcctcccccaaacctggtgtctctactcctcgtgcttacttgactgaatatgaactccctactgattctcataacaccactgttcttcctgactttggtgatgatctatcatggtttgttgacactggggcaacaaatcatatcaccaacaacctagagactcttgaatcatcaaatgcctatgctggatcagaagctctggctgttgctgatggtaagaaaattcgtatctcacacattggatctacctctttaccttcatccattaattgtccattaaagctaaattctgtcttgcaaataccctccattaaaaagaatttaatcagtgtttctaaactaactgaggactacaatgtgtttcttgaattccataaaaactggtgctttgtcaaggacaaagacactggacaggtactgctccgagggaaacttaaggatgggctataccagttgggagatgcttcctcttcatcctcttcaactactttgcaatgcaatcttgtatctagtcagtttgttgactctgaatgtgtctgtaatcaaacatgttccaagtataataatcctggaaccaattgtactttctcctcaatcaataaaacatctactgtttctgattgttctacccttaaacctgctctttatcatgtttctacaaacaaagatgttaatacctggaattgcaccctcggacaccctgctataaacactttaatcaaacttttgccccatcttcctcacactggctcaattaaagatttgactttctacagtgcttgtcaacttggtaaaagtcataccctgccctttccctcatctgcaactaaaaccagtcaacctcttgccttgatacacacagacctatggggcccctcccatagttgattctaagcagggatataaatactatgtacactttcttgatgattacagtcgatacacttggatctttccacttactgtcaaatctcaagcccttgaagtgtttctaaaatggaaaagtttagtggaaaaacaatttaatcttcccattaaatctgtccaagcagattggggaggggagtacagaccatttaagaggtttctagaggatcaaggtattcac

SEQ ID NO: 239906 - DNA, 1459 bp, Cannabis indica
catcaagccaaaagattgggatacaaaagataggcaaattaaacagctaaatcaacgggcaaacccggccactacacccgagcctcatttaaatctaatgctcgttttgctaaagatcgaacaacatgattttttgaccgattacaatgcaacaggccgggatataatactaaaagaattcgatgggaaaaaaatccttacaatttacaaataataataataataataattaaaaaccggccactaacacctaacaatcactaacctacactaataactagattataaattcaaagttggttaattcaattcaattcaagcactttatgaaatgtataattaagtcgatcgataatattgataatgaaaacttaaatttccttttgaaaaaattattgaattatgcacgttttcctatttgtgcaatctccataaatatatatatatatatatttaattatttatttgtaggaaacttctttggtagaattatatcccatttttttttaaatgattgcataaattaaaattataatagatatcttgtcccttttaaaaaaaaattaaataattagagtataaaaaataaagtttaaaataattacttaacacatttaattacatgaaacacgcgtacaataataaatatttgaattctattatcaacaatatatatttatttaaaatttctcaaaaattaagtagaatgtttattataattataatatctcatttaaaaaaataattatttttaaattttaatattataccaaaactaaaaagtacctacaatgataaaaaaaattattcccatactcaaatttttttgctatatttatgtatattgttctaatattattcattatttaatatttattatgatataatgatatgtttggtttattgtaactgagtattgtaataaaattaaaatacatattacaatatttgattttgcttttaaaagcaacataatattaggattacaatgtaataattattatatttcataataaaattcttattacattcaaaaaagctatgtaatcataattacattataaaagattgaataaatttttgaaaagcactactcctaactttttagttaatttctagtatttaaaaatatatgctagaatattttatttttaatttttttttcactaatgatattctttatactcataacatcatatctataaaattttaaacaatttcaaataatttacagtattaaaaataaacttagaattttttgaacacatggtaaaccaattaaaattatataacgaataccaatatataaaaataaaattattttaacatataattttaaacataaaaattaattaaaaatttataatagattatagcactcatctattttttttttttttatgtatttattacttattctaatatttgtttgtaacaagaaacaaacgaaacatgtgat

SEQ ID NO: 239907 - DNA, 1684 bp, Cannabis indica
agggcattttggggttaccattaaaagattagcatagttacaaaatttttaggaagatagtataattaaacaccattagtcatttttaagcataaaatgtaaaatttccccttataattttctatccattttaattttttattagtattatttaatacaataccatgttttgtattgacttgtattaatagattatgtaaagttataatatattttcaataaactcgactcttgcaccgactacgagttgggtttggatctgggtatggatctcgggttcgtgtcccgagtccagcacctggtctcgaatcctaagttcggcacccagttttgggtctgggttcgagtctcaggtttaggtctaggtatgggtctcgagtccaagttcaggtcctgagtctaggtctaagcccttgtcctgggtgctggtcggggtctcgggtccgggtctaggtctaggttcaagtttgggttcggttttgaatcccgagtctgggtctgcatccgagttcgggttcgggtccgggactccgggtcccgagtcttaagtcccaagtacaagttcagatctgtgtctgggtccgagtccaagtccgggtctaggttcggatcctgggttcgggtttggatcccaagtctaggtcttgggtcgtgcgtccagtcccgggtccatgtctgggtcccgatccttgtcccgggtctgggtcctagttccagggtctcaggtcctgggtcttaggtcttggtccgggtcttgagtctcagtctgggtcccgggtcttgggtcccgatcctaatatgggtcccagtctaggtctgagtcccaggtcgagtttgggtctgagtttaggtctggtctcgggtcacaggttttagtttggatcccaggagggtttggtccaggtccgggtccggttccaggtgccgggggatctgagtctggattcgaggtatgagtcttgaattaagtttttttaatatattgaaaccgaatcggatcagatccgatctagaaaaaaattaggtggggcggagcagatctgatccgagatccaataagtatctaaatattttctattagaagtgatccgtcggatcggaggtccgacccgctccaactaaatggatctttttgacatccttattgggcactagtggtgcctagcaccttttagacatgttgccttgtgaatggttagtgatactctctaaaagttattacattaaattatataggacccgatacttagttagaccaatagcgatattgacacgtaggaaagtgctaagtgtaacatgcgtgccaagatagcacattacaagctagatgatgtccacaagttggcaaagtggtggtcaagtggtggcgcatgttagggtgcatgctggtggcatggtgatgcttaatttgtatggcagtggcattttcgtaaatatcttcaatattatccaaattgggatgggactaggtattttacatttatttgggtctacaaatacaatggtgcaatcagattagagaaactatgtgatttggtatatggtttggccatatgtctacaaagccaaaatcatgtatgttcttggtagaaggctaaaagcttagaatgctctttaaggggggaccctggtatctgctctccaccaccccctggcaccttggtgctaagtgagctactactag

SEQ ID NO: 239908 - DNA, 2874 bp, Cannabis indica
aaaaaaatatagtaaaaaaaatcgtattatagtaactggttactataaggatacttggcacactttttttttttactttaaaaaaaaaaatcttcaattttcccataaaataatctttttataaaaaaaagtcatatttttatcaaaaagtataaaaattcataaaatttataattttctcaaataataattatgttagtaaaatttgtcaaactaacaatgtgaaatactaaaatttacaaaataacctcacataatttactctatgcgacattcatggttgcacaatataaatctatggttgttttgcgaccaaaatagtcgtttatggtcgcaccgtgtaattcatggttgtttctgcgaccacacaaggttattttgctaataattttttttgtaaatttattttgctaataaaaaaaattcataaaggcgctattttttacaaaacactcattttgttattaccagataagttggtgttcgtcagggagatccaatgtccctattattattatttgttcttggtatggaatacttatcaagaattctcacacgagtgggactcatgacaggtttcaaatatcatgatcggtgctctgaactgaatttaaatcacctatgatttgcagataatgtacatttgttttgttatggtgacttcaaatccatctactttatgcaacaatgtctcaagctatttgcagtcactttggatttattccctaatgacttaaaatccacattatattgtagtagaatggaggaaggagaagtacagagaatattagaagcttcaggtttcagcagaagtgatttatcattcgaatacctatgcattctgatatgtgctcggagactttcaactttggaatgcaaaggcttgacagagaaaatggttcaaaagatttaggtttggggaacaaggagcttatcctttgctggtaggataactttgatcaactcaattcttctccccatccattcttattgggcacaaataatgatgttgccaaagatgtcgttgaagaaaataaataccatttgtagagcttttttatagaaaggaaaagctgaaataaattgtcctggttatgttgcttaggataagttgtgcaagtctaaatctgaagaaggtttagatttcagacatactttgtgttggaatattgttgctctgggtaagtatgtttgggcaattgcttcaaaacaagataatttttgggttcagtggatttatagtatctacataaacggaactgattggtggagttataaatctcctataaatagaaactggtattgacgacatatagtctgaatcaaagagaaatacaaaacacagttggacttttaataatttactacagaccagagtttatagcatcccaaagggatacaaggctctaagtctggactttaaattatttactacaagggtctttggtggagttataatattaaatagtattatacaaagttgagtagtttattgttgagtttttggcagctaaatcctcaaaatgattgttttacttgcacttaatttttctttttggcggtaaatcttctaatttattgaactgttagcaaattcaagatggcatctagttaactgtcattatggactgcttatgtgtacacttttgtacacgtggtacgcttatattgatacacttattattattattattttaaaattaaataaaattataaaaataaaaaaatattataagtttcgaaataattttttataatttttaaataataatattatgtgtactaatataaatgtgtcacgtgtaccatagtgtacacataactagtatatgttggcagttaattgtgaaaaatagataataccttaaatttactatcagttcagtaattttgagggttttaccactaaaatttaaatttgaaaagttaaatacaagtgaaatgatagttgagagtattgggccgcaaatatattttacaaaattttgggtcaacattactaaaatttataagctagacaattgagaatacaacatgtgttgtccgagtcatcacttagcaacactaacttatctatgccaaaaatatattgagtttttagtgactatatcctctcaactattaattcacttgcacttaatttcttaagctcaaattttaacggtagaaccctccaaactattgaaaatttaagatgtcattcatttttcacagttaactgtcattatagactgcttatatatgtgtacatttttgtacatatgttatatttatattagtacacttaatattattattttaaaaatataaaaattattttaaaatttataagattttttattttttaaattattttttatttttattaatttattcaatttcaaaatgaattttaaaaataattttttaaataataatattaggtgtaccaatataaacgtatcatgtgtacataagcaatccatagtgacacctaaccaaatgacaccttaaatttactactagttcaatagtttggagaattttaccgttaaaatttgagcttagagggttaaatgtaagtaaaatagcagttgggaaaatttagctgccaaaacctcaaataaattatatgtatttatatataacgagcactaaagaattttgcgtggtctaatagttaaaatctatttaatctacgagtcaatattaattttgaaatcttgacacaattttgccagagtgtcgtaccacactttaagattttttttttgtttgttattatggatagttaggtccgatccgaaactaaggtgggccaaacctgcgcttagatctactcaacctagtggctaaaaaatcacacacaaaaaaaaaaaactctaacatatcctt

SEQ ID NO: 239909 - DNA, 1303 bp, Cannabis indica
tcttaatatctttttgattaaaaaacaaacgaactaatctactgtattaaacgtttatagatgagtttcacaccaagatcttcttgactcaacacgttcaataataacattctattctttaaaagtgtagcaagtaagctaggcgaacataataaggtcattacatgatagcaataactgaaattaagaaatactcaatagattcagtaacagccacgttcaaagctaatgcccacttggtaatatgctacatcatcctaagaagagaggcagaaagtttacactcctggataaaattagaggtacctcacggtatgcttaccaatgaaagcattaacaatatttaaacagtcacactcaattacaacaaacaaaaaactaagtctaatagcaatatgctgatgagttaaactccacgctgcagcttcacctccaataggactcaaaaaacgtaggctcttagtctcaacccaaaccacatcagaatcagagtttttggccacaaccgccaacatcatagaatctctcccaacagtaacatcacagttgaattcacagttgaatttgatccaactccttacaggagcctgccaactagaatcattgatgactataggttgctggagcaaaactgattgagaggattctgcaaaacaattagaaaccacgttaatgaaattggtaaaattaggatgaatgtggttgtgaatgagatcctttccagcttttcatatgacatccacaacaatggatgcataaagaagcacttcattagcatccatcatcgatcccctgtttaccctaatttcacaaaaaattaatccaatctcaacaagagtatctctaactgagaaaaggcaaatggtacactcaatattgaaacgctgcccaacaatccctcttaatggagtacattagttaaccctaactcgacttgttcacatttagcgtcaagaaatctcaactataacccaatccattggctgcttgtgtccacctatcaattttgtgtgagctatacttatttttggactacatattgatcgacataattagcattacatattcaatttctatatacatatcttagtatcacatatgcaatttatatttatatatatatatatatattaattctatcatttgaatattacactaaattaaaaatatataaaatttcaaataactaaattactacaaaatttcaatataatgaacaaaattgttcatatctgttggagtaaacctccacttacactgatattaagactcaatacactaaatacaaaggacagaaaaggaa

SEQ ID NO: 239910 - DNA, 871 bp, Cannabis indica
caaagcctgtaaaatcattggaactggcactgtcaatatgaaaatgcatgatggaattataaggtctgttcagaatgtgaggtatgttcctgatcttaagagaaatttgttgtctataggaaagtttgataatcatggatacactgttaaaatcgataagggcacccttaacatttctagaggctctctggtggtagttagaggtagactcaagaatggtctttactacatggttggcacagctgtaactgggactgcatctcctgcaataaacaatgccaacaatgatattcagctatggcatttgagacttggacatgttagtgagagagggctcattgaacttgacaaacaagggctatttcaaggtggattgaatgggaaacttggtttatgtgaggagtgtgtatatgggaaaagttgcagggtgaagtttgctactagtcaacacactactaaggagaaattagcctatatccactcaaatttgtggggtccttcaaggatcaaaactcttggtggtgctagttattttattagcatcgtagatgacttctctaggaaagtttgggtattcctattgaaaagcaaggatgaggcatttaatgcctttgtcaattggaaaaggctgattgagaatcaaactaaatgcaaaatcagaaaactgaaaactgacaatggttgggagtattgctctaaacaatttgatgaattttgcaaagaacatgggatagctagacacctcactgttagagatacacctcagcaaaatggtcttgctgaaagaatgaatagaactctcattgagagagttaggtgtatgttgaaaggtgctagtttggataggactttttggggagaagctgttaag

SEQ ID NO: 239911 - DNA, 2441 bp, Cannabis indica
aaaaaaaaaaaaaacatatacgtttcaactctttattggctattagagacacatgttgctactatttaattttatgtgagactgttttttttcacttaaatattttattttatttttgaaactaattaccatttttaatggaaatatacagtacagtacttagtacaatgcttatccattttggcacacattgttttagtctaaattttttataatacgtatatttatttatgatttattgtaaatttttgaaaaattatcattatttaagtaaattagggctaaaccttaaatcatatatttttttacggtcaagtctcctaaacacatgttagttaacattttaactttttcatcgatccaacttcttctgttaagtgacatgctacttatatgtatattcttctacacataaaaaattaaaattaatccacgtaattacatattaagaaaatataaaaaaataattattaaacataaaaaaataaaaaaagaatttacataaaattattaaaaacatacaaactcatctatatattttttaatatgttcctctctatgttccactcaatctcctcaattctcactataaaaaactattatttttagtgacaatttgttagtcacaacataatttttttgtgatcaaatgtgacttttagtcacaacaaaatattacttatgactaaaatatattatttagttataagttgtcactaatttagttttagtcacaacaagtatagtgactgaaaatacatttagtcataacaaatcgtaatttttgtgactaatacctatagctacggaccttttagtcacaaaataagaataataatttataattagttacaaatttttcacttttagtcacaagttttgttgtgactaaaagttagattttttgtagtgtccctttgtgtttccaaatatcaccctcccgctgtcagagctcaacctaggagagtcctccctcgcagtcgtcgccgaaccttagctctctccccacaactgtctctttctttcccctaaatatcagaacctcaaatgtttttcgattttttccctctttcttgtttcatcattttcttttttatgtttatagaacttcttctctggtttcatggtgtaatagacctagatctcatttcgtgctttcggatttgtataaatctagttcttttggagtttgttatatgtgagattctaatttttgggggtttggctttcatgtctacattacggcttggaggtttgagggggcgaagacgatgaaatgggtttcgttccctgaaatgtaggagagaccctcgagttttttgtgggtttgttcaagattttatttttattttttgtattttttggtcttgttttttgttcttggtggtgatagtttatggggagatattacactactagaaaaataggctttagagacagttttttgggacataaaatgttacttttggcaaaatttactaccaacgttgttacaagtgatgtcgtaggggagaaaattaaccgacgatataaaatgaccctacaccgttggttattaataattgatggcatatggaggtcctgttgaaatattcaacatagttactaaattaaccactaaatttcatataaaacctattattttcacatatatatatattttgttttatttttataaatttattttaattaaatataaatttcatataaaaaaattaaattaaccatataactaaatgtgtatagatacacacacattattacaaaaaaaaaaaaaaatgtgtatagatacattattctaagtaaatatattacacaaatatttcaaaattagtccaagtatttacaagttattatctaattcaacatagaaaaatagagggaaaaagttaacaagttatctaattactacaagccttcgtgaatcaccccaagcaattgttttatccactgtcgttgtaacagtaacaactcagtttttgtatcgtatgttttcttttcccaaaactataaaaaaaaatatttttattagtatatattagattgtttgttaataaataaataagataattaatacttaaaacttacaacttttacatcggttgagtatctgctaggatttccatgtctgatgatgtcactaatgtatattcaatacataaaaatcacatttttagtttttaggttgttttgggtaatttgctactaatatttttagatacgccccaatgaacacatttgaccccttaacatctcgcataccctatattgaaaattatatttatattttaattagttaatatataatttagctaattaaatttgttttatataaaaattaattaaattattacttctcaacatcgcatcaatttgttgggaaatttcatggccatctataagatctagatgaaacagcaatgtgcactaatatatatata

SEQ ID NO: 239912 - DNA, 1453 bp, Cannabis indica
gacaaaatttgcctcttcctgtctctctctttctttctttcgacctcaagaaaaacaaagattttcttcacataatttttggaattttcagcaagaaagctaagttgtgcaatagttctaaaggtaaaccctaaacccttttttttgagtttttttttggatgttttgattggtgtatgcatacaattttgaagagttagttttgttcaagcctagagttatattgggttgttttccaaagttaattgaagttattttatgcatatttgaattggttttggcagctaagtatggtgttgagaaaatttgagttcaagaacttaaacttggctcaacaatggtagatttggtttctttgagttttaacaaatgttattgctatagttatgttcattgatgtttaataaggcattctagagtgttttaccaaatttgggattaattgattgagattcgaagctcttgggatattctgcagaaaaatgattcaccgttaacagttttcccaagcaggattccaaaaaacggtttaccattttggaaatctggtttatcgatttggcagttttggagccttagtttttgtatttcctcaatatttagggtattaccacactatttatcgataggaaaacttttagttttgagtttaggtacccaaaaagattttagcaatttatttacccgttttatgtaaatgtgacataaggcctccgttcagcgtataatttccatttaggttgaccggcacacttgaacaggaaactagataagattagtataacatgtgtatatgtatgtccatgtatttaatatgcatgttgtattatatgatttatatactaccaacactagtacgagtgcagtacaaagtgtatttgtatagtatatgatgttaaaggggtatgacacaacattatttacacaagtatgggacaagtacagagagcatgtggtgcaacaatcagttgtactcgatgtacgattcagccctactaacactagtacgggatgattacttagtgcatgtggtacagaggtcgtacttccgttaagaacattcttgatcatttgttaagccttgtaaataggtgtatggcctcctagatgcaagtcgataatatgttatatattttatgtttttcttactgagtccgtcgactcacagatattgtttacatgtgtaggtaaaagaaaggcaaaatctaagcactagtgagtccaaagcttgaagatgattgtacatctcaagatggttagacctggagtgttcgatttcaggacagcatgggtctttattgttggaatatattttaccaggatctagatttactaacaagtatgttgattatattctataatctaacaccctaaagatgaattcctaaaaaataataataaacactataaagaaaacacatataaagttaagaaaatcttacattggtggcag

SEQ ID NO: 239913 - DNA, 1858 bp, Cannabis indica
aaattagttttttattagcgtcatttttaaaatgacgcaaaaaacaattatcttcatttaaaaaccgacacaaaatatacacacttttattttatcttcaacgtcggtttggaaatgacgcaaaataatttgtggcatttctaaaccatcacaaaaaagttataccgtcagttcaaaaatgacacattaattgctaaaataattttttttttcacttattgtgtcagttataaaatgaagcataaatacaggtaaaagaaaattgtaaatttccaagcaactctgatattataagcccataacaatcttccctattagaattaccaccaatgctctaaatatgttagaaattttctctagatagaaaccaaatataaatcatattatttacctgttcattttagatgaaacttatttaaaaacaaactttgttcactgttcaacaaaaataacataaccaataaaaacaaaaaattaaaacaaaattaaagctaagcctgaataaatttaatggatgacaatatttttggatactcatatgagtgaagtttttaaaaaattaaatctatgaaaattgggtagagtgtcatcatcacaattgacagaatgaacataaagacccaaagatatatggccaagtatggacctcctatctgcaactacacataacataatttttcaccatttaaagaaaggaagtgaagcaatatagacatcaaatacaagatggctaagattactcaagcaaagtaaggtttagttaattgttaacaatattagctagatcaagaaaagagattatacatcaattcagctttggcctctgttcaactcctttcgtggtctttttctctgaaaagaaagaatacaaacatcacaaccaaaccaaataatgaaaagatttatttggttactaagaaagaacatgaacaacataggaaagtgtaattatttatacgccatttttggtgtaaattgtgtgttcatatatcaaactctaaatctaaaaattagcttaaatacatattactatactttctcagtataaatcgtatgaaagccactttcattgaatggccatattgggagccaaaattcatacctcaagaaacctaacttcacttcttaaccaataacaattacaagataagaatgtcaatcacctttgagtttctactacttccagtggactcaaaataacaatatttaaatctttgcatatgaagaaaacatacaatgacaaattactatgttaagaattctttggcatagaaaattgcatggcaaccgaaattgaggcaattatttttcaccatgctgagaaaactgtttttttctaggcaaattttcaagaaaaagaaagtgtacaaacttgatatacattagtgttcttattttttaatagtcgacttcaataaatacgaaaacatgtgtcttaattgttaaatctttcataatctttcatattcaaaaagttacattatttccttctaatgaagtggcacaaaacatggaacatggaagaaaaaaaaacaacaacaacaaaaacaattatccacaagtcctctaaaaaaatcagaaccaaatttagaacaatatagtttaaaccagcaatgtctattatgacattgatatagaattctattctaaattgagtcaaagtgataatgtatatctatgtatacatcgatctattttttcactttccgaataattttctctacctcacaatccaaccaacccaactctctttgcatccaatcaatattatttttcaaacttccttttccaactaaagattaacacataaacacataatgcttcacagtttctttacaagaaccaaaagttgttctca

SEQ ID NO: 239914 - DNA, 2195 bp, Cannabis indica
atgagatttggccactgtgaaaaacggctgcaacatcttaaacgcgatcttggagttatccaagaagctacggtatcacaggaaaaccttgaaaaagaagccactatccaattagaaattctaaacttggaggagaaaattgaacgaatatggaggcaaaaatcaagggagtgctggctgaaatttggagataacaacacgaaattctttcatgcttcaacgttgatcagacgaagacgaaatcgtatcagttgtatcgaagcttctccaggtttatggctaaaacagcgacaacagattggagattacttcctctcaaatttcaaaaatctatatcagactacagacccgagccttggtgatgagtttgagtccctattctcagaccagattactatggaggaaaatgaagcaatttgcagcatcccaagcgaagaagagatcaagaatgtggtgttcagaatgcatccactaaagttccctggacccgatggtttcccaggaattttctttcaaaaatactggcacacggttggtgaccaagtctgtaaaatggttcaagaattcttctctagtggcatactccctccgactctaaactgcactttcatttgcttgattcctaagcacgataacgcaaactccttcgaccgattctgtccgataagtctgtgaaattttgggtacaagattatctcccgcattctcactgatagattgaagaaaatccttaacaggctgatatccccacatcaatcggcctttatcccaggccggtggattgcagaatgttcagtcttggctcaggaggtgatacacgctatgaagaacaagaagggtaaaagaggtgttatggcaattaagacggatctgagcaaagcttacgatagactcgaatggaaatttatcctcaaagttttgcaagccaacggattcaataacaaggtgatatcactaatcatgtcttgtgtgagttctgtaagattctcaattctccttaatggtgctccccttgctcccttcaatcctaagcgagggctgagacaaggggatccactatcaccctttttattcatcctttgtagtgaggtgttatcgaaaatgatttctaaggccgagaaagatcggaatattcacgggatcaaaatctcgagaaatgccactccgatatcccatttgttttacgcagatgatgctatttacttctgccaagcaacagaggaaaatgctacatccctgatgagtattctgaagcaatatgaagattggtcaggtcagaagattaacaaggaaaaaagtggtgtggttttctctccaaacactaaggcaaacacaaaggatcgtttgatggagattctaggcatgccaaagctgaatagaaatgaaaagtatttgggaaatccttttttctttactgccaatagaagaaatgatttccagttcttgagacagaaagtgttgaatagaattgaaggttggaaagcaaaatgcctatcgcaggctggaagaacaactttggttagttcagtgctacagagtattccaacctattttatggcaaccactttggttccccagtccctctgcgaagagttagacaaacttttggcaaagttctggtggataggtcctcgatcaaacaaagaaagatactgtgctttaaggagttggggaaacttatgtcaaccgaaaagttgtggtggcttcgggtttagaagatttcaagacatgaatcgtgcattactggcaaagctgttttgggagattctccaaaagaaggacaggctatgggttagagcccttagcacaaaatactactctctcctcgatgcgtggtcggtggataaacaagattcagactcgaaactttggaagaatttactgcaaacgagggaactttgtgtgactagtgctggtttcgtagttgcaaatggggagattgatcttttgacgaagccttggatcccttggaaaaaaatacaacaactgaaagacgaatttcattgtagccgagtacatgccttcgccaaggtgaaagatctgttcaaggatggaactcgaacatggaatgagtccctcgtgcgggcctgtttcgatcaagaaattgctgaatcaatcctttgtatcaagcttcttttagaaggagaagacattttattctggaaaccggcgaaattaggaaagttttctgtctg

SEQ ID NO: 239915 - DNA, 1544 bp, Cannabis indica
cttattcatttcgaattagctcaataatatatcattggataaatggtttataattcatacaaagtcattctatattttctcttagaaaaattgaatgatgcacatgattaatattcctgatattttatcccgcaatgatataaatcctcaatcttagaatctcctacttgtatgtatatatgcttactttaggcaaattaaacttagagttatattagtagtgcatgagccaagcaacatgctcaggagtattctgagcaggagaatgagcttattcaacttaagcacgaggctaagttgaagggaggagccagggcccaaaaaacatgctcaagaatattctgagtaggaggataaggctaaggaagagcaggaaagatcgctcaaaaggaagaagaaacttccggccgggcacaggctcatcgaacatacgattcagattagggagtccagtctacctgctcggccatccacccctttagcaggaaggggaaacccgtcctagaggagcaagaagactcgtcggatgacgatgccccattaggtcttgctcgggcaaatgcttatgccaaagtgcaagatactccatcttgcttttagccttcttgattattatgccttcatatttctcatgctttttctaacgatgttactttcatttcgtgcaaacatgtctcaaaagatgcttgaggctctaaaaaagagagtgggaggaagctttggcttatctcctccggctaagaagtccaagggcggtgagccaacctcgtccagagagaagacaccaactgaaatggtcattgccctctccaaggagcaaaccattgtagatcctacagtcccatagagcagtcgaagggcaaatttgagctaaccaagtcccctaccctacctctggtaccgcacccagagaccaaggccccaattgaaacaatcaatcactatatggtcggtccctgaggtgaacgagcgattggctggggcagacaatgacctttctctagagctggctgatcaagtttttcctgacagtatccttttgtccttattctcttagtttagcttttaatattctttctctgtgcagactggtctaaagattacttatgcttattctcgagctaagtcggctacctccaagaatgctgccatttccaacagtatgcgggtgaaagtggacttggccaggaagcatgccgatgaagccagggttcagcttggggcaatccggataaaactgggagaggtcaacaagaaacttcttactgctgagaagaaggtggccaacctgaccaaagatctacaatcctccaatcagcttgaagccgccattgcctccctgtctaaggatgtgaacaaccttcaagaggaaagggatgttctccgagccgttttccacaggttggaagaagagaataagactaaggaggaggagcttaaagttgaggctgagaagtataagtcaaaggctaggcaggagagagccaaagtgaatgctctagagatagctggtctcgagattttctatgacttatcacatttat

SEQ ID NO: 239916 - DNA, 1217 bp, Cannabis indica
aattctatcttgaatcggattgtcttgaagctatccaattaatccaaaacaaggaggaaagactgcagagacattgatggggttcttgatcatattagacatttgttgtcctatgctaatgttaagggtctgttgtttgtatatagggaagctaataaggtagcgcatgtattagccaattacgctttgatgaacaaagctagtgctatgtggattggggttaatcccccgtgtgcaaatctcgctattttgcaagatttgcctaatccttgtaattgacgttttgaatgaatgaaggaatttagttttctaaaaaaaaataaaaaaaaaaaaaaaaaaaagttaagttttgaattccttaagtgatgttaataggtaatgtataaaaatgggtttgtgtttgaaattaataaaactagtttagtttatgtttgtgatatatttgtgattggttctaggaatgcttattgttatttgcatatgtaatttttgtaggaatctgattgttgtattaggaacttgttagattatattacattttataaaacaatataagacataatttagtaaatatttcataaggctttataattctgacaataaagatgtaaatgaaaataattttcatttattatttttatcacaaatgaaatatattctgacaattttgatataaatggttcaacacaaatactgaaaaaaaaaaaattactcaaaataatattagtagtataaatgtcaactgtaaatgatataaagataagtcatacatccaaccaaaataaattttctatctggatgaccttgttaaatgacaatattggaaagtaatacaagatgtgaatcatcaacaatcaacaagtttggaacattattctagacatttagatgggattattgatgttgtatttgccatagatcatagaaatttagttatacaacaatctgatcaactaccagattatcaaagtaatattgagtattaatttatgaagatttcaaagtagaatgtttttaattatatatgtattgagtaataaaaaaatatgtttcatacttactaacaaatttggtatgcttagtataaaatgtctgcagatattgctagttattatagcggagatagtgacagtctagacccagatcctataaggatcccaaccatgtgcgagtcttctggtaaattttctttctcattttaattacactaacaaaat

SEQ ID NO: 239917 - DNA, 1178 bp, Cannabis indica
taaaaactcaatgtacaactcaatacttctcgacgacgaatcttgatgtattcgttaaaaatgcataattatcacacgagtgtctttttgaagttgagttttttttaattagggtatttattttatctatacttagagttgtgtctatgcacttttgagaagtataaaattttaaaaaataacaaatagcatctcaaacatgaggtatgatcatctccaatgtgtaaatctcgaacaaaagcccaaattattaataatcacttcaaagagtcaaatattatgcattttaactaattgtatcaagattaattgaggagcatcaattaactaatcgtgcaaatttttaatgtttttgattgaaaaattggatgagatatagatgcatggtgatgtacgtagttttatactccataggagaagagagaggagagggagagagcaaggaaatagtacagagaaataaagtgtggctgttatttagagaaatgtactttagtcataagaagctagaagctgaatcatgcattatataatattgtttagatagatagagagattatatatgttggatatttttgttatgggatgtcatgttaaggatgaaacctcaaatttcgtatttaaatttaattatgtataacttagaacagtttgattaaattgataaacaatttttaatcaaatttaaatttaatgtactaaatatatatactaaacttgtgttatcaaaacataggatactaaacgactatagtttcttctaaaaactaaactaaatggttaagatcatatatattctacatataatcacccttaaaaaatatcttaaaaatataatttattatataatggcccctctagcttatgtgatgatcacattaattatatgtaaggtcagcttttgcctagggcgccttaaattttttaaattattattattgtttttcaacaagaattatttaaaaatgttattttatatgcaaaaattgaaaaaataacaaatttttcattgagtcttactatatgcagtatatgcactaacccacttggtatgaaatgataactttatatgcataaaaagagaggagacatttaattttagtttgggaccctaaacacaacacttgcattcgataattttattaaaaaaaaaataacaaaaaacattgttttataat

SEQ ID NO: 239918 - DNA, 1381 bp, Cannabis indica
agatcctggtaaaataaattccaacatttctctactaggacataaatgtttttcttcttcttctttgtttcttgcaggttcctcaatttttgaagagttcaagcttctgtgatgaagtaataatggagactgtttcatctgaagggagttcagagtcatagcttaagggatttcagctcaatcaaagcaaggggagcttgtcttcgatacttagatttaaatcttggttggttaaccaagatgttagggtaaattgttgtaagaatctttgatgtattgttttacatacatttgatttacaaactggagtttgtattttgatattgattcttattggaggttatttaccctggttcaaggaactaaagatactagccgcctagaatgtgtttttagggcggatgaagcttgtaaatctgtgtttttcatcttgatttactttttgtagtttagcttgtaataatccttgccaatttgaattaaaactactaggttttatattgtgtgattgaatatcattgtttcaattagtagctttcgattagattggatttacatttggtatcagagccaactttttcaattaatgaaattgagatcctgttgccacttgatttattttaggtcgtgtgtgttgattcttgattaatgtttttaatcttgttgtcctccatttgtttgttaattgtttctggaaaactgatctaatctgagattcatctggcagtacaatgaagttgtcattttttattttcaggaaaattgatccactccaagatttatctcgcaatgcaaagaaagtgtagtttgtgtgtgtttagatcaacaggagatggagatatttcgagaaggaggatctacatctcgatctcctatgttcgagggagataattacccctattggaataccaaaatgagagcattcttaaaatctgtagatcaatgggtatggatggcggaaggttggtctccacctatggttgttgataatgagtgggaaaagaataagaaatccaatgaatggtcaactgaggagatggaacgagaaaaatttaattccaaagccttacatgctctctttaatgttgtctccacaaattagttaaaagtgattttctaactgtgagattgctaaggatgcttgagagaaggttaaaataaagaatcaaggaacagaggctgttaagaacacgaggttaagagctttcagccaagtcctttagaaaaattgtctatggatgaaaatgatacagtttctgagtttcatgccaaactttgtgatatttcgaatgaatcttatgcccttgggaaagtctattccaataaaaaaacttgtgagaaaagtttttgaagtattgcctaaaagattcatgtctaaagt

SEQ ID NO: 239919 - DNA, 1746 bp, Cannabis indica
aaaaaaaaagaaaaatagaagaactcaactacaagtggcatgcatacgcgggaccatacaatacaactagatgaaaagcggcgaatcaatcacctaaccatgtgtgttttcatgatatttttcaacttattgcataatggacaattacacaatttttttaatcaaatattttttatatagtttttgtggtattggctttggtacttacttttagttcatgggattaatttttatctttgtctattattttagagggtgaaaaagatgcatcacaagtggactatagttagtagttggcctcaaacacggttcagtaaacttcccctaacgaaaaaataaaaggcttcacaatagtacttatgtccaatttgttaattgtctcaaattaattaactgttttctacaacttctaatgattttgaacttatgtctctaaccccacctggttttcttatggggtactatattgttattattattattattttgagaattactaaaaactatatttcctcgatatcatatagttattgatgaaataagtatcgggtttcatataacttggtaataagttttaaaaaatatcgttaagtattcataggacattattactggtatctaataataatgcattattattttcaaatcatgagtttggaagcaaagaaagagttattgaaactttttcttttcttttttccttaacaattgttatagtttattttatgttttcttctgtctttacttaataaacagtttttttgttcaaagcataatgaactcatagctttattccaaaaccaagcaacgtgaatttgctagggggaaaagaacaaagccttgagtggtgacacggggaagactattgaaaaatgaaatgaactaaaaatgagattattttgttccattcttatttcatttgtacgattaaagaatcaaagattgtattcaacacaactgtctcgaaacattttctcttgggtggaaaaaaagcaagcaatttttataagtttggaatcacattcaagaaaaaagcaaacctttttttcttttttcttttttttttttttgtagagggaaaggaagtgtaattcaatagaaaaagagcatatcccttaatgtatcgaattcctttgggagcgtggtttattaattttctctttcaattcattctgcatattcatctcgttgtcagtcatataatgtcactttatttaattttatgtttgttatttgttatataaaatcaatggaataactaatgagttgctatataacaagctactaaatgattttatttaatatactacagaataatttaaatatataatatacattttaattattcatttttttaaatttaaactaaaaatattttgatcaatggagaaaattcttaaggcctgtttagtacagaggattgggctggattagataagctaattttttcagtgtttagacatgttaaaaatttggataactaatctcattgggattatttataccatataggtgagatttttttttaattgttttttttaatttttaattttttgtttggttcgtagatttttcgtacagctaataattaaagttgtatgaagtaataatgaatgttagagtaaaatatttttacataattaaggcattaatgagtcttcaattcacgaattattgtattttatgagtagtatttattattagagagttttttcgaccgtatctctatttgtttttacatttatt

SEQ ID NO: 239920 - DNA, 1483 bp, Cannabis indica
gggaaggtacaaggtgtctgtggtacaatacgtaacagtactcaatgtgcggttcataccctacctacactagaacgatggtatactaagtgcatgtggtacatggtacatggtcgtatctttagtagaacgttcttactcatctgttgagccttttaaataggtgtatgggcgcctagatataagtcggtattatatgatatgttatatgcttttcttactgagtttgtagagtcacagttctacttccatgtgtaggtaaaggaaaggcgaaggcggaacaggagtgagcctggctaggatgagattgtacatgtcgtggcagcgagacctgaagtgtttcgtctcgggacatctgggcttatattttgtagtcgatttgcgacctggatatttattgtaaaaagttttaatttgcacgttttttgagaaaaatctttgatttgcaaagatagcactgtaattgaaaaggcactgtagcgtgccttagcattagggcattaccatttcggtattagagccgccaagtttgtctaccgaagcttgccaagacatgtacaatcttcatcatagaaagctcagttcacggttcatactaagcccgtacttgtttagtattatatatgattatttaagtatgttaggaagcatattagattataattatttattttaagtgtgttgcctttaagtccataagagcggtattaagctttaagaccgctgtctaacctgcctagcttatgggttcgtagattaagtccaatagaatggacgcccagtgaaatacatgaagtcagggaagtatggttgagagcggaggcggtcagggaaatcaaattccccagaatccttatggttgcggtcgtggccgtggtagagcttagggtggtcgtcctataaatccaccacaagcacttcaggattgggagcaaaggtttgcggaaatgcaagatcgaattcgctaacaagatgaagaaattcttaggttaaggtagcagagccatcctgccgtgcctccacaacaagctcaggccgttgctgctagcagaatagcatgttgctggcaaccgaatggagatgttatacaaaaggctccgtaagcaagcaccttcagtgtttctgggaggttcttatgtgatgaaggccgagcaatggcttactgtgattgagtgaatttttaatttcatgggtgtggttggtaatgatcgggtgacctgcgctacatttcagttctaggaagacgccctagtgtggtgggaattggtgtccctcattcgggatgttactgttatgacatgggaagaattttgagagttattcaacgctaagtattataatgaagccatccgtagtgttaagcggaaagagttcactgagttagtgcagactgagggaatgtcagtcactgagtatactataaagttagatcgtttggccaaaattgttgtgggtattgtgccaacagattttagtaagaaag

SEQ ID NO: 239921 - DNA, 1075 bp, Cannabis indica
tttttttttttttttgtagaagagagatgtcttttgccattggcaggatgcgacttatacaaaggttaattcgttcaaaaaagtgttggttttatggtactaaattaagtttgcaacgaaagagtttttctaattatcattgtaccatatgcccaaaatcaccacatgtatatatattatacaaaagttaaatagatgaaaaaaaaaatatttacctctttgcttatcaaggtatcttagattcttttcgcaagttgtatcattttggattgattcaaaactgacaccataatctttcagacctttcaccacacacaaatactagtgtgggctagtaggataatagtgcgtatgaagttcttgattaaatctcaacacatgagcaagaaatacttctgtgatagagagaaaaagtttaggataaccctttttaaactttcacaaaaggtacgaaaaaatctatataaaaaacttttcaaaactttgttatacagtatatttaaagaaactcaataaagtttttacttaattaattatttagatttaaatctatttattaaactatatttaattatttgaataaattatataaccgaattcaattataaatatttattttttacaataacagggcgcttgtgtttggacacagtgcatgtgacgcattcctttgtctaaattaagacaagggatgtgtcttttgttaggcaatttttgtctttttcctatttaattaattaaataaataattactattttgatgattcaaaaataatttttctgaactttcatatataatttttatcccatccattgatagtgttttaaggtggtcactcagggaccatgaacctataattctaagttccaataaactaaatttatttatgttgggaagatttaaagatttattattaaaatgcccccattatggttttgaaaaatggagacttgtaaaatatttttatgatggtttaaccccttcaaacccacaaatgattcaatctatgcataccgattttttttttttttgaaaattacaagggcaagaggcttgggaagctcttgaagaatt

SEQ ID NO: 239922 - DNA, 1688 bp, Cannabis indica
gtatgaaacttataaaaaagcactataaaacgtaaaaatactgcctgacagtatttctgtaaataaagcgaaaattaatagaccatttgaattttccttactttactcaaagctacttttgcttcaagaccatattataataaatgaggtaaacttagatctagtaaatctaatatgctcaaaagattccaatttttaaaatttgacatatcaattcaattctacagataaatgtttgatttaatagaaataagattattgtaacagaatgtcaaaagctatagataactatgcaatctactaaatcatcatctaattaataaggagaatttataaaaatactgtaaaataggataaagtttataaaaatactgtgacacgattttttttttttttacatttttactgtatcaactttacaaaaatactgtgtttaatgtttcaaaattttaaaaatactgtgtttcagtaaaataaaataaaaagctcaaaaacaactaaaaaataactttagaacaattaaacaaacaactataaaacaacaaaaatataatcacaaagcaacaaaaaaataacaaaatttgatctagttgcaataagtaaaataatatcaactccttaatatatttttgtattacacatttttttacttagttttgacaacctgatttatctttctgtaattacatttattttttttttttcatggaatctgttgttgggattttattctttcaacttttttttctcttttcctatttgagttagtgatagtcaaaaaaataataaactaaaaaacaacataaaattaacaaaatacatatatacaactggaataaactgaaaatatacacgataaaaaatacacataaactaaacaaaaactgtacaaaaaaacacataaaaacaacagaaaataactataaaacaattatacacctaaacaacaacataaaaataactataaatcaactagaaaaataacaagacatcaatcttattaaaatatgtaaatcattcataaattaatcctgaataaactacaaaacatccaaaaaaatatactacttttattaaccatgtaaaagataaaaaaatataggaagagtgttcttattattttttttttttgtaagagagtgaaagagtgttagaaaaacgaaatataaaaatatacacttattatatgggtaatacccattgagaagtgtactcttaatgtaaacgaaatataaaaacgtactctgaatgggtattgcccgtgaatgggtaatattaaaaattttgagtttttatgattaatttttctatttaattagaaaatcttctcatttttacattagagttgttccatcagttgaaaaaaaataattataaaaaagttttcccgtaaaaaaatgataaaaaaaagttaaaatttgacttaaatatttttcatataaatatatttttgatatagcgtaaaaagaagtattattttttttatattttctttaattaagtagctaaattaagtataaaaatttgaatttctcttttattatttgctattagactaaaatctaatggtttaatattttaaaattaatatttatagttaaatttttttagtacccaagtaataccgattaaaagatgttctatatttatatatatacaaagaaaaaataattaatttgagaaaaaaa

SEQ ID NO: 239923 - DNA, 962 bp, Cannabis indica
aaatactatataaagcttgtgtagtcaatagattatgtgtcaaatatttttagattaattatctaaaacttacaaatcacagctaaaacatgtactaccacatattattgtattttattatttatttatttttttttttttggatcaccacgtgctatagagtgtagatagatattcaaagtggacacaataacgtgtatttaattttaaccataaagtccctcaaataaaataaaaaaaaaaattacaattaaaatcatgtgtaaataaatttgtctcaatcataagccactcaggctagttaggccgtaaaagtaggccggtgggaagaaagagtgtacatgctcaaacatgattagttaatagaaagagtattgttattaagaattactctcacatgatatctccaatgggacttcaaaacgccaaatatagtatagttttacactatatttacttttaatgtaatactaaaactatacttataaataggtttatctatagtgtcccactaaatttaatagagtactatagactacactatttttgcctttttaaatttttaataattaaataatactttttaagagaaaaaaataaataattatatttatttattattaaaatattcttattatattaataaaataataaaataataaataatataaaatttggtgtaatttttagtgttataattagaattgaaaaataatttagtgttgaaatagtaatcttttggtgttgatttaataccaaatttaagtcatttcaaaaaaaaaaaactaccaaatttaggttttaccgttagagatggctttaaaattgacgtcttagagcattcgaaatgggagttacacattgagttgttttcgccacatatgcaatatggttatcaatttcaatgtaattttatcaacaatcatgtgtcattactttatctttttttttcaaaaaaaaaa

SEQ ID NO: 239924 - DNA, 1046 bp, Cannabis indica
ctttttcatcatcatcatcattattcttgatgatattctcaacccctgtttcatcatcaatctctaaatcaatcctaataggctcattagcattatttggaccataatcataaccattattataatcaatatcataatcataaccactttcttcttcttcttcatcatcatcatcatcttcatggaaattggagagttgatccaagatctgagtggcagagaacccagaaacattattcaacccagttcggccatcgacgactcgccaagtcagcaacctgtgattggaaacgacgtcgtttgacttgagcttcatattgcctttggtcttatccttggctttacacgtgggatgcaagtggcacccgttgcaacgtggctgcccgcacttgcccgtgaatttagagtggcccgtgggtttggtggagacccgagtgaacagccccgctgtggctggggaatcgaaccggttcacgaaacgggtctcgggtcttgggtttaacggtgagggtaggattcttaaggtccgaaccatcccatgttgacgaccctctctcttcattttctctccaaatttcagagaatagagaaaataagaaaaatatagttttgaagagctttagttgtttgcctttgatatttatttatattaaagggggttgatcttgttttttaaaataagcttggaaagcaaggctttttattttttatatttttgttcgtgtggaccacgccatttatctactctaatagataaggagaatatatgcttatatagtcaaaaaataaattgctattaggcatgtccaacactatacttgtgaaaggtgtggttttttatattatttattaaaattaaaatatgtaagatttgatattgaattatatcaatataaattaaatatgacattttaagatacttcttagcatttttcaataaaaaatattaaaagatgctttaaacagaagtgacatattacatgagaaaccgttagtcaatcaaataattataagttagtacatcaatataatttgataaaatatta

SEQ ID NO: 239925 - DNA, 614 bp, Cannabis indica
aaaaaaaaaaaaacaaactataactattaatcaaaatatatacatgaaaaagaaaagaaaaactagaaccaaaagtgaatattgtagttactaaaatactctacacaaaatgagtaacgagaaatagattgaccactaatgaccccatgttgaggggccacgccacgggccaccgattccaacttcaacttggggtgagagacttaagacaaaacctgtactttgggatttggctttcttcgtcttacttgggaaggttaatatgacacctccagacttgtcaccaaacttcttttcccttttgtagtcgggaacttcttcaccaacacttgatagaagctccatgaatgaagcctcactgtcatcaataacatccgggtcactcccttttgtctttgatgtttttggtagtttcttcaccaaacttctttccagatcaggattttggtgtctctcgtaacaaaatcacttggactatcctgatccgcgacagaatctttagagttcttgcggttgacatgtttgagtttctggatctttgtcagcagcaacagaagaatccaagtcattcttggttggtgcgttggttcattggtttcgcattgaacacatgc

SEQ ID NO: 239926 - DNA, 1654 bp, Cannabis indica
aattaaaaaaaaaaaatagtaatcttcattgaaatcttcttcgttcttaactatataataagattttaataattaaataaatgttgtattactatttggtgtgattaaattgattaagaaaaaaaaaaatcatagaaactgtatatcccaatacataatttgttaaattttgacaacataatcgtgtatatatcttaaagtatcaaaacaaaatttatgaaatcaaactgtctatgtatatattatttaaaggtgttcggggtgcgggtggtgtggtgtttgtctattttttcaaatcaatttgcacgtgtagtttttctaatatctcaaaccgtactcgcatcgtaaaactaaataatcgtagaaactgcaccgcaacaaatagtgcggtgcagtttctgcggtttgggctatcaccaaataattaaactattacaaatacaacaaagtttgagcaacacctctcaaaaataccataagacttgaaaataaatatgaaaaaaaaattaagtttcaacaatacaataattagtgagctttgggttgagccttcactattagacctaaatagatataaaaattagtatttttatgatatgcagtgtggtgcggtttgaactatatattaacaattcgaaactataaattgcaccatacggtgtagaaaaaattcaaactgtgaccgtaccttaaaaaaatttcaaattgtattttttttatagtgctgtatggtacggatggtttgagtagttagagcgatttattatttagacattttaaaacagtctcatattcacttcgtaaatgctttttaataccaccaaattgaaacttgatgaattatcaaaaaaaaaattgaaacttgatgtaaactctctcgtcaccgtggacttcatactctgccgctccattgttgttttctgaagcccatcagaaattgggctcattatactacctaagcccaaaatgggctttaactgcacatcattagcaatgggtatttacataaatatgggaaaaataatttacatacatatagtatatagtatgtcatttaaaataaaaacttaatataaatagatatgccattttaaattactataaaaatattaaaattcccttcatattagtttacataaatatggtaaaaaaacttaattggaaaagatatggcatttaaaataaaaacttaacacatatgggatatgccactttgaattaccataaaaaaatattaaactttttttcatatttttaaaaataaataaataaataaatgaaactacagtgatcgttggagttgtcactggggctgaaaaagtcgccggagttttttgtcagtactagaaaaatcgcgcgagagtagcttccagtgttggaaaagtcgtcgaaattgctatcgacaacgaaaaagtcatcagaattggcattatcgtcggaaaaatcaccaaaaaaaccagtttcttagtgatttttccggcgataatgccaattgctatgacttttctagagtttactatcggtgccggaaaattcgccggagtagctgccggtgttagaaaagtcgctggagttgctgacagtgctagaaaagtcgtcataattggcattgtcgctgaaaaaatcactggaaaaattaccaaaaaaactgatt

SEQ ID NO: 239927 - DNA, 4095 bp, Cannabis indica
aatccgatctaaaagtgctatgacaaagctgtttacattttttgtatctgttattattaggaattgtctttaagttggttgtattaaaaaaaagttgtcaaaaattaatcttagggtatttttaccattttagaaagtattttgtcatttaacaaaacagagggtctaatctgtaacttttgcaaaaacaggatccaaaatggtatttatcccacatttaacgataaacctaaggctcatattctaacaaccctaatcaatattctatcacagtattttctcagccgcaccattcattaaaaatacagatgatctccctcaatcagtgtctctctcctagatgatctcgctcaacccaaaagatcttagtcacgacccgcatggtctctctcactctcggacttccctctcattttcttgtccctctcggtgtagccacgacggaccacctccatctgtcgagaggttaaaaggatgtcgtcaacaaacccgccgtcctccaactcgtgagtgcgtgcgtcactgtcttaagtcatggatcactcatcggagtcgaagctccgcaaatctgttaggttcatgtcgggtctcgtttacccaaataattctttagaacgagatctactcgtagagatcttccagatcccatcattgatatttgcatacaccgtacgagatggagcttcggtgagatcaggcagagcttcggcgagatcgggtagtacccgttatttgtcatgagttctatatatttacaataatttttgtatattttgtaaatatcaagaaaaaaaaaacccacacttagcattttttttggtcgatggcccaactccgggcaaatggcggaagtaggagtttaagatgaattgggaagggtttctttttttctttttgctgaataaagttaggctattttgtaatagatatgtaattgtttaactctttttttttttaatttgagtgtaatgaaatattattgtttattattgtatttaaattttttataaaattaaataattttatttatttattaaaattaaaacattattgatttattattattattaattaaatttaaaaatgcataataataataatttataaatttttaattttttattttttttaaataatgatgacttgaatttctatttttctcaatgtctcaatattatgtccatcaatactagactaaaaaagtttttctagttggactaaaaaaatacctttttatgtccctggataaaatgtccaacactaaaatagactagaaatacttatctagtccaacattgatggacttaaaatggaatttttgtagtagatatatccaccataaataccggggctcagattaaattcactccctgtacagattctaggtctttcacctacaggtgagtgcacacctgatctacctatgattacccagagactaggtcgtgaaacaacaatatgtaccgaacatgaccaacatagctctcatcagtataaccaaagcaggtaagtaataagaataacaaaagaacatattcttttttattttcttaaaaaaattcgacagcataacagctgtattttgaataaatccaaaaattataacctgtataaatatttgtacaaaaatatatttgtcactcagtgccccagaacagtccagaaaaatatgcagattaagttttcaatttttaaaacaatttgtaaatcataaaaattagaatatgtccaatgttatacaacacatataaaaatcaagtccaataatcaagttcagtccctacctctcccgagtcgttaaacttatatattactctcacctataccatcaaatggttaaacaattatcatcattgcttagtgtaggttgttaccctcgacgagctgagtttagtggtgaaaacgtctcgtcaaacggtcgccggaggtcactggaaaatccgttcaaagtttgaatcaccaaattttgacttgcgatcccaagctaacggcggcgaaaggagcggcgccgtttggcaggtgaggtcaccgtcaagaatggatgtataaataggggacacaaacctttagctattgcagccgcacctaatcattaccaatgattaggtgtcctttcaatcattccagcatattcccttgttaaaagtttgttatgcattattttctgtgatgccatgtggcaactttgtattggataattttgtattccctttatctatttaatgaagctgctgcacttagtctcatttgactgagaatttcattcttctctattttttatcttggtatcagagcggctgaaccagaactccatcaatgttgactggacattcttagactctccccactccacctcctaccaatcggaacctaccgctcaagcttcgactagtactgtaaatgctagctctcccaaaatctaaccagcagctacacacaacccttcaataccctaaaccaaccattctcccttaaacttgacagaaataactttaccttatagaagacaatggtgtccactataatccatggtcacatacttgatggtttcatgaatggcaccaggccgtgtcctcccgagttcgtaccagctgaagtcactgcagaaggagatcaagggaccgaagttatgctcaatccagaatatgaacactggattatcagtgaccagtttctcatgggctagatatacagttcgatgactaaaacaattgcaacataagtcatgggttgtgctaccactgctgcactttggcgcgcgctggaaaatctgtttggagctcactctagggcaaaaatggatgagtatcagacacttatttagactacacgaaaaggtctactcccatgactgattatctaaggcaagagaaaatgtggtccgacatgcttgctcttgccggagatccgtatccggaggctcatctggtttcaaatgttacatctggccttggtattgaatatctgtctattattgttcaagttgaggcaaaacctaacatctcttggcaggaacttcaagacatgttgttgagttttgattgtaagcttgagaggttgcaagggataaacaacaacaaatatggtggtatttcaactagtttaggagtgaatcctacagaaaacatgggcaccaaacccagtcataatcccaatccgaatcatggccgtggaggtaacagaggtggttcctctcattgcagtagcaggggtggttccagaggtggaggtcgtggttgatccaacaataatcccaagccaacttgccaagtttgtggcaagtatggtcattcggcagcttactgctataaccagtatgatgaatcatacacgggacaagatcctcgagctcaaaccactcaaaatctaagtggtaatagtggtggacattcagcttatgttgccactcaagaggttgttgatagtgatgtttggtatgctgatagttgtgccagcaaccacatcacttcaactgtgtcaaacctaaacccaaaatctgactataatggtaaggaaaagttgactgtgggagatggaaatcagattgccatctctcatgttagttcaagtaattttatcaacaaacactgaaaagaccttagtgttaaatgagatgttgcatgttcctatggtaaggaaaagttgattgtgggagatggaaatcagatttccatctctcatgttagttcaagtaattttatcaacaaacactgaaaagaccttggtgttaaatgaaatgttgcatgttcctaagattgctaaaaatctaataagtgtttctaaactaactgctgataacaatgttgttgttgaatttgactcttcattttgctttgtgaaggaaaaaacaaaaggaaggtgctgctccaagggacacttagagatgggttatatcagcttgctacagcagtcaaatctcagtcaaaatggtcaaaccagaaactgtttactggtgtctcgtttttgaacaaaaataatgtatctcagtcatgtagtgttgagtcttttattttaaaaaaatgatatatggcataagatctcttagagtgttaaaacatgttctagcttctcgaaatgtaccactgtcaagaaatg

SEQ ID NO: 239928 - DNA, 1283 bp, Cannabis indica
gtggcattgatagaggattgtagtgctatactccaaaagaagcttcctcccaagctgagagatcctggaagcttcaccattccatgcactgtagggaagattgagggcattaatgatctatgtgacttgggggcaaggataaatctgatgcccttatctgttttgaaaaggctgaaattgggagaagccaagccaataatggtgactttgtaactagcttattgttctttggcacacccaagaggagtcatcgaaaatgtccttgttaaggtggacaagtttatatttctagctgacttcatagtacttgatatggaagaggttaaaaatatccccatcatccttaggaggccattcttgacaacaagctaagtcgacgttcaaaaaggtgagttgaagctgagagtacaaggggaagaagttgtgttcaatgtgctcaaagctatgacttatccttaggctagtgataatttctttttggttgatgttttggggattttggtggaagaacggaaacctatagaagatcctctcgagttgagtttagtggaagatgaggtgattgagaaagatggaaaggaagccatggagtatgctaaatggttgaattattatgggacattgaaaagaaaatattttaaatagctttgggcagttctaaaaaagtcattacctttatctgagaagccactgtagttagaactaaaggttcttcctaaccatctatggtatgagattctgagtaaggacaagacacttctagttattattttggcttcactttttgatgtggaaactaattttttttaagaattttatgggtgcatatgaaagccattgggtggaaattggcagatattaaggggatcattccctccacagtgatgcatcaaattttaatggaggatggagtcaagctaaccattgatgcccattaagatctactctaatcttgccttggtgggatatcttcccctctttcttcatctctaggcagaccctggaattggttagtcctaccatatgctctttcaggcaagatctgatcatcgttggtgggggtgggcaatatccaatctaattcaatctaattgaaatgaaccgatcaaatccagaccaattacaaaaaattggatatccaattacaattggattggatgtaaaaagttgaattcttattggattggatcggttactggatgtgattttcaaaatctaattaaaattaattcaatccaattcatttatatatgttaaaaaattacttatatttatttatataa

SEQ ID NO: 239929 - DNA, 911 bp, Cannabis indica
tacattcaaagcatgaacaattacaatggtcccttgtcggaccaactatcgggcaccctatcgtcccatatcatacctaagttaaaataccaaaatttaatgaggtattaggcccaccatcgtcctgaatcggacctatattgggcctaagttaaactacaaaaattacaatatacatcaggctaattgaaaaatactaacattatgaggtatatcgaaccaacatcagaccctacatcggtcctatcgggcctcactaaaacacaaaaagtacacattattgggcactaaaaccctacatcgggtctatatcggacctacgtcttcaacctaaatcctttcccaacaacatgatacatcgagcctatattgggcctatatcgggccaagctaaaaaactagattcttccctaaaagatagattcgaccaatcaaaccctaaatctaatccaaactcaaaaatcacagaggtttaaccctaaatctcaataaacctatcaataatctcttacattttaacccttaatcatgcaaaaatacaatacattgtcgtggttggagaagttgtggtcatgatggtgggtcaacctttgttgggtctgttcagagagcgctagagagaagggatcgagggggacgcgggtggtgggtggtgggttgagctccttgctccgttcagagagggagggagaaaggaggaagagagagagatgtacgggccggtgtgttgaaatgggaggaataattttgagttttatgaaaagttaacctattctacaaattttgatatacttaaatttagtgtacacattttagtccaataaaagcatagaaattcaaattttcaattttaaataagatttcatgaaaaagaaatgaaaattcaaggtggaagatgaacatgaaataat

SEQ ID NO: 239930 - DNA, 852 bp, Cannabis indica
aaatgtatacgggcaaagaagatattttgtctcattaaatattttaaaaatactttaccatgatctagatttactaacatgtatgtttgattataagactataatctaacatcctaaatatgaatttcttggggggagtggtgatctttgggaatatactactttaccaatacctagcccaccaaactaacaccaacaacaacaacaatcacatcaaatcccacaacagcaacaacaactaaaaatccaacgacaacaacagtaacacacctaacaaaaatgacggcagccaccaacacaactacagcaacaatagccgcaagtccaaccacaacaacaatgacaatcaatcaacccactatagtagcaacaacaggtccaataacaacaaccttaataaagacaccatcaataataataacaacaccaacaacctaataacaagaacaattagtggccatcatttctaccaagggcagacatcctaccccttggcagtagtctggccaaccacttgccaccactcttcctagtgttcctcccctaaactttaaattccctctaaagccaaaggctcctaggcaggaacttttaaagcaactcgagttcgcatagtgtctgctcagaaggcgtcatcacaaacaaagggatgtccttcaaaaaaggggtaacaatatctcaatcgttaagagagttgagattactgagggaatttgcacttctacttgttggaattattttaccaggatctagatttactaacaagtatgttatttacatcctaaatatgaacttctaaaaatgatatgaaataaacacatataaagtataagaaaccttacagtggatgca

SEQ ID NO: 239931 - DNA, 1112 bp, Cannabis indica
cctcgaattagggttcgatgcttgcgtgtgtttgacggttacactccttgtaatgagtgcgtaacatatacttttagggggaaattcaaaaaattcgaatttgggaatgattaatcctcttttcagattgcttataaataggattaaggatccctaacaatccttttagccattttacactagagcaaagatcttttagccaaattttctcccaaatcgttcaaggaattcacaggaaaacttctaatgattccatccaagcagagcgagaaagcttcaaattagtgactaagttcttcatttctttctgttacatatttgcaatgaaatgcatgcctgatttctggattttttgctatgaatctcgcctgttcttgaactgttcttggttaaccatagaatactgagttttaggacttcaaaatctcgtttatgtataaccttaacatctgattatctggctgcgctttgagtttaaccttacaacattcatttccactcgtccatagggttttagtgaaactcagattccaatttgaagtttttacctcaatttccataaataggaaagctaggcaactttccttccaaatttagatacacaaaatgtggacaccaatttaaatactccaaccgaagatatacaataaataataaaatatttttgtcaattaaatatgtcaaaaatggaattaacataagatttatcaatttttccctctgaacaagttatttgtaagacattatgttctaatatattcacattcatttgatgaaagaaaagaacctacagaaggaagcaaagagatcacgcacgatcttgtataaccaatctaatataggattaactctcataaaaggaggggccatcctactgaacttgcggagaactgctcttggccaacctgcaagattaaagaaggctgttgggatacaactaacaatacagccgtaccaaactcttaatagaacaagtaataattgaactacttttaatatcaaacacaatgatactagaaattgaatggtctcgtctgctttcactaagctaaaatgaaacaactaagactcttttttatacatatatatgtagctaataatagaaaaaaaaa

SEQ ID NO: 239932 - DNA, 1853 bp, Cannabis indica
aacaaaaaataagaaggttttattggtaattttacaaaatatagattctaaaactggtatttaatgagtcgaatttcattttgatattccatttgtcttgttgataagccttcagcaaagtcattgttataaattgcatgttggaattttcatttgattatataaattttgtcttgcttatgtataggtctagtctaaatgcaacttatttttattgcagaaagcttaccaaggagctctgcgaagtgatagacaactacagtatcgtcaactttacaaccctcgatatccaggtgtgtttgtcaatttattctgtgtttcgatcatcgacatttaaattttagtaatgtggttgtactcgtttgttcaggataaagaaagcgtagggaatctagtgaagctcatagacaaaagcaatggatacattttcgccggaatagaagcaagtgcagttgaatttagcaagattgctatcggtcccactgattgggattattacagatatccttttactctcgtctttttttttctttcttctaactcttcattttaccgattagactctctgttttgttatatggtaaaatggaacctgtattttttcaaaatgatacaaagtagtaccctaatttcaattttcaacaatttaaatcaggttgttaataaattgtattttgagaaaaaaaaaaattaattcacggtactattttaagaaatacaaggttcaatttatcatttaacgaaacggaagatttaatctgtaacttttgcgaaatacatagttcacaataatatttacctatgaagttttttcttaacaaaactgtttacagttgcagcagtgcaagaaaagtatatgaaggatgatgaagattttgatcgaaacaattgatatcgggtaaactttaaaagctccattttgtgtaagaaagattgtgcttattgaagagttgtgttattgatttgatacaattttggttacatgtgaatgtgattagaggtgtattgaggaaatgaagtgaagaattatgagtctaactaattatagagtttgtagcctttgattggatcaatttactagttaaaatagttattatgagttttgtaaaggaaaaaatttcaaacttttatttttagaatattgtgatatttttcttttgcttgaaagtttatcttgatttgaatggatcttttcaacaaaaatattattgagtgattttcacctcttgctttagtttgattcttggagttcgtactattgaatcttgaactaagtaagcatctatagacaacattgcatccttaatccatatagatgctgatcttgaagttatcacaacctttaaattatactcattgtaatctgcagaataagagaaaaacagtttgaaacatacttctacattgtcacactctagtgttgcagtgataatgggaggaactccaagtaacatctaaagaaagagttaaagaacagatgatgaaacaaccttgttagaaaatagaatgtcctgtcaaaggatcaatgcagttcattgtagttttagaccttgcagaccaataaaaaaacatatgaattttctgtgtttattaatctatatttaattttacaaatctagtgatcaaaggggtacaagttgaataataagccagactacaaggaatgtatttcgcgccaaggaattctaaatacttgatcgaccattttaagctaccgaagctaacttagtcgtgagaaaacttcattcctctcttttctttttattgcccttcatgtcgccacactggagggacatgggaacgtaaaaaaggaaaatcctaatcaacttgttccgattgagtacatcttcatc

SEQ ID NO: 239933 - DNA, 1183 bp, Cannabis indica
ccggtgacaattccgacaatcattgtagtttcatttattgaatttttttttaaaaaaaaaaaaatatgaagagaattttaatattttttatggtaatttaaagtagcatatcctatatatatgttaagtttttatttaaatattatattttcttttataaattttcttactatatttatttatttatgtaaatactcaaaaaaagaaaaagaaaaaaaaaaaagtacctaggatactttgagcccatgatctccttttggccatattttcgccaagtgtagttatcttccggtgggatttcagtatttccaatttgaggtgcagccatcttcactatgcgaatttccttatcatcctttctgcaattttggtaatgtattgtaatgcatataggtgagatcaaaattcaaatgatagatactgccaactattgacctaaaacaacaaactttaatggttagtttgttggtatacttttccaagaaagatactcgtaattactttacgctttccaaacattttccttacgacttgtgttatagcatatgatataaataataattttcaaagcaaattcaaataaaatataatacaaacacaattctatctttcttaacaaaataatctactactatactatatttttatatttaattattcccaacaaggcaacaaccatggcactcacaggatacatgtatgtaaaatttaatattgaagaagatcattgtgaaccaaaactagctaatagctataaaatataattaaaaagctgcgtgagtataacaaattaatcaattagagtaagagagatactacgaaatattatatatgattatatatatttatcatttattaaatgtataaattaaacaataatgaccatatgacaccaacatatatgagcattcttataattttatgtatttttattttatattaaaatatataagattcaaaactaaattatcccaatataaatatatagtgtctttagcaaatattcttaatgtatataaattattaagttacctttttcgcggtctttgtgagtagactgctgatgatgatgagccaagaatttccacatttctaaccatattattggaaatattattcctattttcatgttgaggatgaccaaaacccctcataacaatatcagacatgctcttattatcat

SEQ ID NO: 239934 - DNA, 891 bp, Cannabis indica
cctctctctctaactatactaactttcttctgtttcttgtgcatgtacgagcttcagctccttcctcttcaagcttttcaactctggatcttgaagaatatcactcaaccgtaggcctaactggatttgcagcaggtatatatatagcactagggtttctgatttggtttagtagttagttagttacagaaattagttaggtgtggattataacctaatccattctaactaatttctgttagggatatagaagtcgaaggccaaattaaggatttgcatgtatttacccttttatccttgtaagtaagttgatatcagtgtaagtggaggtttaatcaacaaaacactccctaaagctgcaactcttacaacatgtcctgcttaacaacacattaagtaccaatcagaaaataaaatctaagacataataatgcttaattaacacaagaagcatagaattaatagtaaaatttaatgtaagctacttaaagttattttaccaactttgacaaataatacaaaataagacatttcccaactgtgtgtggctaatttcagaacacttattattaattacagtacatcaattagtttctcacaatattaattttatagattatttttatgtgtgtatacatacattttaaaagattccatgccatttgtgggaaaagatgttagacaactattcttttcaaaacatttctagttgtgaaaatactagctagtctgtgtatgagaagaaaacaaatgtcatattattcttctaccaataccaaaatctgttaagaaaaaaggaaaataaaacaattagttacctcacgacagattatgctttctttacttttttgtggggttataccacagatcatgtttcattacattgaaact

SEQ ID NO: 239935 - DNA, 1584 bp, Cannabis indica
acttctaaattgataactaatcagattgtaatgagttttatttagggcataaaacccaacacagatcccacctatagcaatatggatagtgattccctcgatatcaatacaactaaaaggagagtagatcattacccgttatcacaaggtggtcgaacctctataacaaatcttgttgtctattatttcttattcctatttgtgcatacacgtggtaagcatcagatctgtcgaccccgctttcggttgatcacttttcagtatcaacatattttactcataattgggatcgtgaacctaatctgagtcaaaatatccaattgtgactataccgcattaaattttcataataatgtagtctattagcacataatattaaaaaatttacaatttttcccttattgggttaaaattacaaaaatgcccatataacataaatagggacttaaactcaaatattatcatataatatcgcataattaattatatagtaatataagcccacattaatatttaattaagttaattaggattgctaaataatttctcattttaggatattacaatcaggactttaggcactcgtattctaagcaaaatacattctcgggctaggacatgtgccaccaaaagctactctagagatatctcgaaaagatgataatttgtgaagacctttattttttattatttatgtatttcaaacttgatttaacccaaactaagaaaaagatgtgtctggatagaaaaccctacgttgtatgatataaacctataaaaaggtcataacaccagttgtaaagggactcacgctctctcattctaaaatctcactagagaattgaactcttcaaaaatataaccttggagaactcttgttgaacatttagatcaataaaactacaagtgaactagcctattgccattaaaaggagtgaaccactataaaaattcgttgttcatcattgtcaaatttctttccataaaccgatttacttttatcgatattcacttgtcttcatcttgcttttacgatctgttgatgaaaaacttcgtcagcaagtgtcaataaataaaaaagtattatttactgtggtgtaaaatttagctcatgctgtattttgtggtaaatttggtacaacttttagtaagtgccaaatttataccatattatacactatcattagagttcaattttgtgaacacgggctaaaagatacatatacattacatttataacactttattatagatgctctctaatagtagtgtctaatgcctaatagcaatgctcatcttttatttatgagtaatgctaaaagacactaatggtgcctagcaccctcctcgttgtcatgatacaattaagtattaagtcccatataatttaatataataatttttagggaattcatttattaatcgcagagtgccacctctagaatatgctaggtattactggtgtttaatagtaatatttttttatttatatagtattactattggataccaatagcacttaatatctttaagacgtgttcctttacaataaattaataaaattctctaaaaattattatatta

SEQ ID NO: 239936 - DNA, 678 bp, Cannabis indica
cataggttccaatgccagcgggggttttcctagtatttctttcaacggatcatcattagaattaaaatcacttttaaaaaattagtgtttaacatgtgaagatcttaatcccttttatggtgtttaacatgtgaaggtatcctttatttgcatttcccattttttattgccacgaatttttcacattaatatttaaattctataaatatgtagtacatttattgtagagtttttcatccctaaaatatatcaacatagaaatatactataatcacgagtctactattaattcaaaccaaaagacgactttaaggaagaaatataaatatgatgaatttattagcaaaattgaattgacaaaagtgttttatttttcttccttttccattacatcttcgtagctttttaattagaatttgctatattatgtcccgtataatttacgcagaagacgagatgacttggactttgtctaaccctaattaatgttcgtaacacaaatattatacataattatatatattagtattagaatataaattctcaaaatataataaataaaattaatataatattattggtaatatcataataatatatataattttctttctgtcattaaatactggcaacagtacgataccacgcgtatatacatgtatatatactagtaaaaac

SEQ ID NO: 239937 - DNA, 757 bp, Cannabis indica
actcgagatgaatactcatatttctgtacacgtgtgttcttgttttacttgaatactcgcatattttgatgctgtctaaatttttctaacaatttaaagaccctaagagaatctggaagaataagaattaaagattgttatacctccaatgttcatataattaattgtataaatagtttgtatatgcatatatgtgtgtgcgtgtactgaatttgtataaacacttgatttgtttattattatgacattttcattcaatttctcatatttttttgcagttaaaagagaattatcacatgtcatatacaaatggcatcaaagagaagaagtagcaaacatattttcactatacatttgcagttggtgacttagagatcatgaagtttgtgggggagaaggtcttcaagaagaataaaaagaagctttttttcttatgtttttttattaggaaatataattattcattatgtagactgaatgtaaaaataattagtttataaaaatatatttaataaaataatttaaattcgtgttcatttatgttcattggtataactttatcaaaaatattatggataagcatttataatatatttcatgaatatatgcatgtaaaaaaaataaattaaaacagttacagagtcagaagaatcaatagagaatattaatttaaaagtcttttcaataattttagttaaaataataatatttcttatatagtttgcaaaacatgcaaactatatggtataacataata

SEQ ID NO: 239938 - DNA, 581 bp, Cannabis indica
agaaataagagaccgatgatttcttcagtggcagggttgatgatggagattcgcttcttcaagactggctctgcccatttaccatcgatgaagagctgcctactgggtatcggaatcgccattattatctagcttatcctttctgtctgatatgatttcgaggtggtatggtggagtgtagtagctttcctcttcttcctcttgtggttattatatataattttttatagaaatgctaaaaggtacgtgtctagtatttttttatccggtttcatatagtagtttaatgtattaacttccacataacaatgctaatttttttctcagaaattctactgtgcaacaaaaaaaataagaaggaccccaaatacattctaattttggttgagaaatactaaaaggccaccgaatataaccgaatataaaagttagagtaattaggatttttgttcctatactaaattaagctcctttaatttgtctgaaaattctttgatattattggatttaacaatttttgcctaattttatttaattttgtattaaattatactcgctggattttaatatttaccaaatca

SEQ ID NO: 239939 - DNA, 2088 bp, Cannabis indica
taggggtacaagacgagttagatcctcagataggagctaagagtgtgctcgaacctatggaagaattggaagacgtacaaatttgtgaaaagttttgacaaaggtgatccatgttaggaagggcattgatcccagcaaaagaactaaaatagtggaaaccatcaaagattcgacaaatatctttgcatggagtcatgaggacatgactggcatcagtttaaacgtcatctgccatgttctaaacgttaaaaaaaatgtaccagttgtgtagaagaaaaggtatccccttttgacctggtaaaatcagaggcgttaaaacaagaagtgggaaaaatgttgtcaaacatatcttcatctgtgatgtctattacttagagtggttggctaacctagttcaagtaccaaaacctaacaagacgtggtgagtgtgcattgacttcacaaacttgaacaagacatgtcccaaagattgcttccctttatcctgaatcgacaaaatggtagatgccacatctggttacgagttgttatctttcatggatgcttactctagttacaaccagattaaaatgcacctagctgatcaagaatgtactagcttccaaacggataaaggtgtacattgttaccttgtcatgccttttgggctaaagaatgtgggagcaacttaccaatagttgctcaattggacgttcaaaaatctactgagatgaaacatggaggtttatgtagatgacatgatgatcaagtctaaaaccagtaagaaccattctgacaacctcaaagaatgttttgaagtagtaagaaagtacgagacgaagctcaatccaaaagagttcattttcagagttaggtcaagaaattttttaggattcatagtcagccagtgagggatagaagctaaccccaagaagatacaagcttttctagatatgtcctaccccaggaagcataaggatgtgcaaagcttggcgcaaaagataacagccctgagccattttatcgtcaaatccactgacaaatgcatcccatttttgacggaagacttgaaaacttgctcccagaatgaaagtgtgtatgtttgtagattattcagaggaaacttgagttgcatacttctatagtcatgaagacaataatgtgtttgtatccacaaattttatctttctacaacatgactacatgaaaaggtcacaaaccacacagtcaagtggttatcgaagaatttagaaatgagcagatttttgaaccatcaacttcagtaccatcagttgaacaaccaacagtggttgccacagttcttgaaaaggaaaccccgatatatcatcgtagtgggagggttgtgagacaatctctttactatgaacacgaggcacatgttcttgtctctgacacaaacaaggacattccatcgacttaccagaaagcaacagataaccctgactcagacaaatagaatgatggcatggatcaagaaattgattccatgtgcagcaacaaagtttgggattatgaaatcctatttgaaggtataacacctataggatgcaaatggatttacaagaagaagagaaatattgaaaggaaggtagagacctttaaagatagggtcgtagcaaaagcctacacacaacaagaaggcgtcaattatgaagaaaccttctctcttatggcgattcttaaatccatttgcatttttctgtccatagctgccacttatgattatgagatatagaaagtggaagtcaaggctgcttttctaaatggaaatcgtgacaaaattatttatataaaacaacctaaagggtatgtgcaacaagttgaagatcaaaaggtttgtaaatttcttaagtccatttatggattgaagcaagcctttagatcttagaatatcacttaataaaactattaaaaagtatggctttaaacaaaataaagatgaagcttgtgtatacaaatacattaagggcaatgtagtggtattcttggttctttatgttgatgacattctacttattggaaacaatgtaaaaaggttatcagacaaagaagtggttagctgaacaatttcaaatgaaagatttggga

SEQ ID NO: 239940 - DNA, 2865 bp, Cannabis indica
cgacgttcgattacaccggagtccgagttgcaaagtcgaagttgggatcggagtacctaaaattttgaattaagaaaaaaaattatttaaaaaattttttgagagtgattttttttcataagtttaaatttttagatttttaaattaaaaaattaaaaagaataaaactaatttaatagaacatttattaaaaaaatattttcatttttctaatttaaaaacagaaaattaattataaaggcgttaccaaatgcaccctaatataataaacaatcacatagaaacattattttaagggtattttttttttttttttatttatactcttttatgtttatttataattttataaattaaactttttatttgtagtttataaatttaattttaaaaaatgcattttaaaattacaaaagtacgacattttattacaaaaaaaatatatggtaaaacaacaaaacaaaaaataatagaaaaacaacgtgatatcaaacacactgtaatatttaaatcatccaaaaataaattataaaacaacaaaaaaaaaaataacatcgaaaacaaatagaaaaacaacaagatatatcaactccactgcaatatgcaaattaactagagctcaatagtaaatgaactataaaaaaaaataaaaaagcaaaaacacaacatcaaaaaacttataactgtattttaaaataagtataagaagatatagtaaatctatacataatgacaattacacataaaacatcagctaaccaataattgaagatcaatcatatataaattaacacatttatatggtttaataaaataattaagaatttattgaatttactgcaataacaaaaaagatatatacttaattaaaaataaactagcaactaaaaaatatacatatacaagaatgagaaaaagaaattatgttcttaaaaacaattattgaaagagggaagtgggtggactcaaaaattgagagggatgggcagggttgcaccttcgggacggtggtggaggtggtgggagaattgcatggggttagggttaggagtgagacaatagtttcaaattatgattagaagaaggagatgagttgtgagaatgttagtttggaaattattgaaaataaatgtatcgtgtaataaagaagttcaaggtaatattaaaaaaaaaaagaatttttgtgatgtatttcgaagattaaaaaggagtattgtactgctaatataaccacctcaaaattctatctctttctatagatgtaagaatgagtaccgttgacgctaaaaagtggtcaacactaactcgctagattggcgagatgaataatgagtttaagtaaaacatttggagagatacacacaatttataatagtttatttctcatgttgcgacagtaatggagctacgtcaacttccaatttttatttcttacgagatgctaactacagaaaagactaagagcatgtttttatttcttctaaggctgatagtcattttttgaagctcggtagaacccgttgcgagtaacatggagcttctttttgtaactcccttagggtgaaatttgagcttgataacttccgaattacaattgaattgtgagacttaactttatagagcattcaaatgtcttcgaaacaaaagttgaatcgcatcaactaattcaacattgagtgtgttatgactattttacagaaggcagttcacaacccaaggcccaggttgacatatgacgtcaacctggacggtgggtaagtgaaaagaagtccaaggaatgtactttatgatgcctaagtgatattttgacattagttagtctgtttctgtgttttggagaagctggtcaccaattttcaaagatgttactattctgcgaaaattggagactcgatactcttaatttttgagtgagtttcccatattggaaatgagaaatgaaaattatgaatttgacttcttggacttcatggatattttttattgtgaaaaactagacggatggttgaaacagaattagaatcagataggcagaacccaacgtaccagtctatttatcaaccaaggtgatgggtactcattttggaacttccataatgttgtttagatactttcaaagttctagaacttgaggatgaggtctcccaccttgtttttgaccattctagatacaatgatttaatcataattgacatttgagtgatagaaaccagcacatcaggttgattgtcaacttgggcgctgggcccaacactaggtcaacctgggcgttgggccctttttctagggtctcgagattgtggttttcatcccgaattttcttgaatcttcattatttttatgatagaaaaactggctgaaacactttttcaagaacttgattagaaacggcccaggttaacaatatgtcaaccagggtgctaggtttattgccctttggaacatccgtgtggtccccagaaatagttgaatcttaatctttgttgaaaacagagaagttgcttgaaggaattctcaaaaaatatcatcaaaattagcctaggtttacaaaatgtcaacctggacgctgggcattgcttctagcacccaagaagtgttgtttcttccctgaaactacctatttcctaattttggatgaagatgatgcaaaatttggatcattgatatgatacttggtagtcacccatattgataaattgtcaacttgggcgttgggtccctaagcatcgggtgctccgggtgctcaaaaatgaactttctacgaatctaatttggatgcctcaaatatgtctatggtatgtctagttgatgtgccagcacaaattttgacccatttgcatgaagacggtcctaaaaaactgaaac

SEQ ID NO: 239941 - DNA, 1234 bp, Cannabis indica
ctaaatacaacaacgtatgcgaccttcatagtttaagttttctattcatctacttgcacaagctcgcatgcttaggatgcaatctgttgaaacgagactaacgagcctcgtagttaggtatctgtgtccttatcgagttacgtatgtggatacattttcattgttgatgacctagaacgtgcgagttcttatcgagtcatcgagcatatttaagtcttatggaccaactcgcaatgtaaagaaacgatctttactaagtcgtgggagaagtctttatagacatcgcatatatcctggtatatttgagacttgaataattccttcttcgtcctgcatcatgcgaggcataacaatgcaagactctatcaagatcacatcatttcgctgatttttgttcaagagaggtttaaactcgagaggtttcccctggaagtttaacaattctcaaagagatgtgagtccacgtttcattcttacaggagcctggtctcgattttgtaggtaaaaaattcgcactataacataaataattatatgttatatatatacataattacattttaataagtaataaataaaaaatttaatttaaatattttagtattaattgactcttttaacaatattagttttaagtgttaattttagcaaaaaaacaaaataacaaaattcgttagattaatatattctattagataacagtattttttatctataaatataaatataaatatactaagaatcaacaatgggagcaaaaaagtaagtattaatttttgtggaattttttccctgctttggaatgttctagggtcctttctggtattttccagtttactcccagtttctcttccagttcacttccacttcccaaccgtcgtttttcttcttctccttctctaattaattcatcttcattataccctgcatatcatcattgcttttcattaatgcagcccccgttttccctctaccgagactaccattaatgcttgctcagataacctttggttctccttcctttccctatcctttcatgcattcaataactgtcttgttcttcagatggaggcgaatcattgccctatggctgggcagacgaggatctagacctccagcagctcgaatggcgcatgtatctcctcatcttccaggttatatttacttcaggtatatctttctcttctttttctatttaaagaccagcattttgttttctgatcatctttcatct

SEQ ID NO: 239942 - DNA, 884 bp, Cannabis indica
ttttctttcttatatgacagatccaacgtaaattgcgtcaactcctccttaaacacaaagtattagacaaaacaatgattggagccagaaataatcggtattatctattatatatattatttaattttaatttgatttttatacaaagtcaatatttagattaattcacaaaaataatttttaattaataaattctcacctttattatgtcccaaactcactactcaattatatttacttatattttatatcgtttgaaaggtctatactctactaattttattttattatttttccagagatgtagatttcattacaggtacacaatttcatacctgtttaattatatatagctatatatctactttatttggactattatacctgtttaattcttttcatttaacatatttactaaaaatcagtgccggtaaatcctcactatgaacaaagattaatggaccgcgaaaaaataaaggaagagaagagaaatgagtggaatgaaagaaaaatgttgttcactacaaaatacaaagagtcagctctagttgcggccacactgattgcaacagtaacatttacagctgggttcactttgcccggcggtttaataagtaatgagattggaaatcaacaacaacaacaagttattggcactgctgttctcaccaataacaaagcctttcaagcgttcatcataactgacacaatagccatggtgctctctactacgtccgtctttatgaacctcttcctcactatagtgtcttctgccgaacatagtgaagacttgctgtcatactatattgtgtctatggtttagcaatggtggctatgggattaatggtgatagcatttgttacgggtacatacgcagtattgtc

SEQ ID NO: 239943 - DNA, 1820 bp, Cannabis indica
ctagttctacaatggagaggtccacgacgtcggtgatttacaacgaacgaaggtcacggaaggaagatctgggtacgttggtgagattgggcagatctggattcgttggtgagactgggaagatctgggctcgttggtgaggatgggcagatctgggttcgcgtagactggttttggggttggagtcgacggtggtgactggtgagggagatatcaacaatggatttggttgatagggtgctgcaaattttattagtatgaaattaggttttactttggttttctttcttgaataatctgaccagttcaatctcaatatttggatgggtatatgtatgtgttgattttaaaggataaatctgtgtatatatatatattagtttttttttattattaataattaataaatgagggaatgaaaattgcgtaaccatttctctagccctctcacaaacattactcgattcaattaaaaaaattgtggagagagaaatggaaggatcacctgtttgggtttcagttttgagagtagaccccagatgagaaaagcagcagctatggacaacgacgagttctttctgggtctagtatatttatatatatatatgggtattggagggagagatctgtttatcttcctcatatatataaatctgggtagtgtgtgaattatgaatgtaatgtatattggctttcatttattctgcaattgttcttgttcctcaagaacaatcaaagtatatatgagtagtttcgttttcaacaaacaaaaaaaaaaaaaaaaactttaagtttgtatgatattgagacttaattttaattaaagtttaacttaatgtaatttcttttttaaaagaacttaaggtatatttttgatgtttttgtttttctattgccatgtgtctgtcacttaacaaatctaggtggcatttatgtatgagcaaaaagaaaatcgtaacagtagaggttttgacactattttttttgaattgggtgatattatctatcacagaagtacatggcatcccattgtggaaaatagattaatgttaacacttattagagttataccagttttcctttaaagaatatcaattgtctacaaaactacaccaaccaacaattgcaccccctccagtcataaaaaaaaaaaaacataacaaaaattgaatcttttctcatgatccaatcattataaactgatttgggttattattattaccttcgggacacaaaaggaacaacctcaaataagaccacaagcagcttgctaagtgctaatattgacaatataccaaaccaaaatatgaaaatattacttccacaattaatccttttgtataaatagcatatattttacatattattgcatattttattctacatatattctaaaaaaaaattatatattcataactaataaaaaaatattaattttttgatgtaatcaactttaaatgtaataataattataagtgagatataataattgttttgaaatttatatgatataattaaaaaatataattaaattatattagatttaattttattattattatttaatattatacaaatcctaagcagggtcggccctgacttttagtgggccatagaaaaaaaaattattttgggtccttatttagaaaaaaatatggtatttttcaaaatcagtaaaaaaaaaataagtataattttaaaaggttaaatattttaaaaggttaaaaaaattaatgtaacatattaaaatgaaaataattgatcttcatgtcattaattttaaattgtagtaataattataagttagagataataataac

SEQ ID NO: 239944 - DNA, 1433 bp, Cannabis indica
atcatatttttgttgaatgttaaacatttaactttcataatgttcttttgctaattgcaatacacatgaaagagtcaaattcagattcagatttagatttagcttttggcaattgaaagagctacttgattctgctaggccaacatgcttgaaggagggggcaagacaccaatacttgatccttctgaactcgaagactttggatttaagctcgtggcctatccactttccttaattggggtatctatgcaagctatgcaggttggtatcttaactttattcactttccaatttagtcccaaattaaaccctacaatcttgaaggaagggttctaggcattgcacatttaaaacttcatttgatttgatttgttttaaatttatagtaactatgttatgaaatttttgtttggaaaaaccacattgacacctttgacttggaataaaatttcagtgacaccctttacaaaaattataagtactttgttgcattctgttttaatgattgctattaacctagacttctagttctagattaatagttacttcatgaaggtgactccagtgactaaactgcaggatgctcttgcttctatcaaagagggtcatattcctcataaaagcatgccatcttttgacaagatgaaagaaattctaggttttaacagttactatgaagaagaggagctatatgccaccactagctcgcgatctacacaaaaagttgagtgagaagcctcttacactggtgcatccaaaatggtcatgttcgctcaataattactgaaagctagtaatggaattttctaactttatcgtgtctttaatttgtttgtttgtttgtttgtttttttttgtcatttttgtaaggtatggttgcttgaatcaagcatgatggacatctactttctttggctagggtgctctctatcatttgacgaatatgtgaaaatgaggagtggtaattcgtgttgtctatcatatattcttgttagttgttagttgatatgtctaatgaccctaacttgtctgtaaaattcgtgtgtcgactaaaattatcatgcactatatgttcatcaaatttgtatttcatatttgatccttttttttttttttcgaaaattagcgttcaataaagaagaaaatgttagacttcatggttattacagataatatttgttggaatgactcatacttcaactatactagataagttttgagtagaaactcaatataatttttagaaataaaaaatacttagaaagtctattacaatacagcatatagttatcaatactctaattggaacaagttcaatttagagttttgattatcttctttgagtcgctctcaatcaacacaaattggtgcttccaaaccaccaccgtctcaaacgccaacaagcaaggcgcatcttcaccaatgagagagtc

SEQ ID NO: 239945 - DNA, 932 bp, Cannabis indica
tctgtagttgattggggttgtatatctgataacttggctgttacaactcggcatcagtaattttttaggtttatctattttttgcctttcaactttgtttacacctctcgttaaaagacctatttttctcaaaatgttccaaaatttagattttgcgctcccaaattagagtgggtggtggatttttggtgggggtggttttgggtagcgagtaggacgaggagtgaaagggaagcataggggatgacagtgtgatcttggggcggtctagctcaaacagaactgagtaaagaaaagcttgaatggagggaagcattgggttgaatagaaagggagaagctgaggacgatggcctgtagtttggggtgatgcaatggggttgtttagatcgaggttcaagtgaggtaggacagtgactgggaaaggcaaaaatgatagttggagctagtggctatggaggttcaggtgtaaaaggatgaagacgaatgggagagagaagagaagggtcaggctaagaatgaaaaaagaaaacggaaaaagataaaataatttatttatcttttttaaaaaaaaaataaaattaaagtaactttatgatttggaccaataatttatcagttgctactaattccaaaaataagccataaacaactaaattcaagatttaaaatagtctctaacacaattcaacctcaaataaaactaaacccccgaatttccaaaaatcacaaaaaagaaccaagcttaaaacttcataaacaacaaggaataaagtatctaaaacttacctttgactttggcttaaggtttctcctcaatccttgctcaaaattgcttgaatatggtagcctaaacttggtttttccttggttcaaagagggtcacgagagagagagagagagagagagagagagagagagagagagagagag

SEQ ID NO: 239946 - DNA, 969 bp, Cannabis indica
accgtaccaacatcatcatttttcctttttacaccactaggaggccatttacccttagtcgaatgtgtagacaccaaattagctatcaaactaccagcaccacgtccatctagggaggatgtacgcctcttccacgtcttcttcttttgggctttgaccgaaggcttgaaggtactttgaaacaacttacccacctctgctttagagtaaataatggctttttgtttatcgtggcttctaatttcaacagttttatgggactcttcaaaatgctatacttgtttaggagggcaaggttgatgcaccccgactgctggagaggtagtggcccctgaatcctccaccagaatacttttaaaatgcagttgaatatcttgcagtggagacaccattaaattactagtggaaggtgggaactcctcctcagaattaagtcgagtaggatggacaggaggggcatcagttcttattgtttggattgaagggagctccccaattataggcttactttttgaagtagccaccttactattgtgtagctcctgctccagttctcagctttttaagatagatgttgtagcaaactcttccaccatgtttcttcttggctgagagcatttaacagtatccacaattcttctcacttttctcatgttcataaaatgtgactcaatttgtttgatactaccatgctatccccaaatcctaggcggagaggttggagcacacatccacaatccatacctttcattgtgaattggccttgtttccttatcttgaaagtctttaagaggattatctaaagctttatggccaataataccacaatcataacagaattccagaggtgctcatattgaaagagtagagacaccttcgtgcccttctcattaatgaccactcttaagccacgtttgagatgtctagtaatattgatgtgcacacagacttttataatctaattagcca

SEQ ID NO: 239947 - DNA, 1984 bp, Cannabis indica
aaataagtatttatatttcaataatttttttcaaactatttttacttaatttttcattcgctcaattataacaacttaacatttaactttagaacgagatgttaattaaaccggccacattgtattataccacaccaaaatattttatacggtaaccgtacatagtttacaaccttccatgatgcggttgtggtttggtcaaattttttcctaatcacaccacaccaaatttctagagaaatactaattttattataattctcatatcatttaaagctcactattataatttttagctttagtttttttcattggtctaaggttgaaaaaaaatttggtaccgaaaagtattaaggcgaagacgcaagtcttgaaatcaccgaaaatgtacgaaaaacctatatcttcgattattttatttatttttatattaaagaaattcatacttatacttatacccaaaattgaagccactatttaacaccgccgcatgtgaactctccaaacccacaaaactctaaaatcaaaattcttaaacaaacattacttttcaatcaccaccatttaataccatcaaattttttagcaccgtgcataattttccaacaactgcagtggactttttgacccttatattaaaatgatcgtataccttaatgcaagctaaaagacaacatcaaaattctcaaaatcactgccattagtcgattgtcattctccaaaagccctaaatatctgtcggcctaaactctcacatctaccctaatatcctaaaataaataaatttatatagtgctatgtgttttaggtaagaaaactagaagatttaaaaaaaatgatggtctatatatggagaaaatagagctttaagggtgatggtgtggcaacagtttttcgttgagagaaagatgaagaagaaagaagaaatgagagtttaagatgtgaaattagggttttataaacttatatcttcaattattatgaaataatcaaagacgtataggcctccacatgtatctaatagggtaggatagtggagatctatatctttggttatttcgaaataaacaaaaacataagtctgcgatttcttttctttttctctagacttttatcttaagattttatattttgtatcataaaaaattaaaaatatacaccatatttttagtactagtaatgcaagattaatttctgttaaataaagaacattctttatttcgtgtcaaataaagtacattctctcaatcgagtcattttttaatatttgcttttcaactgaagtgacaatgaagatatcatggcatcacgtgattgatctacatgtatgtatctgacattaggggttcatcaaactgtctgcatacatgcttcaaaaaactagtggggcacaccaaacccttgcaagcttctaaagttgaggccctattttcttctggaagcataaaacataccatccggcaagcaaacaatacactaggggataaatgtgtgtaaggtgccgctccggctactatgcagaactccacgaagtagcatctcaaaggaagatgggcacccatctccacatagccccagctccaaacaacaaaacctccttcaccacattggatcagcaatgacagacaatttgttctaaaaaaagtcatggattactttctatcatttcatcgtctcgtacttttagaggttgttataagcctagaacttgttttatattgatccatctcccatgaaaatgaatttaagaccaattttagagtagaagcttgctccaccatgacattttctccgtctccttccatttcttcttgttgagatttgctagacattgtgaaagttgaaaaaagtaccaagcagttcgctacccagactaactaagatagtaagggcatgggagaatcctccccataacttcttgggtgtaacgtccccgcttcaagcctccattgagcccttacacccacggaatgaatggctctta

SEQ ID NO: 239948 - DNA, 1135 bp, Cannabis indica
acataaaataggaatgcaagtggccaaacataaaatagaaaaagagtcatacacttgagggtagctcaagtggccataggagaatgcgtgtgtgttggaggtcctgggttcgagtcccaagttatgtattgtgtaatatataaacgcttgaatcaaaaaaaaaaaaaaaagaatgcaagtgggtctaatagcattaaaatttatgtcagtagcttaccaaacataaaataggtatgcaagagggtctaattcagagtaatagctttagcattaacaccttatttggtaagattggatggaaaataggaaaataataagaatgaattgtgtataagccctcaataccaaacaaacataagctttgggtggataagcccaatccaccatattcaataactccctcctttaataccttctaccaaacaagttgtaaggttattttattttattttttgataatgacatgttgtgagttttgatgtgtgtcaaacacatatattagatgtgagatgtgactttgaatacagccaaatatttcatttctacaagagcactaaaatattacatataataagttataaaaaagaaaacaaaattacatataataaaatcactttttataacataaattatcttatatatgttattttgggggaagaaattttgggagctcaatatttcctttggtaaattttctctaactaaattcttacaaagaacaatctcattagtcatggtctattaaatatgtgcctagtttgttatgatagagactacacatcaccaattttataccaaaagaaaactcagagtaaccgaatgagagatttattaatttaaataatttgaagaatattcttcacaagcctaacaaaatttagtataaaaaagtttgagtataaatatataagtttaatttttggtgacaataatacataagttatatttctgtaattttataggtactgactaatgttaagtcattatccacgtgttattttcttatgggtatatttaaattaatttttttagaaaatagtaaaaattcatgatctggaccaatcaggaagtgccacatgacaatttacttaatatttaacaactaagtgttagacttttatttgggcttacatta

SEQ ID NO: 239949 - DNA, 1094 bp, Cannabis indica
attcttaaatagaggttctactgtatatagcacttttaaagaatgctaccactttcatttaacccttcaagctcaaattttggtagtaaaactctctaaactactgaactgttagcaaaattaaggtgttatctattttttataattaactgccaacatggactacttatgtgtacactcttatacacgtggtacgtttatattggtacactaatattattatttaaaattataaaaaatttataatattttgtattttttaaatatttgatttttatttttttttataattttatttaattttaaaatgacttatgaaaaaaattattaagtgtaccaatataaacgtgtcatgtgtacaagagtatacaaataagcagtctatggtggcaattaaccggatgacaccgtaaatttacaaacagtttagtagtttggaagattttacaaccaaaatttgagcttaaaaaattaagtgcaagttaaacaataattaagagtatttagccgccaaaaattcaaataataataaaaaagagattaatatgtaatgatgattgacactttaatttgacggttattaggacaaacaaaatattataatctctttctctttttcctaaccctctctcactctcatttctctgcatttgaattggtaaccctttctcttcatcaaaataaaaacacctttgtgtcactttttttttgtgttgaatgtttgattttttttctccctagattttttttcagttattccatttgaattggctttggacttctggttatggaaatgttagtgaatcggttagatgatttgtttttgctaaaatgaatatgatttgttcttcttgttcttctcgaaacacttaaaatgagttaattgtagtgctgggaaaatataatagatcttagggttctactaattcttcttctaaaattaggtagttcattttgtgttctactatttttagggtttctcttaattctacaaaaaattggtatttttcttctaaattatttcaatattttgagattattttattttacactggagcaacccaaactgtaaaatttaaaaaaaaataagtata

SEQ ID NO: 239950 - DNA, 1439 bp, Cannabis indica
tagattggatggattcaatccaatccaatagaaaaccagtcaatgcattcaatggttagaaccgatccaatccaatatatctattagatcggatcagatcgaatgacacaattcgattggattggatcggatgacaaaattcaatatccaataaataattggattggatcagttgggtctaaattcattagatgtgatacaatgaacagacctaaggatcactccgtctaaggctctctcaagtcgaatggagccaacaactccaccatttaataaaatagaatattccacaattgaaatacaatccaaatttttttcaatgcattcaacatgaaacctcaacttctccataatctttgccaagaaagaccttcacctgatcataagcttttgacatatccaacctaatagcacaatacccaaatgtgatacaaaaataacctttctatgatttttcttatttttattataaatatttgaaaataaaaaatatattacgtaaattatatttgaaatatagaaaaaaaaaatccaatagagcaatatatccaaatatggtaaattatttaaattaattattttgttgtaagtgtgactattttttttctaaatatgtttaactttcttgattataatatttaagccttttgtcttgtatatgttctctatcttgaatgtaagtcatcaattttaaatatattttccatcttggatgtaagttatcagttttgaatgtaacttccatcctagatgtatgtcagatccattttgtttatgtttatgtcatcctgtctgaggtatgtcatcccatataaagtatgttattcgattgactgaaatatgagtcatcccgaccgaccgatcgagaaataagagtcatcccaactgaccgactgagatatatgagtcatcctagccgattgaatgagatatgagtcatccgatcaatcgattgagatatgaaagtcatcccgtccgaccgactgagatacggagtcatcccgatcaattgactgagatacgagagtcattctgaccgaccaactgagatacgagagtcataccgaccgactgactgagatacgagagtcatccctatcgaccatctgagatacaagagtcatcccaactgacctactgagatacgagagtcatctcgatcggccgactgagatatgagtcatctaaccgattgactgagatatgagagtcatcccgaccgatcgattgagatacgagtcattctaactgactgactgagatatgagtcttcctcggcctgatctgagatgaaaattatctcagatcaattcgaattaaatataactttgacttgtccagtgaggctacactcttttttttgaatgaagtgaggctacactcttagttatatatattcatgtatttcggctcctaatcttgatcttctcaatctttca

SEQ ID NO: 239951 - DNA, 1968 bp, Cannabis indica
attaatattgttatttcaatagttaaattgttattagtatttgatttgtcttttgactttgatgtatggcagggttcttttcaaccggtttggagactttagacaaaaaattaaaatttaattttttattttaataaaattattaatcaataatttataaatttaatttttttaaaaaaaaatcatataacattaattttagaataaataataattttagagtcatcacaagtttttattattaagtttttagaaatgtatgtttagtgttacgaacagtgtatacattataaaaaaattattatattattatacataaggatgattaaaaaaaataagttttttaatataaggagtcttaatggttcaaacttcaaactgtctaactcttttatgcgagtcatagaaaaaaaaaaattggactctcatttaaaaagagatgtggtatttttagaattagtaaaaaaatagtcttaaaaataaaaaaaatttagacttctgaactaggtgagctctagacacagacctaatttatctatgctctttgttagcatccaattcaacattctttttagatcctatatttaaactttgtactcaagcaacttgaaaatttctcttaaacgacgactaaaataaataactctcttatagtgaaattattctcataaaactaagtttgtttacttttcaatctcaaccaatcaactttgtagtaaaaggaacactttaataggttattaaagttgtcacattctcatgaaagggtcattagtagcattatatgaatttgaggtacatacaatattgattcctttagatggaaaaacccagattacaacgaatatttaatattcactgttctcagccaataatttaacaataacaactaacaaccaactcttttttcttttcaactaaaggaatatattgtgaacactttttaagatattcccatggtataaacttctctatccaacaaagaaagaataaagctttttgacaaaaccaatccttattggatggaataaattctaatcactcatattattattatccactacaaaatgcatttgttgctcattttgattgagctcttagctttttctttccttttgggaaattttatactattactataaaatatcacaaactctctttcaattttgtagtccaaatatacccatttttttgctaatagcttaggggttataactaaacatttgataataggaacaaaaacaatataaatatgaggttttagtatagtgcacaataaatatatataatataaattatcaataattttattggcagctactattaatttattttataacaaggtcatcctcctgctgattaagatattttacagaaattaaataataagaattatttatatatatttagccccaaaaaattgaacactttatttatgccgaccacaaaagttgttcttctttatgcatgtgttataacgttaagttttgctttgacttggtgattagcaaaagatataattaattaatgcattgaaaaaaaaaataagtacaaaagcaatcacaatataaaattgttattaaggtttcaccaactctatctttgttgaaattaatcttacaaatcatgtcataaagtttaatttatagcttttactcatttaaatttgtagcaaaatagttcatatagataaaatgtatgcgagtcattataaactacaaagtttatatttaaaacaagcatctattattttttttttaaaaaaaaatgttgaacaatttctaaaattaacaaggaaaaatactcccttttctttttaacgaggattaactttttttttttttccagagactactttttctttttttcttttttattaaccgaaatactactatttaagtagaaaatagaatagacaaacaaaacaaaaagaagctttctaattgagttgctagctctgataggtta

SEQ ID NO: 239952 - DNA, 1828 bp, Cannabis indica
ttatgttggatttggcgtgatttgagggggggggggggattgctgttagagcttgtaagaaccattgaggtagtaaactatccctttgttttgtgtaaattctgaatttaagttctggaagttgcgtgatgattttaggagttaactttgttgccaattttatgagtttgagtaaaaagcttttactttgttctttttggaaattttggcatgagttgtgtgattttaggattttaaagcttgaattatgtgatttaagctcaaatatttatatttttacgcatgggtatgttttgatgtagttaacacctattattctctatgttagacttgtgaaccaatttgatgatttcgatgaagtttgggttgagtttgtgcattttataagcttcaaaattggatttttgggtttttcaaacctagtcgtcacgaccagacttttggttgccgcgaccaaaccttacgggaagcattcccgatttttccagaacttgttttggctataacttttgactcctaactctgatttaaatgttctttatatcattgtgaatcttgttttgagccctactatttggtctagagttggactcttaattgtgaatatttatggatgtgattttttttggggatttaaccctagtttgtaaaacctgataattgtaattaggattaccgacacttggtcagaatcacctgtggctcaagatttctccacatacattggaaattagttaagatagagaaataatcacatagactatagtgcagtggtgcatttttatgatatttggttattattatgaaattgtgacctagagttattaccctaagtgtgtattattataaatatgtaataatttgttaattgaatatctgagtagagttatgtggggaaggcataactaggttagactcagtaactataaccgagaaaaatcctagtaagggcttaaatataaaaagacgtgtgagtgtaacacataagtctatgctaaatagacatttattatagtgatattattatatggaataatgtaatataaagtgcggtggcacagtatatatacacgcagcagcgtactgtgtgaagtgtaattattattataattatcatgctgtattattttttgtatagttgggcattggcttacaggtgctctattatgcaagctagggtaaagtagtgtcgggtcagccatgagcaaggccgacctaagcattttgggggccctgtgcaaaattttaaaattgggctctttaaaaaagatggtgtacattaaaactacaattctattactagcgtttttttttaagattcgttcataaattttcaattataaatttttatgtatgtatgtataataggaaaaaaaaagaaaaaaaataggccttttctttaaaaaataaaatgggccttaaaaaaatgggggccttgtgcaatggctcaagctgcctaatgcttgggtcggccctggccatgagactgaggatgttaaggatgacttgtacatgttccggtcaagatagaccacaagggttgggtctaataggaattgtatagaaattttattttgccgcttaggtctgcctataaaaaataacttgtaatatttttaaaataattttatgggatcccaaatatgtaactttaaattattttagtttaaagtaaaatacatatgttaattgcaagttatttatttaattaagtgtattatttattttaaataacttggctaatagaccccaattaacgagattagtagattgtaatcacgacacatggtgttcctctgagtaggacgttacacataccctctctaat

SEQ ID NO: 239953 - DNA, 1019 bp, Cannabis indica
atactatcaacaagccattgaaagtttctagcaacataatgtgaagctcaatttgcatatcatttaacaaaaaaaataaagaaactgacccaacaaatttttacattcatcaattaaaacactaaaattggagcacatatataacggagtacaaacaatctctaccacaccaccaaactatcgattttaatgaccactagcgtactaagatatgtcttcaactaactcaacacctctttgaggcccaccatctcacctattttcggagtgactttcccataaaaacgtctcacatgagctgccactaaacaacccaacacatcacagacaacaaatccaaccccgtacctcccttccccatcaaataaaactgcatttacgctaatcttaatgcttaaaacgagtttagaccagagctctttgtcatcatcttcatgtgaaggacacaatagaggaatgtttcctcttccttgagttttcaactattgatcaagaatttttaacagtgatttatgctcaaatttgtacagtttaagtcattaattatgcatataaattaatattaattaatattttatagttttaatggtaattttatttttattggaaatattaaattcattttaatttttatgttatttttcaaatttgagtaagaaaatttaagagttatttatgtgagacaattaagttatttacgaatttattgtcgaatatttaaataccagtatattctaaatatatattagacgcgtataccgaagtaattgaatttccatcactccacgcataagcttcaccaccagaaacctttttatattttatctatttattaaattcccatcactccacaacactccaattttatttttgggataattgcggcaaaagtctccaaaaatttagagttgatgcagattagtccacaacttcaaaaattggcggtaatagtcttcaaggtgaccttttttgttagtccgttggtcctctttttaactgatccgttaaactcaaataaa

SEQ ID NO: 239954 - DNA, 2086 bp, Cannabis indica
agagagagagagagaagaagtaaaggtgtaacttttctttttcttgatttttctattaatctaagtgaataatacgcataaactcttttacttcagcatatactaagtggctaggtgtcgaagccccaaaaactgccaccaaagcttaacacagaatgatcaaaatgcccttattctttatacttaagttattttaagcctaggggtaaaatgttcaaaaagcataaccccactcaaactcggtattctatttatcttaaatatttattccactcaaaaatatgttttagacttacccatttgactcaaacggccatccattgcatcttctgtcgtccccgagcaaaagtcgtgaaaatagcataattcatacataacataaataatacctctagagtttaataaaatctctggaactaagaaattattactctaatgtacatttctaataatgggacccaaaacataataaattcatgcataattcttaaaatattaataaataccgctaattgcctttactaatccatattctaaaatgcggtcattaccatttcaatcattttcttcatcttcataaaaaatgagggaacaagttatttcaaagaaggaacagcgcaacttggaggctaaaagtggggcctagcacctaggttgacacctggtgcaggccgagtgcccaaattgacacatattgctcgcctagcacccaagtttacattttgtcaaactgggccattgccaaggagatttttttagatttttttgagaatattctctatttttgtcaaatattaagatacaagtgttttcgagaagcaaatggaaccatttggtggcctgaaattggacccagtgcccaggttcacattttgtcaaccttgactatttccaatcatattttcaaaaaaaatgttttgagaaattttttgtcatcataaataaggaagataaaagtaaaattgagaagaaaatgagaatccctaggggcagaaagttgatcccactgcccaggttaacatagtgctaggcctagcgccctggttgagaatcgacctagtgcgctggttttaatcatctgaatgcaaattctaattcgagcagcctctccgacaatgtcaaaaactaggtagtagacctagccctcaatagtagggatgtcccctatggatttgtttttgagttaattaattaattcaaaagataaacatttatttaaatttaaatttcaaaagtagttatagatatctctattggttgagatattttctgagctagttgagaattccctcaagtggctgagagattccctcagtcggttatatgaaataaatatatatataactgattcggttatattatttattcaaataattaaatattattctataaatgatttgaatttgaataattaattgaataaaatatttattggtttttatttaaatacactatataagccaaattcaaaaatatgaatgaggtattattattttttaatagcttaaaaaggattaataaaattaatctcttttccattatcactcaaaaatattttttactcatgtgttgagaattaaattaagaactccatacacactatatcctactagcccacactagtccttgtgtgtggtggaagatttggaagagtatggtgtgagttctttgtcatcatccaaggatacaacttacgaaaaaaaataaggataccctaataagtttcaagagataaatttcttttcatctattttttttttggatttaatatatttacgtaaggtgaaccagagaatgtggtatgatgataatcagaaaagattatttcattgtgtaactaatttagtactgaaaaattatatttttgcaagtgccaaaaagttttcttaataacactaagaaaaattatgatgtaaagatctacagtagcaaaattgaaacttgttactatagaacacaaattttcagtaacagaatagaaataacaatgcagaaaattaaaaagacttgacacaagagaattatatgtggtatcaatattctttctagcactcctaatctatggggccacgcccagagaataaaa

SEQ ID NO: 239955 - DNA, 1939 bp, Cannabis indica
aaaaaagtaaatcatttatttcatcttaatatcaacatactactcaataagtagagacatgtgcacacaaattatatagtagaaaattaaacatatatcataacaaataacaataagctctcttaattccaaagctatttttattttctctctcttattctttgcttatatcattagcatcatcatcatcatgtttagagcaaaagcaaaaacctaagtaggtggcaaacattgatatctgcaatgtgatccttcacaaaattcagatgtgctaccacaatattgatatatgctacaacaccttccttcaccacatgggctttcaccaaaatctggcccacatctatggtctggtctttctgggcttagtgagcttgggccacactgactctgacaaccaacaccacaatattatgtgtgctaccacaaaagccataagagctacaacaaaggttgtttggacacaaggcaccacttgcacttgttccacatctaggaataactgcagagactatcccaaaccaaacagaaacacagaatagtgagaagaaaataagtacaagaggaatgtttaacttcattattatgattttactttgttttaatgaagagaactagtgataggtccttatttatagtgtaatttttggtgttattgaattttaagtgtatgtgtttaaatattattatattattaatattatgataaattagctgtttcttgtgtcaaataataacaaaccattatatgaaatttcattgtgtatgtgttttgtttttgactatttcttataaatattactacaatgatgagaactaggatgagaaaagcaatttcctttttatttttgtaagtatctctatggactcatatatagctatgcatttatttatgtagtaagaaagaacattattgaagcacattttttttttcaggtgagctatatttctttttatcggtttacttattgttctaaaactgttaagcacagctaacattttattcttaagtttactttgtctattgctactagcaaagtatggtatggctttccaaattgtattcagaacattattttataggtcttattaatctatatatgaactttctcaatttctttctcttttagggaggtgattggggttttcctgaaaaaaaataaataatcataattgttataaatcaaacttaaaacttgataaagtaattactaaaattaatttgattccataatatatcatttctagtcttccaaacatagtatgttataattgttatagtagccaatatacttgttttttaaaacctgaaactttaccaaaatttttaactttatatgctaattaaaaatttaaatgttgctaaggtggtattgttggctataatcactcttaattaatagaaaaatgctcagtctaaaaaacatcgtcctttgtctattccaatgggaatgaatgtaggaagcgagcattggtctaaactggcttttaacaaggttaaggtgaatgtggatggcgctatctttgcctcggaagggtggtttagttttgggagtgttgcccgtgaacataatggtcgtgtgatcgaagccatttctcaaagcaaacccgaacaagtggatgcggctatggctgcgatttatggcatcaaagaggctctaagctggatttaaagaaaaggttgggttgatgtgcaacttgaaaccgattgcctagttgctatccaagctttacaaagcacaattcatatgccttctctctttggcttattagttcatgagtgcaagatcctcttgacctctttaaaatttgttgagattcattttgtcaaacgtgaggtaaataagatgctcattgtcttgctcgtagctcttatttttatcccgatcatattttcaccaagactaatgcttccgctgaattcttatcaattgtaatg

SEQ ID NO: 239956 - DNA, 2770 bp, Cannabis indica
acaaataacactcttgagatcaaacctaatcatgtcaggattaatatcatttgatctaggatcaactaggtgatatggaattgaatagatattacggtaaatttatcatatctaattcaagttcaatatcggtcccttccaatgtatactccatacatccgatactggtaaactttgtcaatgccctggaaatgacatgacacttatccaaggtgtaagtatacctatcgctaattatcatgctagtttaaatccaatgaactgacaaattagggaattaaacttttgatcatataatcatgattatatttcactgtgctgacaacactataatcatgaataaatacatatgctctggacctaatagaatttatacattaaatataaacatgaaataaatcatgtgaaccatgcagcataaaattatttttgatctttattaattagtaaatcttattatattgaaatagattttagttagggcacaaaacccaacaacaacaaagtatttgtatcaaaaatagctatttttcttgaacgtgactatatgaaaagtcacaagccacgcagtcaagtggttattgaccaaatcagaaataatcaaatttctaaaccaacaatttcagcaccattagttgaacgaccaacaacggttaccagagttcctaaaaaggaaaccttagtacatcattgtagtgggaggattgtgagacaacatgtttgctatgaacatggagcacatattcttgctttgacatagacaaggaaaatttagaagcaatggaagacccagaattagacaagtggaacaatgacatggatttagaaatggattccatgcacaccaacaatgtcttggagtatgaaacttcacctgaagatattacacccgtagggtgtaagtacattttcaaaaagaagagaaatactgaagggaagatagagacctttaaagctagggttgtagccaaaggctacacacagcgagaaggcatcgactatgatgaaaccttctctcatgtggcaatgcttaaattcattcacattcttctttccataactgccacttatgactatgagatatggaaaatggacgcgaagactgattttctaaatggtgatcttaatgaagtcatttatatggaacaactagaagggtatgtgttacaaggggatgatcaaaaggtgtgcaagttgcttaaatcaatttatggattgaagcaagcctctagatcttagaatattacctttaataagactattaaagagtatggattcaaacaaaatgaggacaatgcttgtgtatacaaatacattaaaggtaatgtagtggtattcttagttttttatgttgatgaccttatacttattggaaactatgtagaaaggttatcaaatgtgaagaagtggttagccgaaaaattccaaatgaaagatttaggagaagcaagctatgttctcaggatcaaaatccatagagatagatagtggagaatattagcactctctcaagaaacttatattgataaggtgctcaaaagattctcaatggagaattccaagaaagggcaattaccatctagacatggagttattctatgtaaagatcaatgtccaaagactcctcaagaggaagaagacatgagaaagtacccttatgcatcaatagttgggagctcgatgtatgcaatattgtgtacaaggcctgacatatgctacgttgtagggattgatagtcattaccaatctaatctaggtttggaacactggatagctgtaaagcacattctcaagattctttggagaacgagagatctcatgcttgtatattctggcagagtattgaatcctactggataaagtgattttaattttcaatcagataatgatagtcgaaagtcaaaatttgggtcaatatttactcttggtggaggagctgtagtctagagaagcattaagcaaactagtattatagattaaactacggaagccaaatatatagcagcttgcaaagcagctaaggaagtggtttggttgaacaaattctacactactttagaagtagttctagaaatagaaaaatcacttgtgctctactgtgacaacagtcgagcggtggccaactcctacgaaccaagaatcaacaagagaggcaagcacattgagaggaagtaactgttggaatatattttactaggacctagatttactaacaagtatgtttttaacatcctaaatatgaacttccaaaaagatgaaaataaacacatataaagcatgagaaaccttacattggttgcagcaaaattaaatgactcatttcactcaaatctctaacccttgtatcctttctatcacaaagtataatcaagatctgagcccaaaattccttcagttgtttggattcttcacagtcttacacactatgattgaggactaacttgctatgggtgggcatgcactcaatcactaaagcttgaaatttaatggtgaagaagactataggatttcgaattaaaagaagagaaaagaagaagaagtctcaaactctctagttgtctgacaagaagaaaactaggtcaagagtcattagttggattatgagaccattcttttctttttatactaattcacatagggttagcattgatttatttagaataaaaatgataaaataatggcaaaaaaaagacctaatggccgaccatgaagtgggcccaacactagttagatttttgccatcttttctcaaccatttatctagttttca

SEQ ID NO: 239957 - DNA, 3990 bp, Cannabis indica
aaccatgcaacattaaatgttatttctgatctatattaataagtaaatttgatttattgaaatgagttttatttagggcataaaacccaacactaagacctgaacatggaacaggactcgggacctagaattgggatggagacccaggactcaggacctggtacatgaacaaaaactagactgggacctgtgattgggatccagatcttgtctcaggatctaaaaatcggggcttggacaagacccatagtcggtgtcttgatatgggactcggagaaggacccaaagctggaccaggacctggacctagaccaagacatgggacccgaaactgaaacttgaaccaaaatgtgaccaggaccctggaacaggaccagtatcgttacaaggacctagacctggaccggcacccaaaacaagaccataaccaagcctcaaaactcgagctcagacccagtcccagacccggcctaggactgagtctcaaacccaaacttgggactcgatcccagacccaaaacaagcccctaactaagactgggattcagacttggacatggacacgaacccagacccgaaacctaatagtgaccgagacgaagattgggatctaaacacgggacctagactcagacccagacgcagacctagaattgaattcgggacccaaaatcaaacttggaccttgctcgggatccgaaaaatacgcacccgaactcggacctcgaccccaacctagacccagatgctgacgaagaacgaaaccataacccaaactcgaaccagaacatggactaagaccttgagtaggactggaacctgagacttgggacccatacctagactgggacttggacctgacctggtcctaaaccctcgcaggtacccaaaccaggatccagacactgacagggacccgaacacaaactccgacgaagactaggaccgagacttggaccctaaccaagactgggacctgtactcaaaccaagactggggacccaagcccgaaccaggacccagacttgacgtacgaccaaaaataaatgggggacctaggccccgaaacccaaacctagatcagaatctgagactcaaactcaaactaggacctgacctggacacaggaatctaaatcggacccagacccggacccgaaacttgccccggacacaaactaggactggaacctagacacagaccaggactaaacccgaacttggacccgaacatgggacccaaacctagaattagacccaaaccaagacctggacccggacccggacccaaacgcaaacacacaacgagatcgaaacctaggacttagactcgtaactgatcctggactctaattgggatcgaaacctgcgactcggacctggaccttgactcaaacccacgacccgaacccacacttggagcttgatttggacctagactaaaattcggacccaaacccaaactcgaactcgcacaactggaaatggagctggactaggactaggacctaaactcgaacccaaacccaaatcaaaacccaaattgagacaaaaacatgaaccaagactaggactcaaacccgaacctaaactggacccaaacccaaatcaaattcgggacctagaattgggatagggacctaggcaacagaactaggacaaggacctagtacccaaccccagacccagagttgaacctaggacccagctcgttacccgacacctgaaatggaactagactgggacccgagaccggaatttagatctggatttagggcttggaccgaacctatagtcggtgtttagatcttggacccagccccaaacccaaaccaaaacagtgatccgaacccatacctggacctgaaccgaatcccagacccaaaactagaccagaacctataccgtgtgacccaaaattggaacaaaaatcagaagtagatcgagacttgaatacgggaccagaactatgacttggacatggaatcgtaaccggacttggccctagaccaagaaccataaccgtaatttgaccaacactcggacttgaattcagacctagaccccaatcgggacccggacccggatccccatctagacctggactcgggacccgaacctggatccaaactcaggcccaagcatggaactggactcaggacatagaactggggtcgggacctagaaccgcaccccagtctcgatcccagacccaaactcagactaggacccgggacttgaacgagaactagacgtggatccgtgacagggatccagatcttgactcaggatacgcgaaatagggctttgaactgacacatagtaaatgatagggatccatatctggactcgggaaacaggactaggacccgaacccggactaggaccaaaactcagacctatacctagacccaggacctgaaattagaacctgaacaagaatcgtcaaactaggaccctagaataagactaggaccgtgaccaggacccagacccagacctagaatcgaactcggacctagcccaagacccaaactgagactggaacttgggcccggacacggtggtgtacctagaccgggaccgagacccagacccgaacctaaatttgggacccaatacgagacacaaactctgacctagataaggatctagatacgaacctggactcgaacccatacccaaactgggatcaaaacccaaaacctagatcccgaccgagatcctgacacagacccaaacctggaacagcactcgggacccaaactcagacttagacccgaacctagacccagacccaaatccagacctagacccaaacccggacccagactcagaccaagattgagaccctgatccagacctcgacccgaacccgaacccaaacccaaacacagaatcaaagtatgggtttgtgttcgagtctgggtcctggtctggttacagttttgagtttgggtccaagtcattgtcctggtcttgttcctggtccggttacagttttgagttttggtccaagtcattgtcctgttcttgttcctgggtcccgatctgctttttgttttggttccaatttcaagtcaaggggtacggatcgagtccaagcattgagttccggatcccaagtcctgaggtgggtcctaggtccaggtttgggtctcgagtcgagtctcggatcctgatccaagttttgaggcccaagttctggtctaggtttggggtccaaattccatagtttggctcccccatctatgtttgggtcattggtcccagttagggtccaagttcgtcttctaatttgggttcaagtctcaagtcccggtccaagtccaggtccaaatttgggttcgggtccgagttcgggtcctagtcccagtttgggtttgggttttgggtctcaggtctgacttttgttcttgggtcctgggtctggccccagttttgggtccgggtcccgattttggatctgggtttgggtctaggtcccagtcttggtttaggtcccggtcctggtccaagtcctattatgggttctggtctgagtttgggtttaggtttgggtcatgttatagtcccaggtctggtccgggatcgggttcgggtcacagtttgggtcttctcttgggtacagatctgggttccggtcctggattcaaacactgactacaggtcaagtcgaaggctcaggtctagaggtggatctcggtcttgaatctaagtctcagtctcgggccgagtcctaagtttgggtttgggtttgggttcagggttatgtccaggtagccaggtcttgggttccggggtccaaggtcaggtcgtgtgtctcgagtctgggtcgagttttgggtcttagtcccaattttggggccagtttttggtctaagtgttggaaattattttaccaggatctagatttactaacaagtatctttgattaataccctaatatgaattctaaaacaatgaaaataaacacatataaagttagaaa

SEQ ID NO: 239958 - DNA, 934 bp, Cannabis indica
tgttccttttggagggcaatttttgcactttgtgttgccattttgccctcttgttgcttcaatgtttccaaaatctctcgccatggtggaatttggtgcaacgtttcattgttgacatttttggtgttcatctgggtttcatgagtgttacccagatcgccatgtagggcgagatcttcttgttcatttgtcatgtctttcaacttactttttcggaaaatttcctccttcttttctttgtctgagtgtgaattgtgtaatgaaaaggtctcctgaaaaagaaaaggtgtcttcccacagaccccgccaaactgttttagccaaaaacagtcgtaatttttttgtgtgagtcccctcttttttagttcctaatcttgcccctttttatgtagtttctttcttatttatatggtacgtcctttgattgcatggatgacctattttttatctattcttttccaaacgcgtgtcttttctctctgctctccctagtttgccacccgtctaattattagacaagggttgctattctttgcctcctctaggtccgacagtattgtgtcattttcctagattgtttatctcggcttttttgggtcgcggcttttttccgtcggaactccttttcctacctgaggtgaatgggaaatcgcaatgtcaaacactctttaggaagcgagtcttcaatcggtgagctggacggaagactctctttgggtctcttttgaatctatccatcgtctgggtcttcctctgtcggtccgagatgataagctttaacccctcatctcctttcttctgaatttctgtcggtatttgtgctttttctttactgttacttcattgagggatggtccctactttgttttttctcacttttgtcgtttgtgctctttatttatattgatctgttgggttttctactgggccgtcc

SEQ ID NO: 239959 - DNA, 2123 bp, Cannabis indica
atataattatatatatatatatatatatataaatggaagatgcaaacagaaggtgtcttgaggggaataatgccttagttttgtcaaatctatatatttatgtatatagattgatcgatccggatcatgtaattaattatatattgaaatgagaagattattataaataacaatttaattatatatgctaattgtagagagtttgactttctattctagctagctagatcttaaatatatataaatatttaattaataatttgattgaaattgaatactatatttgtatatgtatggatcatcaaaatatggtatgatgatgttataatatgatgcaataatgcatgatatgtgttatatttaaataaataatataaataaattacattgcatacccactttactttacatgttttaatttttacttttttttctatattttttaaaatatacccacttttataaataatgttccaattatacccctttaaattaatgtaaagtatgtgttagacttaagtgaagggtgagggtatattgggcaacccactcacaaaaatgggtatattttaatgaaatataatatgaaagtatttttgataaattaataaaaaaaagaggtattcctcaacttatcccaatatattatggaacaaaacaattacttgtaacatatgaggtattggagttatttacattttgtaatttttacattatcactaattaagtgtaaagagagattacacaacttattaattaattgaaattcaaagcttcaatgaaaatatagttgttgaagattttttttttatcatttataattgtgtataagtgatataaaatcaagtaaaaataatttagaacgctttgaagaattatttttaaaaaaaaattagtaactagtaaccagtttctatcctttttcaactttgtaggacaatgttgaacatttgggatgtttctaatagctcccataacttcaaaatcactaaactaatcccatttacactaattaagagatagtaacatccatgaggtgtaggatgttgaattttaaaatatgtgatcttaaacgctataaatacctaacgtgtttatattgaaatgatttttctatcaacaaacacttattaaaaaatataaaaattgataattttcaaaattattttctaaattcctctttttcatattaatatttactcagagatgtaaaaagcatagatatctataaagttacacaagtgctattgtttaatttcactttatttatttattttttcttttacataggaaagaaggaaacaacacacaattgaaaactcctcacaactcattgactatttgacttgatcatacaaaagataaaagaaaattaacaaataattgtatataattaatcatataataattaattaattagtctcaaactctaccacaataggacactttttaaattcaggatcattcttgatcaagtaaagaaacacagatacattgtcatgattttctattttcatgcctttgttgtttgaaccaaattttggatcaaatgaaattttgattgaattttttatagttttggaatccaatctaagctctttacatattttatcaatcaaccaatcgtatggcccatcgtatgatgggtatcccatatgtctatcttcttgcatgattatcttaacttggtgatcaacatatcttcttgatttgctgttctcatcaataatccacattccatcatacaaaatataaataagtgtcttcttatccttatccattatttctgcattattcaaaaccatacatatacatctcatttttcttaaaatatattgatatttttatatttataatacatatgttcaaaattaaattatgatcatttttccacttatcaaaaataaaaaatgatgctaaggacattttgatggagtttttatatactatagaaaaaattacagtgacaattttttagtcacaacataaattttttgtgactaaaatatagtatttagatacaaattgtcactaatttaattatagttgcaataaatatatattgtgactaaaaatacatttagttacaacaaattgtgaatgtgactaatacctttagtcac

SEQ ID NO: 239960 - DNA, 1437 bp, Cannabis indica
caatgtcttactctataaaaaaaatgtgactaggttggtattagatctcagaagtgtaaacatgatgggattttgaactgtatttgtaggtgtaattaaggagagtcgattgagaaaggaaatatacctatgtactagtattcaatgcttgtgtgtatatgatatagaaggcaaagaacaaggtacaaattgttaagtttgctgtaaagattagagttcgtggtctacattaaataggtgataaagatagattatatatggtttgacagattattttagtaaagtgtaacagcggattaaaagggagtggattgtaaagatcaataaactgtaaggttgatgtacataattattagtttggagaaatataatcattttatttaccaaaaaaaaatgtaattctcacaaaggggtttagggtccgagtccagggtccaagttcgggtttggggtttgagttcaggtcttgggtccggggtcaaggttatagggtcaggatccggggtctaggatcagggtccgggggtctgaggttcgggttcgagactaggtttgggtccgaggttcgggtccaagtccaggtccggagttccggtttgggtgcaggtccgagacttcggggttcgggtttggattcgaatttgggtctcaatttggggtaggatgggttcatgtcatggccgtatgatgtagaatattgatttttttaagttaaagaaaatagttttaaaaaacttgagtcaaacattattaaatttataaaataataaaaactgttttctattttcacttttaaaaaataaaaattgaaaacacaaccaaacaatttcttaaaaatgtaataattttgcatgagattatatatagtttaatttctattaattaattgattttgataaaataagtaactttctatatacatgaggttatttctattttgagtgggaatttttacacaaaatgactattttgaccaatttttaacatttatattatcctttctaatttttaacatttttactttttaaaattttctttaatactttttaaagttttataattacatatttaccttttgttcttcttcctcatatctaacctcattcagatctgggttcaacaagtcatctcttactctctcatcaagcttatcgagctttcacactcgtcttcgcacaatcaccatatgtagcttctcgtcatcacgcaaagcctcttctcaagccaccattgtcgttcaattgatgtttgtaaggtcttcttcttcttcttcttcttcttcttctcattttgctaaaattacaaaaataaaagtttggatttgatagtttttataagagtttgttgtttatttgcttatttattattgatttttctatttttcttacagattttaggaatttgttcttattctgttagttgagttcttatatatat

SEQ ID NO: 239961 - DNA, 1299 bp, Cannabis indica
aataatttaaagaatcaatttaagaatattaataaataaattaatcatatttataagataaatatggactcatcagaaagtcgtctcgttcaattctcaaaagtacgttaaggactgccgccatttgttcttattctcctctagcttcaaagcctttgagtgtccagatctcctaatatagtggactcagattcccccactaatttggacagctcccaccaaactcttcttgagccacgctaccattttttagactctcaccagggaggagctcaacctgggagatctggttacaacgactaacggccaaagaactaaactcattcaaggccatcaatccattaaggatacaaaactatcgaaggtaacgtattcgaatgctcgaaacaaggaggctttgggaggagtacatctaggaggctaaaaaccaagtgtcaagcttactggaggaggaaagagcaggaggacctttttgcttgcgacttgattgcagcagattaaaatacatagaggaaggaggacaagaattaggtggttcccaaaccttcgtttcctttctcaattcctaactccggtactcctagagccattacctcaggtatccgtaagtctcctttgtctttttataatgttccttttgctaaaagttatgctcttttcaggccagttggctttaataggaggttacttaggttgcaaatttctcgttcctagtggggtgatagggaaaaagagtggtacttccccaatattggagatcttttgagcaggtcccagatgggatttggtcctccaataccaatacctctagacaactcatgttatctcacctcaggctgatttcttcttcggatagttcttagagacgatgataccatcaacgttattatgagttttctaagaagaattaggccgtgagtaggattagtttttatttttcatgccttatcttcatgatcattttgcaaatactccttatgtttctttcatttcttttttcaattagaccgatggacgccatcttcgcttccatggacgctctgaggtctacagaaggtaacattgtccctcctactgattatcaaagagtcataatgactctaggaccttcggacccagaggtcatatgtgtagatgacaaggatgaattacccccactggagcgaaaggggaagaatgaggctgacgtctctgcatcttcaaagaaacttaaggcagccaaaactccttccgatattattggggacttaggaatcccttctgaagctcataaataacgttgatggtatcatcgtcttc

SEQ ID NO: 239962 - DNA, 1089 bp, Cannabis indica
gattagggttattaccctaaattaagtggttatgtggttgagggttataactctagtagttaattgattttgaatgcaataatgtcttgtatatgttgatataaagaattatgtgcttaaggcataattagattaaactcgataatcagaatcgagataaaccattctaaggccttattttaaatagatgtgtgagcgtaacatgtaggtctatgtcaaatagacgatagatgcaagggcatcaataattatgtgatttttaatcattatgcatattgttatttatactttcttgttgggctttgctcacgagtgctctattgtgcaggaaaggctcatgagttcgagggctttgcagtgtattgtgcatgtttgggccatactagacctcgagggttgagtctaccaaaagaaatattttgtattctttacttttgcagcttaggtaatcgtgtaaatataactagtaataatttttcaaaagtttttatgggatcccaaaacaaatgtatattttggaatgtttgtaaaatttattaatttcaagttatagttttactctataattgatttcaagtttgaattttcgctcttaggtttagtaatcccaatttagcaagatcaacaaatgtttagtcactgctcatcgtggtcctattgttagggcattatgagactgttccctgagtggccctgaagatggtctcaagtttctccatgaggagggtgaagcatgtatacttctcctccttgtccttttagttgtgtggcgtgggaaagtgttaagcttcccctttttgccacggtttctcccagagctatttttgttgttcttatttatcgtgttattgccaccagagattttggtagagtttttggtagctgcttgtgagcctggcaagtcatgagagtgcatgatgtcttgtgactccctattttttacatgccctgtctaggcctgtcgtatagcttcttctagtttgataaagctatcagctttatcgaggaccttcttcatgttgttagttgagatcctccagatgtctttccacaagtcactcaatgggagaattccccctagtatggcca

SEQ ID NO: 239963 - DNA, 996 bp, Cannabis indica
aggttaatttctcgttgtttttttactttttgtttggaaaaatatatttttgtaattttaaactttttaaaaacatatttgacaaatatttaatactatttgacaaaaaagaaatataaaatatatagtttgtttcaaaaatatcacatacatacactatcataaaaatccttttttataaagtcaaagttgaactaaataagctagtttttcgaatctaagaatatatacgttgaaaactacttttttttatgtacaataattatgtataactgcaaaatatattagttgataaatatttttttttataatcaaagtatcaaatataacttgacataacttggtataatatttgtatttttgtatttttattacaattgatgagctatatactaaaatgtatgtgtattttgcagttttaattaattttatatttttttctataataattacacacaatcatataaaaaataattataattatactatttaaatattactatcattttaattgataaataaatatttattattgttattattatcaaatcatttggctttttaatgtgtcatacttttgagttaatctattcgtgcttatgtgtcgttcatgctttcgggtttctcgtgttatggcatgcataaatttatatttttcgtatcatatcgtgtcatgcctaaacatatatttttttcgtgtcgggtcgtgcttgtgcctctcgaacttgtaccgatttcatatcgtgtcaaaaaagtgcaacgcatatttacaacacttcatctatctattgagaacactatggagatctctaagaagaaggcaagaagctagctcaaggttttagtaatttgccatcacaattggatagtaattacccaatagataaaatactaccatatgctgtaattaaccatccatttccatctccacctaaagtgcataaaagtgaatcgtacaactatttgatatggtaaactatgcatgcatctcttctt

SEQ ID NO: 239964 - DNA, 1355 bp, Cannabis indica
ttgggcaaaaaggagctacagtacgcgcactacaaggtctgacatagggacagatctaattgcaacgtcaggtttagcttcagattaggcattatggagttccaggaagatctggcaatggccttcctagatcaactgattcgccaccatcctggagcgtgtgaaactttgtttacttccagtagcaacaagataagatgagaattctcggagtcctttctacatttactggcgaggagagcctccgggtagtacaacatcttctataaccctagtaaggggaagacataatataacaatatgcaatctgaagtggcacccttctatgattgccacgtacaagtcatccaggaacagggataacatttacccccaagctctcgagcttgcagtatatatatatcactcgactctctctctaacactctctatcttagttcattctttctcaatctctctactccctatctcggtggacagccgaacctcatcatcgaaaagaattacacgcatacctcaataatgggtaagtattatccaaagaatttctaaaatgttcatattagtatgtagtttatttttgatagatctgtgtggttgttgtttgcattggtgttgttttgttggtattttttctttgaaatggagagatttggttttgttgccaaattgggtatttttaacaaattatcaatatatatcgatattttctcgataattaagttaagaaggtaagggatgataatttttgacactttttcgatgttatatcgatactatttcgatcaatttcattccaagataaaatatagcacaaaatagcaaaattaatcagacaagacataatcattgataaaccatcaataaaaaaaatgtcagcctattgatggtttatcgatggcgagctgacattttttttttgtcttggtattttaatttgattaccgatggtttatcgataatttattgatgattctgtcttgtgtgattaattttgctatattttgttctggattgaaatagtatcgatatactatcaaaaaattatcaaaaaaattatcatcccttaccttcttaccctaattatcgagaagatatcgatatataattaaaaaaaaacattgataatttgttaaaaaaacctagtttggcgagaaaaccagatctcgtcatttcaaagaaaaaaccgacaaaacaacgccaatacaaacaacaaccacacagatctgtcaaaaataaactacatcgagaacaacacttactcattattgaggtgaatgtgtgtgattcttttcgatgatgaggtctggccgtccagagagagagagagagagagagagagagagagagagaga

SEQ ID NO: 239965 - DNA, 2185 bp, Cannabis indica
atcttttgtgatacttagcacttgatggtaggacgacagatttgtcctgaaaacttgcctttttgaaaaacccgcccaagcagttcttggaaaaacctgaatgattaggttttaaaaattattgggtgagttcgggtgcaactcagttacatatcgagtcgtgttccaatgtagaaaaatacaagtattcgagttcgggtgtaactcaaacctgtccagtacctgattaaaataataaggaaagatatttatgtatatatacattcttttcaatttcctaaaactaaaaacataatcttacggtctcaacacaaacatcctctccaagtttccttacctttttccatctttctttctctttctagggttgaccctagacataagtggatttagcacgtgcttagggcccacacttttaggaaaaataaaaaataaaaggcatcatttggtatttatttaagcaaaattaagtgtattataaacaacaaatattcatagcttgatttgtgggatgtatgacacattatacaatggtgtgtattcgagtctcatgccactctttttcaatatattttttttaaatatttataaaagtgagggtcctaaaatttaaattccattagagtttttttttcactttctttttatattataagtactctcccattttttatttatttattacttttttaaaagaaaaatttgaataatagcccacccaaatttgtaccccgtccctacccacctagacccgtcccaacctgcgtccaatccacctacacccgaaacttgaaaacctgtaggccacaacggcttagttcgggatacaatttccacacacttgaaacctttaatgtgtcaccttacctgaaaatgtcccttaacatcactctcttgaaagacactttctgtggatattgtcccacataaaataaatggtagagtactgagccatctatagctacttcacttatcatcaattcgttttgagatagaacacaatgatctcaacacagtatcagagccatatcccttgcaggcaagtgatccaccatcttgagggagaatattataaatattatcccacatagaataaatggtagaatattgagccatttataaaaacacgagctactccactcatcactaattgcttttgagttggaacactataattttcaatattcttaaaatcatactaatgctagcgttatccagcaaaaaaaatactaaaggtaaccgaaatttttcattatttatttaattaaaatatttaaaactccatattaaattatacatagcatctttgcaccttaaaatgcctcctaccatttttttaaaaaatttacaagaccaatcctatacataccatacaagaaaggagcaccttcttgaacaacgtggcaccaccatattggtcacaagtatataacttgggactgtttattttattatattttatataatagggatgcacaacttttaggttttgttattagtaaatgaatattatattggaaactttgtatatggacaaataaaactactataatagtaaatataattataaaatttatataatttatttacttttttatttttgaaaatcgatgatattaaataaaagacctaaaggcagtggcggacccagaatttaaagtgaggggggcgtaaataaatttaaaaagaaaatataaagtgtagttagtagggtttgaacctttaccctctaacctatttaccaaataccttaaccattacaccaagattactattatgtctataaatatcatcttttaatacaaatatatgttgtaactaattaaaatacatatatttttttctcgattttttttttcagggggggcagtcgccccccctcgctacaatgtgggtccgcccctgcctaaaggtcttggcataaaggagacctgtaagtgtaagtaaagtaaccagtagtgttcatagttatggttctttcgccaacattagaacatttttaaagaattgttataaagatggtatataagtatttttttagcttatatttatacaattgaactttaatagtggtgtatttagtttaaatataacacatattaaaaatttatcaaatttaatacgaaatataatatagaatattttattttttgaaaataaaatcatcattttattaaacgattaa

SEQ ID NO: 239966 - DNA, 845 bp, Cannabis indica
taaattaaaaaattatatttttaaaaaaatatattaaacactataaaataaagaaataatttaaaacaaaaccctaaaattattctgcctcaccctttctatatccttcaatttcttcttccggtctctcttcaatcacaacaaaaacttccagatctgatcgggccatctccaactatcatcgaagaaaatggaggccaacacaagcctgagagatcctgagaactcttgaccctctttccttctcttgcgcatccgttcctctaccaatctcccttcttttcgtcgacgtcatatggcggacggaaaccaacaccaggcagaccgctccgccaccgtaagcacaactggacgtctctcttcatctacatctcaccttcattgtcttttagtattcatcttctcttattcttaggtatagacctatacatgctgggggttatgaaacctagatgggatggtaacactactacaaatatcagaattcgcaacggtcctaaaaacgatttttttcgaggaccgtcgctaaaaaaattaagtaactatttaaaaccgtcggaaaaaattctttctctcactactgatcactgatggtttgtaccaaagaaactatattttggctatatgaacttgccttaaactatttatacccaataataattaaaactcaaatcactaatgaatattccaagtataatctacgccaccatcatacaagccaatcagagtgtttgttcttgggtttttgggttggagtctggtaagggaaggaagagatgggtttgtactgaagatggatttaacaagttttgcttaaaatttatgggttcaaaatagcattcaaa

SEQ ID NO: 239967 - DNA, 1425 bp, Cannabis indica
tataattttataaatctaataacctgaatagttaaaacttaacagaaaaaaatttatgcagtgttttggtttttcaaagaaaaactctctcctctttttttcactattaaaaaagcgtgtctttggatcatacatacaaataaagtttttatttttatagtttagggaaattctttaatagacacccgtaaaagagactcattaatagttccactatcgtgtactataattgttccacataggaaaattttagaaaattattgtagattgtagtgtattgaaataaaattacatttgaattaggcaaagtggaatatactgatagacactttattattattattattattattattcttattattattattattatttagttgatttggtgaatatagaagcatttatatatctttaattattatttcattggttcacttggcaaaacttaaagtattaaaaaagaaaattataatgattaaaatagaaaattaattcagggaaaaaaaacgagaagtcattctcttcaattccgcccagaccatcttctccggtaaaggtgaaggttagtgcattttgttttgttttgtttttttttaattttattttgattcattcttattttaatttattcaaaatttactacatttatataacttttagattataaaatatccagcatgaataccatcgaataatatcattgcagaacacattaatctttaaaaaaatatttcaagaaaacaaaaagaaattttaaaatccaaatttgaagaaggtgaaaaaaaatggaataaaaactaaaagataagaaacataaaacccaaatttctgagccgaaagattgagttccctacggagagtactcgttctcctcttcttcttcttcctcatcgctgctctcttctacatttattttctccgagtcagaaatcaacgcgcctgagctactcatccaactcagtggcgactcgaaaatcaacaactgaaacaacgccgtaatatcggtggaagtacttgaattcagagcaactcgtcatgatcacgatcaacaggcgatgagcgatacagcgacgtttgatcttattagtattgcttccaaggatgatgaggatgaagatgatgataattgatgatccaaccacgatatttgagattggtaatgtaatatcccgataggtctaatggtaattaattagggtttatatttatattatgtgttaatcaggtaataagtgggattatgatcctacttatttatttcagcataaaatttaaattttgctataagtgaataaataagcgtaatttataaattgcggtagatttataaagaatgtgtgaatgtaatatgagctatatatgaaataaaaatattttcaggttcggtgatcctgaagacctgattagtggataaataagcgt

SEQ ID NO: 239968 - DNA, 1538 bp, Cannabis indica
acacgtgaacttcctgatggttgaacttcaatttcaagtttccaatctgattggttttatcccaaagagctccctttggttttacatcaaattttttcattctctactcagatctaaaaatgaaaactccttgaaagtatttggttttatcccaaagagctccctttagaactttcaacaccttaaaaaattctagattttctttccaaccaaatagcctagattgttaaaataaaaatcaatttcaattaactacccaagtttgaaattggggatccttacttgtatcaattgttattgtgggtgctcatgatgaacttgatggaatagtattgagttgcacctggttttttgttggataagatgatagaatatcattcaattattggtgtatttgttttttcaggacacattgggatcacagttgatgacacatacaaggcatgtgagagatttgaaaatctaggactggaatttgtgaaaagaccagatgatggaaaaatgaaggggatagcatttatcaaagatccccacggctactggattgagattttcgaccttaaaactattggaaaagtcaccgaaaatgctgcttcttagtttaagataataattttatcaaatgagatgttgatatcaatgttgtggacacttgacaccaaaaaatcatgcttcatccgtcggtatcactgtcactgattttgactttgaattgcgtttgtttcttagccatttcagttgctttgtgctcttgtttttggagactacaggtctagtgtgatgactgttgtgtaagcttgaacaatttaccatctgttttattaaacattgagtaattaagtttccattaacttattaattatgaaagattgagtaattataggaaagagataaattcttgagtaaattttagtgaccaacaagagcttctctacaagtattgtatgtagaaactttgaccaaacatactcattgttaggggtattagttagttaattattgtatctgagttagttagttctgttcattgtcaaatgcctactgtaactaattctgttatctctaactaattcctcttgtgtaattctttggctatataatgccaaggttcatttcattcaatgacaagattgctctttgttcaatctatctttctctctatctttctttctcttgctactgtcttttctctctttcttgtttgtctctccttgctctgtttttctttgttcttagttcatccatggcagaaagattcaaatatatgtgtgtgtgtatatatatctatatatgtgtaaacatatttgttaattatggcaaatgctttcaatattcaataattattctgctttatatcataagggttttttttaatatttattattataattaataatattcatgttctctatcctgggttctcacaatccctgcaaaaatggtacatatatatttgtatatattttctttttgttctttatgtgcaatatgtttagccataacagctataaagtataaactatacaaaggactataat

SEQ ID NO: 239969 - DNA, 2394 bp, Cannabis indica
atttctctgcatgcatcttgatcaaatacgataaaacacttatttttacataagaatataacaattaaaaaaaaaaaaaaataaacaagaattgaaagcaaagaaggggaaaaaaaaacaattcctgtacttctgcataaaataatttagctcacaccactttatatttttgtacaagccttaagaaaacagggaaaagaaagagaaagttaaatcatagagggttaattactgatctacctgtatatatattgataaacaattagtatcatgccaagaagagggaaccatcgttcctgcaaagaagactggtaagagaccataaagaataggaaaactagaagaaagccaactccccatggagtcgttcctgccctattgaaggagtccctctcgggcaaaggaatgaaagacgataagccgccgcgtcggtgtcggcggggggtttcagcgtaggaaagcaagtggagagctagtagcagcaggagcggggagaccatgagtcccagcttgatctggtcgagcatgccctctatcagggcctcgtaattggagtaccacgacagcgctacgaacgtgaagagtatgcaaagaaagaagcaaagatgaaaaggcatagaagcttcggacctctgcgatgatgagtaataacctcctgacatgtctctctaatgcccaagactactatttagttttagctacctactgaatgaattttctatttttgactaaaggaaagaaaaagaagagagagagatcttgaatatatgttgtggtttagctagtggagatggtttatatagaaaaaacattagaaaaaggtaacgagatatatttagtggggtactactttatatatgtactggttttttacagtcagttgagcttcaaattttaaaaaatttatacatgatttaaaattaccatgtccaagaatgttttgggttcggtcactatgtaatattttgataaatatacgtaaatattgaatatagtactagctagctacttaatatgagttattaaaaagtaaattatttgaatgtcttttatgaatcaaaattaagcacgcaaattgaaataaaattaatatttaaaatttgtaaataaaagtaaatcaatgactaaattaacaatacttttaagtttatattgtcaccaaaagaaatttgtgtaaaagttctatcaatcaagaaagaaatttgtgaaagtctttaggtacaaaattatgatttattatgactgaattttttttttaagttattataattaaattagtaatattttatatctaaataatatataattttttcattgataaataagcttttgctatgattaaaaatgacattttattaaataagaaaattatgttgtgcatgcttagctaacaatactaattagtatatgtatgacatatatcatggtgccgtgccatatttctttctcatagcattctaaacttaattataccatcaataattacttgttattagtacgttttcaattatttttagcaataattatgagagctatgtgtttggtttcattatttgtctttggtttaatatgttttctttttttgttgtttaatattttattttctgtgaggtgcatacataagcttttgaccatgcaccagagtttttaactaacatccttaactaacctagtaattaactaaactaaacccgagtttaataactaatgtctctaatcctctatattattcttacgtttatacagcctttgagcttgtgaaaatctactaataaccaatgtgatttcattcactttttacaataatctaatattcacttggtggcctaattaagtctatttcgttgattataattactcatcaatcccaatctataactggtatttgcgtgctcatcaccaatcactttagaggtatattgatgttacttttatcattacaagtaaaagtattgctatgtttacacaatgtggtatacatatacttactatctactttcttgaaagggaaaaatctccagcaagatattccatactgttttctttgtaaaattaaagctatgttagtggaatagaaagttaaaccaggccaataaaacaactcactactacaaaaactctctttagaggcggtcttttagccctttcagtgtcgattttggcaaaattcactaccgacgctgatcagggcgacgctgtagagttataaacaaccgacaccatatatacccctatggcgtcagttattagctaggaaccgatgccatagggatatatatggtgtcggttcctaacaaaaaaccgacgccatatatggcgtaggaagttacgccataaatgaccgtattatattttcttaaattttatttagtttatttaaattatatatttatt

SEQ ID NO: 239970 - DNA, 1376 bp, Cannabis indica
aattatatatatatatgtaatggcatattatgggatattacacgatttatcatgtaaaacattattgaattgatacgttttcttaatcgtgatgcttcaatgcttgtgtatatatagataaggatttttttttctttttctttcttttttggagtggttattcgtgaccgaaatgattcatgatgttttgttttgatataaagtgttgcctgccttggtgtgtgttcaatataaattataaggtgtttttataatgtatcccactagtaattttacccttaattctttcatcatacaaaataaatttttagtttaatttttttttttagtcgtatatgttataattatttaaaacatcctgtaaaattttaagaaatttaaaataatttataatatagaatttagtgttcaaaccgtctatttcgtacacatataaaatgaaaaagtgactcgtgcaacagattctttaaaacttattttcagcgtgttaattaaatttttttaaatttcttaaaatttggtaggataacttaataaataactacaacgtacgtacatggccgtctcaaatattttggaggccctgttctaattttaaaaattaggccctttataaaataaatggatttctacaaaaatattggattttgggtaaaagtttataattttattgtcatacaatttatttttttcaaaaatattgtctttttataaaacaaccgtaaaacaacacaacagaacaattaaaacaacagtgaaacaactaataaataaccgtgaaaacttaacacattacacattataaaacttacacattattttgaaaaaaaatacagtacatagtataaaactaacaaggtcggcccaaacaatatttgagagccttgagcgaaataataatttctttctaaaaaaaagttgatcacattctcactactaactatctaatttgacaattaacgaatattagctatacatatttgtcatatacatatttgttttttttatgatcaactaattgttagaacttaattaatttatattacttaactacatttttaatagctttgtttattttatattcggtgttatttaatttaatatcttaatgtaagacgtacgaaactgaaataattataacctaaattgatgaatctgatttttttttaaaaaaaaaaaaattaggccctttttatctttgggccatgtgcaattgaacagcctgcacaccataaaagccggatgtgcgtacgtatacgatcataaaaaaaattaaactatttttttttaaataccaaaataaataaaggtgtattaagtacactcttaataagggtgcattctagaaattttttatattatatataagtattatt

SEQ ID NO: 239971 - DNA, 937 bp, Cannabis indica
agaagtcgaaccagaaggcagtgatgagatttctggaggagtcgacttcgagacggttggctgggacacgaacgacatcgactgtaacaaggaagctgaaacgaatcttcatgagaaattattggtggtgaaatcggtggctatggtgaccggagatggggtggagaactcagtaaatccaggaaatatggtgatcggtgctctgacagggaaggactcaacgggcagagtggattttgtgggtttcgatactgatgtacacgcgcaaattaatggtatggaggcggttggaatttccaaaatgaaatcccagaaatctagggacgtgatacttattcaaaaggtgtataggcggctgatgaaggatctagaagggccacgtgtgagctcagttttaatacctagtacctttatcaatttaaagtacatgtggcaaagttttgaagaaaatattgctaataaaatgggccaggaaagcaaggtatttaaggtgggccgagcttatgaaggggagaggcccaaaactagttacttggagtgggaggggtcaaaagacaggttggaccagatctctagtgggccggttgtgaagtttgcccactcagtgggtgtggagatgctgagaagtgacttgggccatcttaagtataaacatttgggcccatatactattctattggaccaaaaggctgatcgggtaccctcattttgtcaaacaacagctgccctgaagaacctaaatttaatttttgaaggcatcctcaaggcagtcaaaccgaagagaagagaagaatttaaaaatgcagctattagtttgtgggaagacttcaatgttaaagagaaaattgctgcaaactcagtattacaagcaacggaacaaggcctacttggagaggaaacaatcagtaaaaagaagctgaaagtttacatcagaaaa

SEQ ID NO: 239972 - DNA, 1591 bp, Cannabis indica
tatttttatatattttgtgaatgtaaaatatattttatatatgaaaattgtctcaaatttagaacctcttttaagaaacgggctgggttgggttatagagttatagtgtgctcaacccataatcaacctataattatatggcctatcacttttcagcccaacgagtcgttgcctactcttaccataaccctttactataaaaaatgagttgcattggccggattgaatggtttgactcatattttgttcaccccgctaggcagtaatgatagtggtaccttagagcatatccaatggtagtattttttaaaggtgctaaaaatttccatattatttaaaaatataatattttattttatctctcttccacatcatttttgacatttttaattctaaaataaaaacactccaatagtataacaccttttaagaaagttataattatgatctcatacattataatttgatatattatttgttttaattataagaaaaattttatttcttatacttaataacaattcctattacaaaatataccctattaattttttttatacaatattatcttaataaatcctcattttacctgaaataccctattaccatttaattttttttttcaaaacctaagaaacttaaaattaaataattcaatctctctctctcaaacccatctgacgagaaccactttgcacaaaaaaaagcctacagccaccacctaccactgttgggatacgaccaaccgctgtgaaggatgtccgcccagccttccctcatcagcccaactgttgcccctcgctttgaaggacctctgcccaacctccctctcattgtggattaatgggtaagtgttttgtaaaatattttgtttgaaagtatattataaactaccttgccccatgtatagtatatttttgttagctagatctatgtggttgttgttgtttttttatttttggttttgatataaattttattgaaatcgtgagatcattgtttagagtattctgtgtgttcgtatttttttcgatcggttctcgacatgttctcgatgggttcttgacaccattgtctcaaggttagggatgatctttcttgactggttctcgataagttctcgacacggatgtcccaaggtcagggaagacctttcttgacgagttatcgatacgttctcaaaaggttgttcagagataatacaaataaaaaataacattgcaatataccaacatatgatattatgttaagattctgtcgacaacccatcgataatcaatcaatattcaactgataataaataaaaaaaaacaaaatttcaatatttttacaatgcttcaactatcgagaacatgttgatagcacagactttaacctgtgtcaagaaccaaaagctaaataatcgataacctatcgataatttatccatatataattaatcgatatttaaacgataatcaataaaaaaacaaattatatatttttttggcaatgcttcaattatcgataacttgtcgataacatatcgataactcattgataatagttaaacttaatgattgtcaccaaaagctaaatcttattgacaacc

SEQ ID NO: 239973 - DNA, 1870 bp, Cannabis indica
catcattggctttcggtaactcaggcaaccctttctttgctcgccatgcaatgtacttagcacattctttcttcatgtgtcctttcatgttgcaaaagaaacaaccatcatcactgttggtttgatgacccaacacacattttatatatacaataccccaataaattctaacaaaaaatagtaaatctaggcggcctaaatccacatatcataaattatatatgataaattaaaagtacggaaaaaaatgtcaaattcaatgatactacatcataaattcattttaaacgataaatatgaagtatctaaaacctttaaaagagttgcgcgatatatacaatacaatgtcataaccaaaataaaaactaattgtttgaaagaaagaatattgtcatacatatgtatcaagaaagaaactaaaaactcaaactatataaacatagctaagcagcaatagctatctatcgatgtaaattatataatctaattacattggtaagtaaatgtattataatgtgggtatattaatgtgaacttgggcattgaaattttatatatatattgaaatcttggaacaaaaaatatggacaaatttgcctcgttcacattgtatttatatctatttaaatatcttatttcaaagcaatatttatatgtatttaaagattcagtcttcctataaaacgaaagaataaaaataataaagtagcactcactgaattttaaatttaaaatcttgaaacaaatatatatataacaaatacatttcaaaagcgagcaattcaatctatgaacagtttggtaacatgatgtaccagtatatcacatctaaatagaataagcaaatgtgtgatcatcataaatcatttaaagccatggaaccaaagctcaacacccaaaactttcaaggggttatacaacatacaataatgtgttaaactgtagaatcataaatgtgttcacaattaaccactgtcaccacgtaaaatcattctaaatttaaaatcttgatacaaataataaaaaagcaaacacctcatgctagcagaggaaagaagatttgaatttctgctttgtacctcttatttacctgcaataatgaaacaaatagaagcatgatattggagaaaaaaagagaaaaaaaaaaaaaaaaaaaattaataaaatatatatatatggaacaagtcgattgagtaagagagacgaatctgtacatcttcaaactctcgaaggtaaaaaaaaaactgaggcggttcatgaaatagaggtagaaaatgtttaggatataatatatataatatacaatatataatacttaactactaagatatataggatataataaagtcttttgttttttttttggggtctgatcttataggcccaatatagaatctctaaaacaaagagttcatttaaaactttactaaaaaaaaggaagggtgataaattaagagagtgatcacatgacatgattcaccttatttgtattcttttgtttatttatttatttatttttaaaaaaagacataaacatatatgaattaattctcattatcaaaccatgtcacttacacatattctttagcttggcgacgatagtgtggtaccacaatattattagtacaatcaagttttatatgttataaatcttaatttaagaatactaccgatgaaacatttaaataaatatttagagttataaaaaaatatataattacgttaaaacacatataaatatttatttgtcatgtatattgttttttaagttaatttgaagtacttaaaacaaaagcttataaaaacgagctagagtctcatatttttcttatcaacaacagttacaaaaaaaaggtacttacggtgtttc

SEQ ID NO: 239974 - DNA, 1333 bp, Cannabis indica
ttcattttctattcaataagctaatttctaagtcttgtaaaaattgctatttttgtgtttatttaattaaatgttctttgtttgctattaggaaagaagaattatactgctagggaaaaagaaaggatgcaaagacaaagtggcaatagaagctgaaactgggctgatttgctgaagcattgctacaacaaattcagcattctgggcagtgacatgaaaaaagttgcaaaacgaatttcatccatccacatcagtatttatgtagtagccacttaaagtcacgtcagctggctgttatggagagaggaaaccaaacctaatgggccaagattggaaaggaatgagtttctatttttagggtattacattgtaccctaattagctattaatttgtcaagtacaacctccatgaagattaggagctaagctgccatttttgggagaaaagtaattacagaaagaaaaaatacagaaaatgaaggagaaaaagggagcttcgaatttaagaaggagaatgacaaaaggagcccctatcattcttatttatagtatttgtctttttctactcatctctactctttttattcctctcaatttttataaaaactaatttgtagtcatagattgtaatactttgttttggattatgaaaactaaagtaagtatgagatgattttgttaaggcttgaatggctatgaacccttatgtttggtatgattaattttaagcataattttagcaatttcgcatttattcattcaagtgagtttactatcattcatttatacttattggttgtaagtattgctaagctagatctagttctggaaatgctagatctagtagttacaacttggatgatgcaagtgaatacctagatttaggtttttcctagtaaatgaagtaggaatatttcatttgtcttgcataacttgagaattgatgtttaattgttgttctgtaatctggtttgatataagaatatattgaactcagtggtagaacttaatttgtgagttttggaaaaatctcataaacacaagaaaaattctgttatctctctgcaactttgctgaagtaatgctgaaaaactggcagatttatatagaggaaatttagccattcaagtctatttttccatagatacctctttttttgcagataattttccaatatttattgttttatatcgagtttattttcattgtcaccaatttgttttactttcatcaatcatccattccattttgtttatttttctttcaaaagaccttaagttgataattagttggtttcacatttattttgatttgtaatccctgtggagacgat

SEQ ID NO: 239975 - DNA, 2347 bp, Cannabis indica
aagtattgtgactaaaaatacatttagttacaataaattataatttttgtgactaatatctttagccacggatcttttagtcacaacataggaataataatttataattagtcacaacttttttacttttggtcacaacttttttactttcacaagttttgttatgactaaatgtaagattttttgtagtgagtactggtgcttagcatctctaaatatgttgccttaggattgactatcgatactccttaaaagttattatattaaactatatgagacccgatacttaattgaactaacagagatattgacacataagagagtgctaaacaccactgacactctttagcatttctcttttctttagagttgattgttttgattatttcttgtttttaataatatattataattgtgttttttttaataggaaatggaaatgccaagctatgaaagcctttaccaactggcttatccacccttagaacttgatgacttcccacagatcaacttagaagagatgaagcttatgaagtctgaaacgacagatgaatgcatgtcgtatgaaaagttgagggattacatgaatggaacagtggaagagattttctctctatgctcttcttcttcttatcataacaacattaatgatcaagacaactccattaatgctatctcaatgcaacaaaattaataataagacagacaacattaaaacagtactttactgacaaagatatataacttctcctacaattatattttcatatatatacatcgatttattgacacacaatgttagaaattaagttgtgttggggggctaaattaataaccatgtgagaaaaaatggttgtggtttaattttttcaagccatgcaccatactatataggccaatatacatatagtgttcttcaacattcatcgttgagtaaaaaaaagtatacgaactaattttttattttgtttccttttcttctttgtattgattttatactgggtattgtaattggttggtgagatggttgaattttagaaaacaaaaggaaaaacctattcatgtaaaagggttcttattttattttaatttattattttgtgacttcatcatgttatatggtgtacttctcattttttatgttattttatctagaattaataccatgcataaattgatagaaatgagtggaaaggaaaagtctcctcatcatcacctaatataaatatatatatatatatatatatattgtgagaaaattataagtaaaatcaaactaactaaaattttaatcaacaaacaattaacaattataagattaataagttacaaaaactaatcaaaaattaaactagagataaacaaagtattaaaattagaagcaataaagcgataaaacaataaaatcaacactaagatatacattggttcaagtcctatagattaatatgatctatgattttattccagttctagaacaccaccaaatctttctttatcgatttgagaaagaatagagtacaatacagtcaagatcaattctctgttagattctctcaaagtatttatcgctcacactcttacccaagagtctttttcatctacagaagattcttcaaacaaaacccaaactcaatctcactcttttctcttacctctctccctacctctcaatatctctcttcgaaatcacctcttcgaaactcgtctgaactctttctatcattcttctagaaaagctaagtattggtggtatatataggtttaggatatagatcctaaagtcgatgtctgcaactgctaagttgttaagttaattgggacttaacaaacttaacaaactcctcttagcgagatctccatgtcaccataagtcaaagtgctttcggatgaaactataaactttcgagaccatggaccgaatcgcatacccaagggctttcctaataggaaaggtgctagctggagtcggtgatccgggactccttttcaaaaggaaacaagtagccattcagaactccaatccgagagaaggctagctttccccaatgactccttccgaatggacaagataacttttcaggaaagctcttctgggagacaactaattttctatgaagatgaatatctttcggagaccttttcatttggagaaaatataccacaaattccacctagatctttcaaattaaaatattgacggtgatgaagaaagaatgcagccatcatagttggtgttctagaaatcttagtatactaacttctaagatggattaagtcaaagtaatgcttgaacttgttactattagacctgtccaacatcagcaagatttcttttgatctgagc

SEQ ID NO: 239976 - DNA, 1134 bp, Cannabis indica
atgtcatattccaaagcgactcctttaacgcaatcactgtgattcagagtaaccacctctccataagaaccaatcatcacaatatccaaagcctcctagacagattcaattgtgcagtgcttctttcaacctgtgggaggctcattggattcaaagaaattttaatggtgtggcctatgatgcggctcgctgggcaaatcgtcacagactgtttggatgcttcgatttggccaattttggcggttccctgtatccatgggatgcggatggctgctctttaacttagtttatctagttttgttgtttagaagtgtttttctctgtttagtctttttgttgtttgtatgttcttttcgtttagctgtttgcatcctgttttgtcccctgctttacgcggctcgtgtgttttgttctcgccgtggcgactcttaatcaaaaaaaaaaaagtcattttctaaaatgatagaaacttgttatgctctttgtaccactaaagacaagagagaatgattcccaaaagcctgaaccacgtttttagcttacttcttcgactttgaaacatataggcatagccttcttaaataaatgtttcatttaggaagagaatcattgattcagacattattaatcttggattgacttttatgccctctaaattgatagagaaaagcaaatatcctattggaaatagaaagggaataacacagtcacaaatgtataaatcatatttcattaaaaaagagtttaatgcattcacatgcaaaactagagaacactactgttctttataataacacaaagaactggtggtattccagagaccaccacttctaaaccaaactcattcaatagataatccctttcaactgcccttacaatatttaagtatatatttatatttctaaaactctttacacatcaccaaagccacatatacacccttaattacgaaatatataactcaccttctattaaatacttctattaatttgactcttgggtacctacctagcacaaaacctatacaaagtggagcatttaagcaagattatatcttgctgtgaatatttgtccaagtagcttgattgtgctttctataatacttacaagttacaaaaaaaaacaaaaattaat

SEQ ID NO: 239977 - DNA, 648 bp, Cannabis indica
taaattgcaaaaattggtctcaaaagaaatatggtcagaactacagagtgcgaaacaaagaaagaaaaaagaaacagaaaaattaataagagaaaaaaaagcaagatatataaaagatgaagaacaaataactcaaacaactaattaagcctatgtatttctacaaatttaaacttatttaaactttaattagataaatcccagtaacaatacagcatcattattcagatgaataaataataaacataatacaaaatcctaataatctaataaatcataaatttataacaatgctcctgattatttatttttgatttagcatcaacaagagaaaatgtagacaaactcccatgaaaatcttacaataggaactttgacgcaatgctttaactcagcatttggcttcacaatcaatacagtagctagagtttttgtttaatattcttaaattcttaaggctatgtttggaagttggattttggtggggaaagaaataggtaaggaaattgaaaaaaagttgattcaatagattatcgaacatgaaattttgatttttttttccactgtttttccctacatttttctttctatgccaaaatccaactactaaacataaaatccaccaaccaaatcttctcacttcgtatg

SEQ ID NO: 239978 - DNA, 2300 bp, Cannabis indica
ccatatccttcagattccactaagtctttatgcgcccaaggattgccttatttggcatcatactgctacagggtgttacactgttaaattaggataccatcttgctacctccttgcgtgaagcttcagtccttcgccatcacaatccccctctagctggtggtcaaggttttagcgtctaaaattgcctcggaaggttaacagttttatttggcgagtgattcataataccttaaatcttgctgccattctccaccataggcatataattgatgattctacctgctccagatgtcaacatctttgtgagtcattaaatcatgcttcttcctctataatcatgtaaagcgaatatgacagcttgttccttcccatatagacctccccgaaactcattctacaaacggtagtgactttgtccatcatctctttttgcaatttggtgatgatcaaatggagaccattctttgtctcatgtgatttatatggcatgaccataaccaatgctatcatggctcttgcatactcccttctgaagttcttattgagaaagcatttacctaccttcaagaattctaccatcataataacaagcaagtggtctctaaaaagatctactgccactacggttaaggcatggtagccacccctattgataagttaaaacttaatgtcgatgccacaattgaccatgagggggtgttagagacagttggttgctcctactgtcattggtcgttagtgttagttagtccatgttagttttagttagttggttcagttgagtttgttagagtttttgttttagctcaaacttcataaaaggtttgtactcattttgttaatcgatgcaatctttacacctttctcttatctttgtcttctctttcgttttactcttttcttctctctgttttcattttcttgttctttaatggctagacacattaacatggtatcagagcattttcctcctttagcttttaacatggcaactgtaggtaatggtgctacgatccctggtgctaatccttcgaacactaccactgtcgatggagcttctatcataaatcgaccgaactaggaacctgtcatgttcaaccataacatctcgattaggttgaatgatcacaatttttttttgtggaagcaacaagttcttgctacaattagaggcaattttctactgaaatacatcaaagaaccccctcttgctgagttcttgagcaatgaagatcgacaagctaacaaagtgaattcgatctactttgaatgggaagttcaagaccagcttctagtgtcctagttactctcatccatgattgaaaagtttgctgacaagaatagttaagtgtaactcatcacaccaaatttggaattctctggagaaacacttcactctttggtagtatcattcgagactctaataactttgtgattgctgctatctccaaactaatcaaagagaggtacaatgtcaaaaaaattgaagctaatggcatttcagtttgcttacaataattaaaagagattgaatgtggtgtgcatatcattgaaattgatgctcttgtggtctcgcaaagtgttaatgcttatcataaacaatatagcggatttaatgattttatttttgatgtattttattggacattctttttttcaagtgtttctttgcaagagtgctaattctgattatgataagatttagagggttgtcattcgagatataatgttgtaagtgaatttattgattaatatataagggaaattttaatttctatgcatgcattaggggataattttttccctaaattaatacttttttacattaaaaatatatgaccacttttccaaaaccccaaaatacccctctaaaaaactcaaaccctttctctctccttccctcaaactctctctgcctcttcttcgcccaaaaccccatcgcaggaaacccaccggccgtcaccacgcacgtcgtccacgtcggccgcccacacccgaccgcccctaccatcacaggaaactctctcaaacatttttttttcaatttttctgggcttttaaggggtcgggtctgatggggcccgatgcccgtctgatgctagtccgatagggcattttttgggtttttgaggtcgggtccaatgggcccgatgcccgtctgatggggcccgatacacttttttggggtttttaggtcgggtctgatgggcccgatgcccgtccgatgggcccatcggacccgaccttaaaaacccaaaaaaaaaattagtctttgtgcgcggcatcagaccttcttct

SEQ ID NO: 239979 - DNA, 1050 bp, Cannabis indica
taatctcccttccaatgggtctttttatatacacaatttctgttcccaattggtatgaacccatcctgtggacttggaacggccatagcttttaggagaaatctcgtttccattatttatattcttcttcaggcaaataatttataacactcttgttgttggagcagccacccagacatactatgtatatgtcttacgttattcaatcccaggatatataggaaagaaagttatcaccacctatggtcaaaagttccaaatttggagaacaaaataaagtaatacaaacttattccaacataaataaataaattaatactaattatgtcgagattctattccccttttacgttttaagttaatgtggcatcaaagttagaatgacaaacttacctagaaaatattagaatatggaatttcaaccaagtcttttaaaaatgatttattgtgaaaaataaccttccatacaagatcaaaatgagtgatattatatattattaagaggttaatatataaagtgaatgagagctatatagtgtgtgatataatgtaattactcataaacttgtaacttatggggagttataaaatttgaatttgaatttgtaactcaagaatcatatttgattatgctatgaataattattacacaataggttatcggattaatagatatcagtttatagttattggaaaacgttcatatctcatctatatcattaaaataaagattgaaatgcttggtggcaagttggctcgaagaagagtttcaaaacttaaaatttgagttgctgaaattttactagtagggatgtcgtgggttcttcagggtttagcgatgatttctcgatgcgtggtttgtggaaaacactccaggcaacatgtcacctgaaaccacttttcatctcatttaatcctatattttcaataacagccaaagcgaagtggagtttaaatttcaaattttggtctaacctaaacactataaataagatcctatagtttactcataagacacacttttttctcttctattttttaaacataacg

SEQ ID NO: 239980 - DNA, 1161 bp, Cannabis indica
gataaattgaaatattaggaactatatttttagtactaaattttttaaaaaatattttgacatatgtgattttgaagataaaaattactaaaaaattataataaaatattataattaatactcctaaaaagataatgattggtacaatatatacgctcaatttaagtcttctactataaaatatcatttgtctcactaaaagcctaataattacataaatatatattttgatttaaatgatcataaaaattgcatgtcacttaataataggaattaatgtgcatatatatagtatttatatacatatataggtgtgtatatatattaggtttgatatctagtggaaacataagcattagttataataatccatttcattttggaattaaatgcaaagtcaaagccgcactaaagaagtatactcatgaaacatcatgatattagtatataaactattgtttttaatatagtgctagcactgtacatgttattaacacatcacttatattgatgacaagtaaagtttctgaaatataaaatgtatatccaaatagggaactaatattattgctccactaaataataataagatatttttcaaacattcccctaactgatactcactgtgtacatgtcttagctttgtcactacttactctttctataaatatgaaccaattttctccatatgagttgaatcatcagtaattatataaaagaatatatacatacaactatataaatataattatatatatagccatgaagacccagatagcagtcccactttttgttcttctgattatcaactcatgctatgcaaggaccatgaatccaagggcagtagtgcaatcatttgtagtgaagtccaagattgaaaactcatcaaacgaagtagttttgaatgaccatgatgatcggacggtggagagcagtaatggtgagttgggtgctgctgatcctgacttgaacaaccaccatagcattccaaggccttcctttgatggttggaataataatggtcagcatggacagtcccatttaaccccagctcaaattcatgtctaattaattatcaccctatttgatgatattgtcctctatccttttaataataattttattttatgcacgaaataatatttatgctctataggaaag

SEQ ID NO: 239981 - DNA, 1116 bp, Cannabis indica
cagagttgaactgattttatcaccttgttacaacaacagatcatctgcctgacaccaagggtgaaagcaagaagagcatgctcacgggtctgtccatccttagagataccagcttcaaaaccaccagtggtggaatcaatgatgagaacagcacaatcagcctgtgaagtaccagtaatcatgttcttgataaagtcacgatggccaggagcatcaatgactgtgcagtagtacttggtggtctcaaacttccacagggcaatgtcaatggtgataccacgctcacgctcagccttaagcttgtcaagaacccaagcatacttgaatgacctcttgttcatctcagcagcttccttctcaaacctctcaatcacacgcttgtcaattcctccaagcttatagataaggtgaccagtggtggtcgacttgccggagtcgacatggccgatgaccacgatgttgatgtggatcttttcctttcccatttcgaatcaaattgcaaactacaaattcaaaaacccaaatcataataaacattaaaaacccagttaaaaatcaaacaattttaaacaaccataaatttatattaatctaaagaatataatgagaacaaggtaaaaattaaaataaataaaacaaagtgggaataaaatccaatttcctcaactactaagctatgccaataacaagagcccaatactataaatttaaagcaaatatatgacaaaatattttttttttacaaattaagcacaatttttggaagatggtttttattagtacatatcacaataagtcttcaaacacaggtacatacggtgattgaaacacaagcagagaaaataataaaatactactacctataaaaatactgatcataaaaaagaaaaagaattgagctttttagatcacacatgaaaactacaagaataaatcctaaaaaactcttcataatcagaacaaaaacaaccgatcttaacaaaaacaacaatattctatccaattaaccagaatcattaatccatatataacaatcacaaccaaattctacaccaaaaacacataatccagagcataaaatcaaataattcgatagatcaaaaataatctaaaaaa

SEQ ID NO: 239982 - DNA, 1149 bp, Cannabis indica
aatagctgcaaaagaggggttacgctatcagacatattgcttatggcagttccaatacgttttctcccatgcggcgttaaatgagaggtgactattcaaataaaatccagtacttcccggtgataccttagcgttcccttggtttccaggagtatgtggagccttcacctctcctccgggaggcatattctcgttgacactcctgatgcaaaaacacttagtcgatttatctaatagtcgtgcttcttagatccacgtgtcgttgtcatattggtccacctattttgagcaaaattaaggacaacaatatatatatatgcatatatatagattattttttaattattttattattttaattatcatcattatttcattctaatttttcacgatcaatgttcatcctcatatagagatgaattttttaaacacataatgtttaattgtttattatttacttttaaaaaagaacataattaaaaagaacaattattattcttttcctttttaatggatattttgaacttaagtttcatttaattttttcaaaacaaataaaaatgtataatttattcctaggcttggtagataaattgttaaacctatttatctattttctcgctctttcttttcaattattttctattttttattatataaaattttataaatattaagttattgaaaaatcttcaaatataatttaaaaataaatatgtatgtcatggtataactactaactataaatatactcataatattgttaattaatttttaataaaaaaatccattaattaatacttttacaccatctttttcactctcattcatcatttttttttatctatcatgatcttatagatgaatattattataaaaaaaattattatttttatctattttatttttttccactaccaaaaaaaaaggaagtagggtagatctttaactgactatattaaaatggtttgaataaatttatagttgaaaatagttgagttggatagactaagcttcactgctaatatatatttttattttttaactttctaaaaatcttaatttttaatagtaaaaggtccaaacaaatatcacagttgagagctttaaaatataaagggtttgagtagaatcttaattttttttttt

SEQ ID NO: 239983 - DNA, 1736 bp, Cannabis indica
ttaacccctctgacattccaacaaagaaacctatccatttgaggaagagggatctccctcgcctcctgtgttcttcccaattccggcctctatgtcctccatttccatctcaacatcatctatgttcccaggttctacagcaagtgaatcgaacatatttcttacagttgtctgttcaacctcttgcccagtattaattttcttgcccttgatgacctgctgaaacccttcagcatctttaacaatctctttttcttttgctggtttctttggtagccaaacctgtttaacaggttcttttgtcccttctttcttcctgcattctgaggttttatgcccaatgccagaacaattatagcacactagtggcaaccattcatatttaacatccaaaaacacttcatgatcgaattcatcaataaaggaaattctttcaggaaaatcctgatcaagacttacctgaatgagaactctagggtactgcagcctgtcccgattcctcgtcacattatcaacttgcagaggttcccccagctggcctacaatcttgaatagggaagactctccccaatacttgatgtctaggcctttgagttgtacccacgtaggaaccttagatacctcttccttagtaaaatcatcgattggattccatggcttcataaccattggctttcgatcaaagaatacatatccctgttccatgactttgtctcgctgctctaaattctgaaatcgaataatgaatatacctttggccagcaaacctactttcaccacatcatctttccataatctcctcacaaatccttccaaaatgctaattggagggttagctccaataacatagcagaccaaagatggctgccagtagttaacctcatctgcaatatcctcaaattcaatcttaattttcttcttcatttctggtttctctgtttctagccctgagttaataaacgaggtctcaagatttcgcacaatgctagatctgagaatcgagggagaaaccctcttcccagtgttgacatcctgagaagcacgatttgcaatcgtgagccactccaaaaaatcctgtcgaatctcactttgcctgaaaataatcgcctccgattcctccggtgaaaaaaccttctcaatgtactgttccattggttcttgctactgttctattggttcttcaacatcttcgacttccaattcttgtatccccaaaacaacatccatagatctagtcttaatgactctatcagaggatgagggaccagttttcttgcccttcgattttcctttcccggccattttcgctctttttgccatagctccgatagatcaccagaagagagagaaggagcgggaaaatttatttgacaccttaaaatattgagagaactttacacttaattatttaatttttttatttaaatatttaaaaagtgaaaaataaaatagtttaaggtgagaaccaatacggtgagaaagaagagaggaacttaatggcagatggtttgaaattgtgtttgaagattacgttcattgtctgattttccatcactccttgcccaagaccacgcccatcatctcttaccaaacgacgatctacagttttactccaaaacctctacactccaccatttatcgtgtgccaaccatctatatatttatgtggttttggttgatttagactttgttgacaatggataatgattctacataacccaccattgaagaaataa

SEQ ID NO: 239984 - DNA, 1464 bp, Cannabis indica
ggttggaggttgtgccgtcagactttattgcgtgtagcagtcccaacacgcttcctcccatgcggcatttaatgcgacttgattgctcaggagaagcctgacacctcgcggagatgccttagcgttattcgagcttccgggagcatatagagttccatgtgccttctccgggggctacgtcctggacgctaccttatggcataaagacttagcaaatattgtaaattgcttgatccacgtgtccttatctggttggtccacgtatattgggcaaaatcaggggcaacaaccctaattaagtgtttagctactcatgtttatggaagcaaaatcacacatttaatttaagaaaagagaagaaaagaatgctgaaaactctctgaagaatgcctccagaattgcagttgatctctaaaattcgtactttgtattctgctatttatttctttctgaattgcttctcgaaattaactgaagttcagttcttatatagctattgagggactaaaaagatagaaaaacgcacatgctgaaaatcctattcaactttgaattcagaagccacaaagcccacgttgagagaaaaaaatatagatttttgctgttgtataggggcggcccgtggcccgtgggttttcaatgtggattattttttttaaataggcgggtcgcggcacacccattcttgggccgcggcccgtgtgctccaatgtccacgttttcacgcgaataatcttttttttttttttttttcattttaggactctgatttttcacattgatattttatgcgatcttttatctttttccgttgatatttttctaatctttttctcttttaaaatctgtaaaaataaaatttaacaagcgtaaaattgctccaaacacgagtgaaactaaattaaaagtatactaaaattaatctaaaattagtactaaaaataacctaacaacttcggtctaatttcgtttaattttactaatataataattttctttatactaaatcatgctcctcaaattttaatatgtactaaatcgtgcttcgtaaactttgacatataccaaattatgtatcttgaactttcatcaatgtcagacttccattagtaaatttaaacggaggtctttgaatctaacaatctcaataattttggaggaatttttaacggcttgaaatgttcaaaaaaaatataattttatacatatcaaaatttggaagacaaaatcctaattagcctaaaaattaataaaagtgacccaccattccgaatatgaaaggtcaattaatgttgatattggagagaatggtgcatgtatactgaaaagaaatatttaacccataatgggtaagtggaaaagcctttatgaattaacatcacattaattcagccaaaaaaaagttaacatcatattatatggtaaaattactattaaagtattagagtaattggcggctaaacc

SEQ ID NO: 239985 - DNA, 1201 bp, Cannabis indica
atgaaaatattgtaaaacacaaatatatatatattaaattacaaattcaatattaataattaaaataaaataataaatttttctaaaaaattaatacaaatctctacagaataagttaacaaataaatatggctttattttataaaagcttaaaaatatggaaatataattccatataactaacccaaattaaaaaaaagccatagattaaataaaattataatttctccatatttatcaaactttagaaaagaaatccatattttacatgatttcctcaagaataaatgttaaggacaatctaactaataactatacacaatatgacaaaaagtcctaacagaaagtgttaatatttacaatgtgtcacattattgcctaattaagatccccttttgaaaattggtatttcatactatgttaacacatcaattaatttaatttataataaatatgttaactaatttttgttaactttattaaggtttaagtttttcataaataaaaaattaattgacgtgtcaaactttaattagttaaacatatgggacaccaatttttaataaaaaaaattgattcattattgaccggtcgaaattacggtcctttataaaaaaaaattacggtgttagacaatggcgcctaattaacatatttatatttttaaatattcatatatagagaattaataaaatacggtagattaattgaataaattctatatttagtgtcatttataaacaaaataaaatgtacggtagattaattaagtaggtaaaataatatatctttataacaaaaattgcattagacaataagaggaccatcattgttgaccggtcgaaattaataaagaatgaaatacatatattgttgggcttggctattgggaatgggtagtgggaattgagttgagtatggcgtatgcatgttgcttgactacgttccaagcctcaatgacatgagattcttgggtgagagtggctccaacagcgaaacgaagcaaatagataccaccaacaaccgaatgggtcatgtaaatcccacctgacccattgatagactccatcaatttctggttcacttcattcaccaatcccatctttgtgatcttcgttcttgggctactaatatcattactgttagttatctcacccaatattacccccattactaatttttagacttactactcattact

SEQ ID NO: 239986 - DNA, 1395 bp, Cannabis indica
ctgtaataaaatgtgacactaaggcatgtaatttttaataataataattttgataatgtgtaacatttttaatgttataataagttttgaattcttatatttattactaaattaagtaatttattaattgaattaattgattttgataatctgctattttatagagttttcgcatttaattcattttaatataattaattgtactaatttatatttattttaattataaaaatttactattagtacaattatttaagttattatatgatcttacatgtttgacttattccataattgtgctagataattaatatttatttttagcacatacattaattatatggactttatatttatgcatacaaataaaattatataaattttgtatgtatatttactattattcatacaacattcattatattagcataattatttctaagttgttatatgtatgatttaatgttatgacttaattgtatgatttatttttatgcttaaatacatgtagttcattataatgtatgagcatctgtaaatatttaaaatttaaatatatttaattaatttttgtaatattataatatactcataaaacttcataaaatttaatcataaatataatatttctaagtggttcatataagtttaaataattaggaagcaaccacacattcttaattatataaaatatatggatcatataagtatttagacgttaatcttaatttaaagtgctaaataaattataaataaattttaacatgcaaattagttaaaaattagcacattaaatttcataaaatattcataacatttaagaatgaattaaatttatgaataatacataataattttgtggttgacataaaaagtatgaaactgagacaaatgctcatatctataacgatttttaaggatctttgaacgaccacactaggagtactactctctgtgatttcttattacgctataacaaaattattcttaggtgttatacctaaaattcagttatatactagaggttgacatgtgtcctacagaaagaatgtgaatcaactttgataatataataatgatgcatccttaaatgcaatttaaaataactcatccctattaaatataagtttgatagataatgttcaaacttgtgggctactcagtcttatgcgagacaagaataataactattaaactggtattgacgagacatatatttgcttcgagataagctcatttatatatacaagaagaggatactctcctgcacgagcagattaagtgtagcaacatacaaccgcctcgcattacacatagcgagaagatcaccttgttgagttttgtaccccaaataaaactcattttaatataatcagatttactaattaataaaag

SEQ ID NO: 239987 - DNA, 2092 bp, Cannabis indica
tttttatatttaaatactagtttaatttaataatcactaataattattaaataaaatataatttaaatatttttattaacttttgacaaaaaaaaaatatcaagattaataccattttatttatttctcttttagtcttctctattttcacttagcataaaaattctcataactgatagaatcaataatgtgaatcttaatttactaaaaataatcaattattgggacttactatttggtatttatcctaaataggatcatggacccaaaaaatataggctctcaataagatagatctataaattaacaaataaatttcataacttattaattcatcatgacttcactatactcagaattgcacttctgatttcacgaaatgctctatatacataatatagatacgatattagttatacattatttatataaaaataataaatgatcctctatagatggtttacaataagtaaggactaaaactattgcatctcaatgtattttatccttgaacacttagttccttgtaaatggtgttcaataaactaatataattactaaaatgagatctcttcatttaacgcatttaactaagttcaaaggaaattatcatttcacttttaacaaatagaagttatatttatccatgtttaagattaacactctaactcaattatactaccgagttctcaaaatgctagtgttagctagtccgtagggaagagcttgcggcgaacaaatcaaagaactcaatatgataaactaagtgatattatcttagaatagttataatgataagattatgataaatgttctattttttaatatcggccccatttcaatgtaaaccttatacatccaatgataaatttattttgcttaataccttgaaaaagacataacacttaccaaaagtgtaaataaaccttattgttgacttcatgtcagtgtaaatccagcgcattaataaactataagactataaaatattctaagcatataatcataattattttctactgtaatgaggtcactataattatgaataattacatattcttaatttaaatagtatttatatattaaatatataattacgtaaataaatatttaaagtacacgattgataaagtcaaaataaattttttgaatattattgattaaaaataatattaaattaaatttaagttttatttagggcataaatatccattccctataaatatttcatttttggttaaagtaaacaactcagctcctatagtctgtgtagatcccgccttgttaagaaggtagctgagaccaaattcttcctcatctctggagtgtgcatcacatcttttagaatcatagttcttccacaggtgaggtttaatttcacatttctagtaccagcaaatatagtggtgtgggagtcacccaacaacattttttgatcctcagcagcagcaacatatgttttaaatatagttctatcatagcatacatggcgagaagcgccagtatcttcccaccacccttcagatccacaaatgagattgatctttgaaatcatagttgtaaatggtagctcttctgtcaggttagcctacagtgcagaactaggcatgttcttacactttcgtgccatatgacctagcttgttacagttgtaacacgtgaacaaaccagaatcatttttattaggggtacttgttgcctattgtttttggttcctttgatggttccaattctgattgttattattattctgaggttgactgttgtggttcagctccgctttgcgattctaattcttaaagtttttcccattgggttttagaacaatagtgaatttagtgttgttgttgttgccaacaacaagcacctcttccttttggtcttgttttcgagcttcctcctcaattcaaagacgagtgatcagactttccaatgaaaactcttttattttgtgcctgagagtatttttaaaatctctccacgaagggggcaatttatcaatcataacaacaacttgaaattgttcatcaatagtcatacctttagacagaattttgtgagctattttttgaagctcgtgagactaagcttt

SEQ ID NO: 239988 - DNA, 909 bp, Cannabis indica
ttattttttttttattttttctacaaaataactttttgaaaaaaaccatatttataaacaaattatataaaactaataaaatatatactttttaccaaatattatattgctctagctattgagtattaattattatatatatagtgtgtatattaatttaaatatatttgatcccgtttattaaaaaattgtattaattagattatcttctcatgaagatgatgttcttataagtccccctcggatgctaccagcttcgaattagagggcgatgttttggtgtacctaaacagtcagaaactttgtaccattaatattgaaaccaaaaaataataaagaatttgtcttttcttttttcttctactaactccattttagatacacaattcatgaacctagctaattcacccttttagcagtgaagttgtaagtgttacatttattattattattgttattattcccaattaattaattaactagaaatgtgttgattttgaggtaatgttgcgtaaatagttagtaatattttatagactaattatatattacacaatgttatctctaagtagtagtagacatcattcatatttattagcaatacacattctaataaggtcaggtagctagggaaaatacttcctaaaccttgaaatcaatgtgggaagtaagaaacacaaataatatatatcaagtaatatattttaatacaagtaatagttagctagcttgctgaatattattctgatccaactttatatatgtatatatatatatatatatatttatataatactagtgaatttttcggacgttgtatataaattatatgttgtattaaattaaatttatttttaaataaattagtaattttaaaagaatatctttcaaaataacttaaaatccaca

SEQ ID NO: 239989 - DNA, 1036 bp, Cannabis indica
tggttcctctaataataactactcgaaagttgttgacatgctaccgtctttatttttgtgaaacactatgacttatgtgtcttctctcattttcaagaatgcatgctttctaaaaagttattgataacaattctcattttctataatgttggtttatatatactccaatatctaaattttaggttaaaatttattcatcattattctttttcatttcgaggcagtatgattattttttaatgccttttgcattatttacatatacttgcactgatagtgatttctgcttataaggtcttcaaataggaaagttggagctacaaatatgaacagagatagcaatcgttcacatagtgtatttacttatgtaattgaaagtagatgggaaaatgattctacgaccaacttaaggtttgctagactaaacttggttgatctggctggatcggaaagttaaggcaacatcatcaggcttgcttcagtaatttgcatgacactttccccactcaccaacttcttccccttccctaaaacaggcagaaaacctctggtgctaagggcgagcgtttaaaagaagctgctaacattaacaaatctctgtctacattagggtacttattttcttgttacattgacaaggcttgatatttgagacataatgattttggtcttattctgttgaagaccaagtcacaataacggtatgtgataacctcacttgagggtgctttgtgcatgcacccgtggtgggcacaacaaagtcgagttcgtattcccctctaatgatcagagaatgagatcttagaaggtcactcatatgtttatcaactgtcactttttcatgtcttctaatagaaaataatgggttgtttggtatgtaggtttcatttcatgggaataggtttaatattgatgagagagtgatgaaggaaattataaacctaggaaaacaacattattgtgtttggttatgtgcagtaatggttgacgtaggaatggaatgtgacaacttattttttacaataatgattatttt

SEQ ID NO: 239990 - DNA, 1068 bp, Cannabis indica
ccaaaaactgaagggactcctagtcagaatctcatcgaatcatgaatagacgcattcaacacgtgtcacccattaggatgtaaggtcagctcaagtgaagtctacgtgtaacttcggaagtccagtgcagacttggggggcaaatgttattccattttttgcactatgatgtggcagcatctgatggtgacacgtggacctgattccccatatttggttgagagagatgttccaaatagggcacatcatacacctgcacgaacattgtcttcctagactagtagtggataattcgagcagcgcatcaacacttcacattcaagaatttggatcgcgaagcacaagagcaatccgtataattattggatcgtatcacagatatatggcaagctgtccaaatcccacaatctgtgtattctaaatatgtaatatatgttcttaccaattatagatattgtaagcaaaagggaaaccttccctcaaccatgtaaccctataaatagttatcgattctcactcgtgggtcgaaagaattactttagagagatctaagagagcatactcagagattttattgtgagagcttcaagagaggaaacattgtgttctttgctcttaagttaatacaaatcaaggggagtaggctattaccgaactgaacggggccgaacctctttaaaaatcttgtgttccttacttatttgcttatattattcgtaaatcatattctttgtcgcttattattagactcattggcgttggctaaaagcgaggttaatattttgattaaaaaaatattacacaattcatattgtctataccttattgtgccagttgatgaatatacataaataagttgcaataaaaaaaaaactcaatgaaatcgctgaatcgattaacacttttaagtatactagcaaaaaattacgtgcgaggcacgtatactaaattttatgctagtattttttctatgttatttgaaagtaatacaattaaaaatttaagaaaaaaatattattagttattaggtgagattattattatgtatatctaaatattatagtttat

SEQ ID NO: 239991 - DNA, 1319 bp, Cannabis indica
ttttcacaccctttagcttccctttttataaaatgggttaaaaaaagggaagcgaaaggcccatattgtagtagtgtctaatgacgctaatttttatgaacatagatttctatttaaattgagaaatagtaggggtgcatcatctagaaacatgactggtattagggataatgagcatgaagagtgtatagaaacaaaaacaagaagaaagaaaagaactaaagaatctaaagattttttgtgcatatactctagaggaggatccttctaacctccaagaagctttgacttcactgttgatttgtgaattgaagttattaatgacaaaatggactctcttgagtaaaatggaacttggcatttaattgtgttaccaccgggttgtaagataataggttgtaagtggattcttaaaaagaaattgacaaagggtttagacaaaaaaaatgtagatttctttgatacatattcacttgttactataattatatctatttgtgtgcttattacttttgttgctactcgtgatcttgttgtgcaataaatagatgctaaaatttcttttttgaatggtgaattagaaaaaaaaaattacatggaccaatcggaaggttttgttgttcctggtcaagaacataaagtatgtaaattagataaatgcttgtatgacttgaaagaggcacctaagtaatgacatgagaaatttgataatcttgtcatctcacatggttttaaagtaaatgaaagtgacaaaagcatttattataaatatgaaaataacatttgctgtattatacatttacatgttgatgactttgctgatttttggatcaaatattcatttttgaacaatgtgaaatttgtgttatgtgaaactttttgacatgaaagatctaggtgaagtgaatgtgatccttggtatacagatcactaggtctgaaaatggaatttctttgaaccaatctcaccacattgagaagatcttaaagaaatataattactttattagttaacatgcttgtacactatatgatccaagtgtaaaattatttaagaacactagtgatggtgtaagacaatctgagtatgcgagcatcattggccatcttcgatatgccattgattatactagactcgacataacctatgtcgtgggattactatgctagtttaccaatagacctagtgtagaggattttatgctattgagagggtcatgaggtacttcaaaagagtcctaaactttggattacattatcagaagtttttagctgtccttgaagggtataatgatgctgactggaacactttatcggatg

SEQ ID NO: 239992 - DNA, 2020 bp, Cannabis indica
tatatatatatagttgatcttatttagcttgctgaaggaagatttcccctcaagtacttaggagtctcaatgagacctaccaaatggcgattagaagattgtgagcccatcttgaagaaaatcaaaatgagactccacacatgggcgagcaagcacctttcatatgcgggtagaatacaacttattcattcagtttttcttggtttttgaaactattggatgagcatatttctccttcctcaaagtgttgtaaaagagactgagaagctttggaggggtttcctttggggagttgatgggaaccggagcaaaattcatgttgcttcttgttaacgcagattttcgttaaccaaatttgagcctcacggtaataattccacacaaaaaaagtaaaagctatagaaaaataacatatgaacacagggttttttttacatggttttgcagttaaaattctgcatagtccacgagtcaatcttattcagatttctgagtatttttttagggcctctttcatatgagttttttcgtccctcttttgagattgtttgccactatttataagtacatagtggacagttaattacagagttgaccagaatatgtttacagccattattcttaaaatcgtgggatctgattatatatcacgaaatgtaaatgcggtgtatgattttgaaaatcgtagacctgtgattttctcgctttcactgggtcaaaaaatatcgtatattaaacacgtctttaattgttgaatctggagatgtctcgatagaaacttgattgtagtgatcccaatagcgagttgagaccattcttctttccgaggtcgacaatgtatgtcttacgtcgatcgtcggtataaagaaatcttctgacttgccaggattatgagccttgctcctgttagttggatgaagctatagcaagtctcctcatagcgagatggcatctttcatacttgttcttcgagtcgatccgaattttacacttagtttgcttattccaagctaaggtatgtgtccctttttttcggtgcctcgctattcacctttagcgacatatggtttctcgttaatacactaagtgctggtttgtacattgattcctcacctaagaccttacagccagcgggttacaaatatactctgatacatacgtaattaatgagttattccataaaaagatattgcaccgattcacattccctttatcttgacacatgtcctccagtcaaatttttggtataataaatgccccttaaaaagttcttttttagtaaaaagagatttttaataattacagagggcatttttgtgaggatcttttcttggagaaatgcaccctttaattctggcagttgtacggttttgagagtgattatgaatcatctcttcatattttgcacaacttctagccgttagatttctcaatctttgactttcttgtcaatgaacttcgtgtataaaagggcgactcaagcttgtcatttttcataaacctctggcttcattagtgaaatccattttcataatggattattttcgttctatcaaaatatctcttatgagttcagaagtttatccttccagactcataatacccagatgcaccaaccattttctatttgttcctacagatttcaagcctcaaccggagccaaaaatgatagattccagggttgaggagcttccgaccaatccaaaccaggggaacctcgtagccagccatggccgatcctcacaagtgatcccagagtgtatagatcttgtgagtgatctcaaaggtcctccttaggctgatgaagaattccaaaggaagattggcatggtttcaagtggatctgggaaggaagttggcgtagtttctattagagaatccaaccaacctaagaccctaacctgttccaggagatctttgcgtcaacctctctccgatgttgagaaatttcctgaggctgggaaaaagatctcggcttcaagaaatgggatcttctgatgatgaggggaatgaggtctgt

SEQ ID NO: 239993 - DNA, 1213 bp, Cannabis indica
aaaaaatcttaataaaatgttttaattgggaatagttaatatacaaaatattaattataatagttaaaaaattagatgttaaaattatactaataaaaactaattaatatatgaagagaatttttttaagagacttttgctgtaaattttccttaaaattataatacatttcggtgttggggaggtttagtgttgccttttgttttgtatagtttgtttgtattttgcttgtgattaatgaaatttattattttcttgataaaaaaaaaaatgtagaaaccaaattatatcttcaaacaaatgaaaaataaaagaatatgtatataaacttggaatatattatagagaaactatattcaagctacacagtaagattaaatgaatacatacataatgaaaccacatatatacaatacaccaagccactatttatagttactcaatcatttaacttaaaagcactctcaacataagtagtgaaatctgatacaccaaatcttttactcacatttccaaccctcctacttttggtatcataacaataccaataatcagtttcagtacaagaaattacaagagtcccatttcttaaaaaaccaactggaatgtagctacaactttgaccaaacctatttggaagaagagtgagtaaattgcatgacaaatatttgaaccaagaatctgagtcaccgtatttcttcataacccaaatctcaactacttgaaattcattcaaagtgaaaaaggaaagaaacccagaaaagttagctaggttgttaccataatctctttcaagtttcacagttttaggtaactttatatgcttgaaagtctcattacttatatcaaaagaaactatccctaaagatgattggttataaccaattctgtttacaaaccaaaccatccaatgaatacactcatttaaaacaatggaacaacccaaaccaacagaaattgttatatcaaaattaggaatttcaaattctgaaaatatgttaggcatagccatttttttccatgaattgtttctcaaactaaaaatccacacttggttgccatgtttgaacaaattatgggtaccaactgttggaaaaattctcattacaagagagaataggaggattacaatcaaaatactcaaaatacaaataaaagtatttcatcaagattacaagaaatctagaaaagaagaaggataacacacaaaaag

SEQ ID NO: 239994 - DNA, 2021 bp, Cannabis indica
cgaaatttacgagaaaaaatcctaattagcctaaattaaatttcactattcatttcagtttaaactccataaatacaagtttattaaaattaaaaatttgaaataagtaatataacattataaaagcaaatacacaaaataattaaataagcataaaaaaatgtaattaaaatatattttttttttaatttttaattatatataaataattttttaatatatattcaatgtaattccattagtccattttttaatatgaattttaatattaaccagcttcaataaccaatctaatacaattagaattaaaacttttaacatcaatatcaattaagttataagagtcaaaatggtagccacatcattaagagcttggaaggaaaaccacgcaatacttaagaccttcacttcacatcctttgactttctttattttattaaaaatacagagaacgaagaagactcaagtaattggaataatatattactagagaatgcattatttatttttttctgaaagagcattatttttgtaaggttgttatattgtgtatgatatcatttgcaattgcttataataaacaaaaaattataaaaaatttccaagttaacacaaaaacccaaattgttcggtgagggcatctatgtcacacaatactagtctataaaagggatgatcttgcaatctatttgaactagttctaaactaattactttgaatttttgatgtattagaaactggtttcaagtgtttattgtggattgttatattttgttcagagttttgttaaatattatggctaatatctagcaaaatattacttctccagtgtcacaccccacgtgtagacaagagcttggtgatataaggtataactactttgccagatctgctcttatagttttcctgagataatccttattatagtttttattagactcatttaaatattttagttaatatacgaattatattagattttataaaattgtaattacattggattttatttgtgacaaataatagacattatttgatttaataattatactctagaaatgttaaaaaaaaatagaaaatttaacatttataaattataacattaataaatagttattattaagaaattacaataacataaaaatataattaaaaactatataattacattttaaaaatattattgaaatgaatataacacaaggaattataacattaaaaaatggttaattattaaaataatataacaatattaaaatgtaatatttcttcatatataacataataataataatgtaattaaaacttatctaaattatgaaaatgttattaatgaatataacataaagaactataacacttaattaatgttaactatttataatatataacaccaaaataatgttataatatgctatttaataacatgtaaaaaaatataactaaatgtcaatacttttaattacatgagccgtcttaacaattgctaaagtgttataaaatgtatttaattacactttttaagtgttattgtaaatgttttttcttgtagtgcaacaagataggcaaaccatatcttttataaaaataaaaatgaaaaccttaatagcacctttaattaaaataccaataagtcaaacattaaagcattgaaaaagtatgaagaatgttagatctccaatctaaataaacatgcgacaaatcacacctatatcaatgtatcacccaaagatcttcaataaaatttagataataagaaccctattattcaatctagaataaaaggaaataacaaaacaaccaaccatagcgataacaattataacaaataatcgcaccataaactatgaggccaataaaaattttaaaatcccctaatttgaacaggccaagataatcatgctactaacacaaatatactttgaaccaattgagatttccctaacataaatgaataaagctctactaccatagcaataagaaggtgatgtgtaacaacactattattaaaaaaaaaaaaa

SEQ ID NO: 239995 - DNA, 1553 bp, Cannabis indica
ttactgagtctgtcgactcatatatatatttccatgtggaggcaaaggcaaagcgaaagctaaagctaaacaacaatgagtggtgagcttggtaaaattagtacatatccagacatatagacttagaggattgcgatcttcgggacaccgttggtagtatttttaattatgccgttagactacaacttttgattattgtatttattatgcttgttttataaatagattttgggatcctagattataaatattttgtaaaaatttttaaagtttattaaatttttatatgttacaaaaattttgttaaacacacttttatgttaaaatcctttgattagcaagagttagtacagtaattaagaaaataatgtaacgtgtatagggtattatagcactactcgcccatacttgtttttcaacaccttgggcaatgttttgacttagtttttttttttttttaatgttgattcatatgttcttatttttagggctcaaaaacttgtggaaccctaatatgggaacaatgccatctttttagccaaaaacatgacaccgctcgcccaaagcactccaccaccatttggtggctttgtttcacgagttttattgttagataaatacatttgaccaattactccttctctttctctttataggagtagtgctatctttttgaccaaaaaataacactgctagcgtagcatgctattccacctttgagtggctcttttcatttgttttatactctttgatattggaaaaacacacttggtcaatttttcttttgtcatttttcttaggggagcagtgctatttttttggtgaaaaagatggcagtgctccccttgcacctttgagggtgtgtttttgtacaatccggactcattgtttaggtcttggtctccttgtatctcaatgagtcaatttcttgttaaatttctcatcagattagggttttggagcaaaaaccctactttagactcatgaaaccctaggtttggaactctagggtgtgagcatggtagtgcttgcatgaccttcttggtgtaccatggggcacccaaatagggtaccatgtagtctgtggattaatccttaaccctgtttggtcttttgagtgttggtcaaaatcgttcttgttgacttaagtatcttcaaggtactctgacttgtgggcccgcatggggaatatcattttattttttgagataattgggtataacaaaacgcatcttaaaatagtgaattttgattttttttttttaaatgactacagaaatggagttatgtaattaatatgttacaatatgacgtttaattttaataaaaaaatagtgtttctttttaaaaaattaaaaattcatagtaaataattgtttaattgagttagcaaaattgtaatgaccgcttagctttattttgagaattagtagataattagggcttattctcaaaagtaggcttttaattattatttttgcaattatagagatatatttgatttctaagtatattaactatgatatttgggaaattttatatttttcgtattt

SEQ ID NO: 239996 - DNA, 934 bp, Cannabis indica
aataaaatcatcatcttttaattaaaaaaaaaaaagtatcatgttgacatttccaaagttgattactccctttcccctagaaataagcaagtaactcaagtatacaaccccataaataatgatgtacacttggggggaaggagatgagtaggaagtgtatatttctgaataatcaaggattagacacccttgattgacaatgggaaacacgctcctccatgcaaaatactgctaagccaaaagaggtctcgaaagacactcatgacataacgctgaaatgagaggacgcctctcaagagtaagtaaacattttccaatcaagagggtagcgcggtcaagtactataagctccttcccatctgagtaaaaggatgaagaaataataagaggtggagactgctcaaagacccatactccgtcaatgtaaaacccactagccacatcgaggaaagatgcctagccaaagagtgatcgcaagatatgctcaaccagcatcgcaataaaaaaaaaaaaacaagtccaaagtagacgattcacttaccaaagtaaggagaaccactcagccaaagagccagagccactcgaccaagtttgattcccaatctcagacatatataaaataacggcagaagttctacagtcatccaaaaatataaaagaataaaaaataacaaagtccctagagtttccatgaatatggccacaagaagaaaatcctaatggttacaattgctagacggggctacatcacgtcgatggttgcctcggtgtgccacgatcgcatcaccgcactcagccttaaaggattcaaccatttgtgcagcaaaggaaccaagaatgctatagtcgacgtcagggttttgtatctagaccgcgtatagcaagcatttaatcttgtcctctgaatcttccttgttccttgctttaatggagc

SEQ ID NO: 239997 - DNA, 1539 bp, Cannabis indica
attacaaatctaattttatatataaagtttgagctatttgatttagaaaaaataacaaatttttagaagaaaaatattaggactttgaaagagatctaagaaaaaaaaatgaaagagagtttgagagaaacttgagacggagtgagagagagagaccgagacggaagtgacgaaaacagaggtgaggaagagacctagacggagtgacgaggtcgatgttgtggacgaaggtaacgatgccgatttgggttttgttttcttaccaattgaggcttttttgggcagagcatttgggcttttggcggagcaatcttcaactagcatttctggggtggagcacatgcagacgaagaaaaaagtagaggaggagttgtcgacggttccagaagaaaagaaagaaaaagaaagaagaaaaatattagaaatactgaaaaaaatgactcaagacagttaggaagtttgttagaaaatcagttaggcactcaacaaactgcctataatgattgtaacaaacaagactatgacaactcacaaatattttattattcagttgtaaaaacactgttataaatacaagtttagctcgctcatgcatattagttgagcaatatttttcagtcatcattctttcttcttccttctttccaagatcactgttcttgatccttgatatggtatcaaagctatggcgtccaacgaccaacaagatccaaatccacgcaatgaaccagtccatccaattgctcaagcttaacatgaagaaattccctaagctaccttaccaaccaacaacttccttccattgaatctaagactggatcgatccaactacaatttctggagatcgttagttcttgcagccactcaagcctacaatctcgacggctacatcctcgctaacaatcctcctccgcaacattttttagtaggtgatgttcttaaccctgtttttctccagtggttgagattcaatcaattcttaatgcattggttaatgaattcaatgaatgaggtgatgcttggatacgtgattcactgtcaaatctctgctcaaattcagaacactctcaatcaattgttcaacactaggtcaagagccaaacttctccaaattcgtggatcgttgtagtcaacgaagaaaggatctatgacaattgatgagtacttcacctctcggtccgactctttatctttaagagaactgcaattcatgctccacaaccaagagatgagcataaatcaacacactactcaagctcttgttaatgtgcaagctaatctcacaaatctgaacatgaacaataattctcgaggtggttctggtaactccaatagaggctatcatggtccctaccgtggtggaagaaactcatacaataataaaggtggaagaggtaacatgtcgacctgtcaattgtgtggaagagttggctacacatgtgtaaaatgctaccacatattcgatatcacattcaatggaaatcataccaacaattatgccaacacctccacctcccacaatccaccataagctctgtt

SEQ ID NO: 239998 - DNA, 2036 bp, Cannabis indica
tttttgatctccattttgcaaccaatcaactctcgaacgccgctgccaatatgtttcttcttgggctaacaaatcatctaggatattttcaatttgtttcaagtctgccatggtagttaagtctcggtctaccacattgtttaaattcgcaaccttcttttgagctttagaaattttcttcttaatattgccaaacttttgtctatgccattgctgtagagaatcggaacacctttggagattgtttttgaaaagtgcaacagtattttcggttgaaccttgctgccaactttgttgaattaaagtggtagcttcatcttcttgtaaccaaatcttctcgaaacgaaatctggtgcgtcttatgggctgctggtgtgatgcattctgtagcagtatgcgaactgcaatagctcgatggtcggatcggtaatagtccaggtggtgcgtggtgatggtttgaaatgtctcagtccacaaagtattgacaaagcaccaatctaaccgttcctttattgtatcggctgtggttcttcccttagtccatgtgaatggatctccttcaaaagcttgttcatgtaaatggcagcgatcaagaacatgacgaaaattatccatttgagtctcattacgcaaggctccacccgatttatgacgatttgacaagatttcattaaagtccccaattatcaaccatggcatcaaaggtgcaacatctttcaatctttctaaaagtgtccatgaattgtgtcgattttgaacagctggtgctccataaaaagtagtaaaattccatgttggaccatttccacaagccatgtaacaatcgaaagtatttatattataatttaaaagtgttacatcaatatcatctttccaaagcaacatcaagccaccactaagaccaacacgagggacttcaagtccattattaaaatgtaaaatactacgtaaacgagtaatagaattaggagctaacttagtttccataataaataacacacttggagaatgctctttgacaagcaacttgagatgacggagagctctcgggttccccaaaccccgagagttccaacttatgattttcatggttggtggcggagctgtacaacagactccacattgttgtcatgatcaccaatagaatccatttcgtgaatagaaacatcaaggtgaggttcaatttcaccagacaaggatgaaacgaacatttctgagggagagcccctacattttttgagtgtttgccttaaatttggtccatccgaatgccttttgctgaaacgatttggtgatatgttttctttctcattttgctgaattgcataaggtgtgacaattggcattggtataattattctttacttcattgtgtttgggactattttaacccaactagaggatgaggatgggttgaaatagtccacgtggatttattatttttttttttcatttcttctaatgatttttaaaaataataatatatatgtattatattgattttaaaataattaagatttttaatatttaaaattataaattgaaaatttttgtatttattcttttatttgttgttttttacaatatgaattttaaattttagaataataatatataatttttagaaatattattttttaaaataaaaattattcagtttatttattttaagaattatttaacattattttcataataatctatatttttaataatattttatttttgaaaattattttatttagttttcataatattacttaatagtgtttgacacgattttttatcaacttaatcttaaaagataattaattggataataaattcaagaaatgaagaggtaaaataataaatgaacactaaatatttttacgtaattttatagttaaatctatatagtccaccagtcaatattatttatgagttttggttgtgtttacaattggacatagtttctctaaattaaaactgtatctcctatttcttttgagtgaacccctatgtataggaatatgatggtggttactcaattttat

SEQ ID NO: 239999 - DNA, 1231 bp, Cannabis indica
gttttatttattagtttgcaatgaaaattatattagtttttataaactaacgatacttttatttagttttagacaatttatatagttttgtaattataatataaattttagttttataatatattttggattatatttatttattattatcttaagaatttttatttaagttaaaatttaattttaattttattataaatataaaatatgtttttttaaaaaatatttcctgcaaactatatatcgtcagcaaaactaaaataagtttttattgaggagttttgttggtgaagtacgatgagctgaaattttgctggtaaataaaaatttggcgcgaattggcacaaaagttttgtcggcacaatatttctccggcaaaacctcgtcagggacccctcagctgacagctcaataccggtggggaaacttatgccggccaattaatttgtcggtgtaaataatttcgctagcaaggtatggtatttcgcagacgaaacaccttatgctaacgaattattgctggcaccctttgtcggggtaaaagctcgtcgacaaaacaatgccaacgacatatgcaaactttttttcagagagcaaactcaccgacaaaagtcttttttcttatagtgacatgagaataataaaaaataacactgacttgtgaagtatgtagattttaaatacaaaatcacgtaaacgtttcttttgtcttattattattaagttattaaaaatattttagctttattgataatgatttattattgttaataaatttctgtgttaacaatcataattaataaaattaattaaatgtgactaataaaaggtttatgattgctcaatttctgaataacaagttttgaataagtaaatatttaatatttaggatattaaacgattaatcaataagatgaacttgaagaaaataaaagaataaataaacaaaaatatacaagaatcaaattttatatatttttctaataatgatgtggtggtctctgagatctggaactatattatatggagaatctcgttcgcaagacttagcctgatagtcaaacgagaaataacatctatattagttatataatgtgctgcacttaatttcagtacaaatgggagattattgagatttatgccttaaaagcaagtaattaatagataatgtattgtagaatatataaaatgttgttataagataaaataatacattaataatagaaggata

SEQ ID NO: 240000 - DNA, 1680 bp, Cannabis indica
acttcaagagctactacttacagtgctagcggttccttcaagataggtgttcatacatctatagaagtttcagaagtcccactagttgcgaaagagactattggattttcgtatgagtttaccacgactattggatgggcatccactaagacagtcgaaactgcaacggagtctacttacacggttaaagtgccttctaagactagaaccacggttactcttatagcgacgcaaggaatgtgtgatgttcctttctcttatactcagcgcgatgttttacacgacggaagtgttatcatccacaagctaaatgacggcattttcacgggtttgaatacttttaacatggatttcatagcccgagaggaaaagctaccaacaaataaagatgataataatccatcatcgtcagttaaaaattgcataactaaatattgattcaaacaatgttagttggtaacttcatatcatgctcgtttaattaatttgcactatctttctctccagtgcttcttttatatattaacgaacttttctttattttttaaataaaaattctatctctgtttttagtactgtttcttttatgctcataatgttacaattaatactatgttaggatatttaatatatgatgataataacacaagttaggtagtatacatataatattgaagaaaactaattaaggttggtttatccataacaagtaaataaagactagtttaaagttattcacttacatattgaaaatgtaacataaatatacatttaaaccttaagtaaattctcaactagtattgtaaaaaaagaaaactaagttcactttgtccaaataaaactcatgtgtaaaatttaacacaactttgaatatataattattttggagagaaatatttttcaaaggatacaattcttcaagaaatcaaataaaaatctagctaaaaacctcacaacaaatgagaagaatcacaaatctctctgagtttgacttagaaagtctaatcatctaacatggcaaaaatgattccatttcaaaaggataaagagtgaaaaaagcactcacccagctcgatgcaaagcaccacccaattagggatgtacatttttcccatggagatgggccccgcgggaacctgcccgtaaaggggcggagattccccgtctaaattgggaacggagcggggacggagatcagattttgttcccgaatgttaaatgggacggggacagggatgacacttcccgccccgacggggacccgtttaattgattaattattttttattaatatatatgcgtttgtattttttttttagtatattaatatcatttttacaatttttgaagttgcgtttttatataataattactatattgaatagtaaataatatgtaatattttatctttaatataatttaataattttatacatttaaatttttaaaataaactttatttttacaataggggattccccaccccgcccccgccctattagaggattccctaccccgtctccaatggggaataagcggggatggggattaaaatccttaacggggataagaacggggagagcactccccgctaatttcctgcctcgtgtgcgtccttacacccaatatagcactaaagactacagcaaaaaaaaagaaaaaacataccatcataggcaa

SEQ ID NO: 240001 - DNA, 2276 bp, Cannabis indica
gctcttttatccaattcaatcaggcgttactagggaaacaagagtggataatactttgagatgccaaattcattactgagttaactgttgaagcacaaatatttcttttttagaggctcaccttggacattcccctccttaacatgataaagatctattcagactgagaatcttataaaaggtcttagatacaagattggaaatagcttcgaatgtgttgcgatattgatttgtggaacttggaatatgtgcatcgaattcataaatttaaacaaggcttatctaaaagattacttcccaattccctagatcgatcagatggtggtacgaacttttgagtttgatggatacttactccgactataattaaattaagacgcatttggcgaatcaataacacaccaatttctaatcggataaggggtttgcagctacattgtaatgtcatttgggttcaaaaatgtcaaagccacatatcaacgtctgataaacaaaatgtttaaatgttttttgagaaagaatatggaagtctatgtggatgatatgctggtcaaattaaagacttccaaggaacataatgatgatctggaacaagcttttttcatcatccggaagtatggaatgaagttgaaccccaaaaaatgcacctttggagtttcctcaggggaattcttgagattcattgtcacctttcgaggaatagaagccactttggagatgattcaagctcttctagatatgcattctccccaaaaacacaaagatgtttagagtctgactggatgaattgtagcgcttagcagatttatttcgaagtcaactgacaaatgtgtttcgttctttaatgttctagcgaaagcaacaagtttgaatggactcctgagtgtgaagacgccttctagaaactaaaagaacatttagcaaaagctgaaattttgtcaaaactggttgagggagaactgttttacatgtatttagccgtgtccaatcatgctatcaacgccgccttagtgcaaagaaaaggtacaacttctggtgtattacgtaagcaagagattcctgggcgtgaagtccaggtatccaataattgagaaactttcctattgcttactaatcgcttcatagaagttaagaccatactttcaagtccatgccatcacaaaccaccctccccgctgagggttacagaagtcggagtcctttggaagattattgaaatgggtcatggagctcagccgattcgacattctttaccaaccaagagtctccatcaagggccaagctctagcagacgtcattgtggaatatacgggagttaacgacaagctagaagagtaaagtccagacttgaagtctggaaggtttatgttgacagagcatcaaatgaaaaagtttctaaaactagaatcattttagtctctccgcagggacaccaacttcaaagtgctttctagtttgaattttcctctaacaataaagcacaacatgaaataatgattgcaggcttgcagttggccaaggaagttggagcccaaaattgatcttcacagtgattctcagttggtagtaaatcaaatatccagagaatatcaaaccaaaagtgaaaaatagttgtttacgtatccaaatctcaatcaaaatttaaaaaaaaatatattgtcaagcaagtccctcgggacaaaaatgccttggcaaatatgttggcaaaactagcaatggacccagaaattgagcaatacggattagttcccatagctcaccttactgatccaatcacagaactgggggtaaatattattaatcattcaaccttcttgataggccccatacacaagtttttaagttctggggaacttccagacgatagggttgtcgctagaaagattcaaacttaatctaatgaaaaattaatttcatttatttcaaaattaattatgttactaattcaatattaattagattaaactaatataattagcctaatacaattatttaaataaagcaaatgagccttcatcattggggttgttcatgtgaaggagagctgggttcagtatgtcgtacccactactattaccccttaactctcacacaaggcccaaaagaaagaaatttaaccttagttgaacaattactattaattgaataagcccaatactaattgaacctaaataaaactatcaatgtgatattttatttttagtcaacttagtccatttatatatttaaaaataaataggcttcttatatgcatctaagcccaatagcaaacatat

SEQ ID NO: 240002 - DNA, 1693 bp, Cannabis indica
tctaccacttccttagatgagatcaacaattgtctttctccattggttctcccataccaacagcctgttgcaccagcaacagtaccagcaacttccaagatatcatcatctcatatcaagaaatatgttgcacccaccccagaaataatttccaatcggttgtttctgcacctgtctcaaaaaaaccagcagttaactcagtgcctggccagcagcctcttgcaccagtttatgaaccagacaatgcaccaacctgtgcacctgattgtgcatcagatcgtgcaccagcttgtgcacctgatcgtgcatcagatagtgtacccaattatacaccagattgtgcaccagatattgcaccagactgtgcacctgacacaaacaaaaccagctcctcagctgatatttgcacaacaaaaacaggtcgacaagttgtcaaacctgctcacttgaaaaattatgtatgtcatgtggcttctactaatcatcctattgagcctttcttatcctacatcaaacttcatccctcttttagagctgatgtccttgcagcttatacacagaccgagcctcaaaactatgctgaggcttcccaattcaaacattggcttgaagcaatggataatgaaacccaagctttagaaaaaaataaaacttggatcattaccaagttgcctcctggactggttgcaaatgggtgtacaaggttaaatataaccaagaaggtgaagttgtaagattcaaggctcgccttgttgctaaaggctatagccaaaaaccaggtattgatttttcgcaaacctatgcacctattgcaaaattcaataccctcaaagtttttttggcacttgctcccattaataattgggttattcatcaagtagatgtcaataacgcctttcttcatggggatctccatgaggaggtctatatgaaaattcctcctggttataatgctcctcccaatacagtttgcaaactcaataagagcatctatggcctcaaacaagcatcccgacaatggtatgccaaattaagctccacattgatctaggatggctttacccaatctctatccgataattcattgttcatcaagaaaacaaaatctatattcattgccattctcatctatgtcgatgatatgatcatagcaagcaacaaaaatgttgcaatctcacagtttactcaaaaacttgatgccaagttcaaactcaaagacttaggcaagctccgattttttcttggccttgaagttggtagaacttccaaaggtatctccatttcccaaaggccatttactcttcaacttctcaaagatataggatacctaggcgccaaaccggcctctacacccatggaactcaaccttaaatttagcaaagacaaagggcaaattctccctgacccatccgtttatagaagtttgataggcaaactcatctatcttaccattactagaccggacattacttatgttgttaatcatctcagccaattcctctcttgtcctcggcttccccatatgcaggccactaatagaattttacaatacttaaagcaaacacctggacaggggctctttttcccttccgatacagcaccacactctgcaagcatatactgaaaacccagtctatcccgagacaaatgtcctaaagctcgtctttagctgatgtagtttggggcagctgtc

SEQ ID NO: 240003 - DNA, 2062 bp, Cannabis indica
aaagacacactattacaggactgagttgcactttctttggaaagaatagagacacaagtaaatttctaaggttgtttgagaaataaaaactgacatgtagagttggaaactaactttgatggtgtgtcaagatgatacaatccatgtctgtgtctcccttggagcaataacttccttatcaccttgtccttcacaaaacaagaggtagagtaaaattcaataaacacattattatcaccagttaactttgatacacttatcaagttctttgcaatctttggcacatgtaatagctcatttaacaacaaagggttcttagtgtttgttaataaattgcttgaaccaacatgagaaatatgtatttggtttccatcaccaatagttattttctccttaccattgtaagctgatttcaccttcagatttgacattaaggaggtgatgtggtgttatcaaccacctctagagttgcaacataagaagagtaaccaccttgttcctaatttatttgggctattggatctcttcccatgaaagcctcatcatatctattataatagtatgcggctgagtggccatacttgccatacacttggcaatttggcttagaattattagatcgactagggcctccacctcttccaccttctcaattgttagattgaggtgcaccaccacaatttccacgagaatatgagtttaaatgtcctttacctcgatttgcatttggactgttgtttggttttgtaccaaaattgtagcaaggtttgttgttggatttgagccagatcttattaaaccaaggctgcaagatttggtgttgccatttaaaccctacaatctcctcaaatttgttgttaaaactaagcagcagatcttgtaattcatgccaagatatgttaggcttttcttccacttgaacaacaatagacaaatactcaataccaagaccagaactgacatttgacactaaatgagcttctggatagggatttccagcaagagcaagcatatcaacagcccacattttcttttgtttaagatattcagtcatgggtgtcatacctttacgagttgtcagaataagagttctgtactcatccattttggcccctaaatgtgctccaaataggttttccaaggctctcacaagtgcagctaaagtagcacatcccatgacctctgtagcaatagatttcgtcatagagttgtagatccatcccatgagaagctgatcactaactatccaatgttcatagtcaagatttattgtaactctaaaacctggttgtccatctgtagtagtctttgctggtattaattcaggagggaaaggtcttgtgccatcgacaaaatcatccaatctgtggccttggattatggtggataccgttgtcttccatagtgtgaaattattttgatctagcttgattgaaaaggactggttaagggtgttaaaaggttgtgtgtaatttgtggtcagcttggtgagctattagaggtaccaacaccactgaaagtttgtgcagtagggttggtggcaggttggatttgctgggcacgatttgtaggtggtggtgtgtggggattttgagaatttcctatcgacattttggtggaggagtggtacgactctgataccaagttaagttttagccaaaaaagaaaatttatttactcatctcatattgatactgagtgaggagccttaattatatagggatagcatgatataggaagagccaaagaggctgtgccaagtgacaatataaaaatcaagacataacaactgtctaataataaaaagaataactctagatgattacaaaatgattgccagataatcatggcaatgattgtgtgaggcagagagaagcaccctatactcatcatttctaacaagagagagggaaaagtaataatgtaccaaataatcttaagcaaaaaataggataccaataataataaatgaaggtggaaaaaaaaaacgtaactaaggtcacacttattattggtagaaatagggatgggagtaggtaatttttttctaagtagtagctgg

SEQ ID NO: 240004 - DNA, 1497 bp, Cannabis indica
ttttaatatagtattatataaaaataatgatatataatcaaatttcaatataatataatacaatacaatacgacctaatacgacattccaaaacgaggcttataaattttggcgagtcttactacactactaatctatgtatgtcaaaatggataataattgataataagaacaaatgcaaaaggacattaaacataggtagctcgaatggcaaacgagataaatattataatattgatttatgagtaaagaacaatagtgcaaccatattgactatatatacccaagtcaatattcttattcttagcctctaatatatgtaaacttccttataaaaaatattttatcgactacaaaaaattgtgactaattattaattattatctctatatgtgattaaaatatctgtgactaaatatattatcttgttataactaaaagtaaattagtgataaattgtgtctaaatattatgttttagtcacgagtagttttttgttgtgaccaaaaatcatatttagtcacaaaaaatttatgttgtgactaaaaaattatcactaaaagtacctgtttttcgtagtgattaaggaccaggattaaagtgttttaggcatcaacttactcaattatatcgattaataaacccaacatataaatgtatgtatatataatcatagttgaaagaaaaacaataaaattatatattagttgcttgaaatttctgtgctcatctcttccatttgtataccaactatttagtcaaaccaaataggagactcgatcacaccctgattagttgggaaatgatgtacgtgtagccaaacatcatttcaatcatatatttattatttatatgtagccaatcaaatattaatagtacattataaatatagtatttacatatatacatacatatacattcatatgcaaattgtaatatttcatttaaaaataaatattctatacgtaaaggtatatacctcaacaaatgtatcatggcagaattaggctaaatgtaccatggcgggatcagaccgaaatttaatgagaggctaacacaagtaaaaatatgaaaaaatatttatttttattcttttaattattttttaaatatatttttcaaaaaataaaacagaggcgggagacgatggcaccctcagaccctctggctcctggctccgtcattagtgccaagaaaataacaaataacacaaacttgacaaaaaatcatcgtgagtatttttgttgtcaacaaagaatatttcactaatcaataccagcacttttgcaatcaacaatggattatacccaccaccctatatacaccatacttataaacaccttaatctcttaagatcttttttgcctaattgatttagtttccacccatttacaaaagggaaatttacaaaaatactgtaatttgggttaacttttacaaaaatactgtcacacggaaaagttttcaaaaatactgtctttttataaaacaccagta

SEQ ID NO: 240005 - DNA, 926 bp, Cannabis indica
ggtacatgtcaaagttcggagggtaaaattcctaattagtcaaaaagttttgaaagaaaaaaaaaattcaaccattgataccaaatatattaaattttatcaaaaggaaaacaaatctagacaaactgaactcttagcttaattacacattaacaattattactcagattcaaatggtttcccaccatattcaatccaacggtacgacaaaagtctcccatttgtgtgttttaatgtacaatgcctcgacaataatgctagaatggtgaaactagacaacataaattttttttcttacttttaaattttaatattaataatttttttttcaaatctatatgtataaaataaagaatacatctttcgtgtaatttgtagaattttggttagaatgaattagtgctaaattacttgtgcattaattcattctatctattttatttgattcaaaagttagtttaaaaaaatgaggattgatcgattgtatataacaagaaactatggtattcttttttttaatagaagatcaaatccaaacggctcttactattttattgtataaggcctcaccctcactaaacagatttgttgtccaaaactcgaactacatgaaaaaaataattataaatacaataatttttttcaaggcactaccaaaactacgaaataaatgtaccaacatccataatagttcatgtctaccggccctcaagtcgctctcgttctcgttattgccctttttttttgctttctccttgtgccaaactttttcatctttttcaccttgatgatgacctatgttgttcctcgaaactccctaatacaagtaaatttcttcaaatatgttattatatttgattcttgacaagcttagactgctactggttcacttactcggctagaaacatgagctttaacctgcccaa

SEQ ID NO: 240006 - DNA, 1525 bp, Cannabis indica
ataataataataataattaggaactctttatatatagtcatagactcccgacaaaaaaaaaataaataaaaaaagtagccaatagactttggcattactacccaaaaatgtggcattaataatgagaaattgttgaggacaatgtgtctcacactagtcacaagtaaatattatatattattagtataattacatattaaattatattcacgttaaaaaaatatatatcaaatcatattctatatatatatataaatattaagttttatatattttaatttaataattatattaaaaaagcgataaccattcgcaaaacaatatatacaaaggcacacctatataaaggtgagggaactaatattttaattagttacaactagcgatagaaatttgactcggggatgggtacccatgagtacttaccccgaatgagacaaggattacccgccttaatgggtaatggagcagagtgggatgcaattttatatacccgaagcgggtttggaacgggatcggaagtgatactacccaccccatattcgacccaaatacatagtttccaaaatttttatatagttttcaaattattacgtatttaacttattggttatacttacaaagttgacaattaatcttccttaatttactgtgtaataaagactttttaataggtagaatgtttatttattttaaagtcaataagttatgttttttttaattttattttgaattacattatattattttctaatcattattgttgttttaattttaatttaattttaatgggtacccaatgggtccccatacctagtagggattcccttaccccgaatctatcaggaattaagtggaacagaggtagaaatagggggcataaatataaaatggggatggggatagggttgggaggtgcatcacttgcttattacctactcaatttccatccctagttaaaatatatatttgtaataaaaagtgataacattatacataatacaagttttggattggatcccacacctgcttgttcccgtggccctgtttatcaatttcgttttgagaatgtatggtcccgtgagccaatgtgtgcagaaatagtccgtgactgctggatcaccaatggcactcttagtttatctgaaaaaatcaaactttgtagtgttaacttgtccaattggggtaaaactcttactggaaatttcacagcaagattgaatgctagcaaaaaaaagatggcaaccttgaaaatggctgatgatgcaaactcagtatcttgctttgagaccgaaaaggttaattactttgaaattttggctcaaaaggaagtttattggaagcaacgttccaaacaacactggctgaattcaggagatacaaacagtaagtactttcatagtattgctagttctcggaaaaggaacaatcagaatcggcaattaaaagatagtaatggttattggcaaacctgggattcgggattggaaagggtagtagctgactatttcactactctgtacga

SEQ ID NO: 240007 - DNA, 1988 bp, Cannabis indica
aaaaatcctaattaacctttttttttaattattttcttaatcattcaaatttttgttatcattaaataaatagatacgaatattgattcacgtgtccacatatatttaaggttatttagggtttttgtcacttggactataacttatgtattattatgccccctgaatttttcatcctgttaaaaatagtccctaaactatttacagtattgtaaattagtctttctgtcaagtttgtcacacgtgtcaaacaaacaaaatgatgatatgacttcttagccaattgtcatatcagtgccatgttaaagctacatatgtaattaatttgaaaaaaataatttaaaaattttttaatttaattttacgtaattttcttaatgattaattaatttttagtttaatgatttttttttaaaatacctatttttttttattctttaacaaattatacacatgttgttgacgtgtggcagtagtcatgtcattattttatttatcacttgtaacaaaacttgattgaagacccgtttacaatattataaattgtttaggaactatttgtaatgggttgaaaagtttaaagatacaataatacatatatgtcatacttaaaaatcttaattggcttatatttaaatttgtagattatttatttattgtttaagcattaaaattctctatttttcagtaattttttagttgagtcatgaccatgtttgtattaaatattgacaaatataaaacatgtagaaagatttagctatacatataaagtatttttttcatttcttaaacattaagtttgtcttattaaatatacatatccacaaatgggtagcatgtccttcaaacttctatatacattttagcttctaataaaatgggatgctttcgaattatttatatataaatatagatgcacatgccatttttctctcttattatgctttacttcatatagtagtggtgagttgaagaacactattcttctcctataagtttctttatatatgtatatatcatttcttagctcatatatattaatttagcatattctgttacacctgaattattacattcaatgaatgagaaaattagtaatagaagaaaaatggaattatatgtacacacaaaaaataacaataaatgaggaaagagaactgaggaaaaaaagatgtaacaccaagagcaacacgtgaataacgacaaacaaaagtagtaattataagtaacgagacactattattaaaccgcatcaaaaaaatgcaaatggtaaattggtaattggtaattggtaagatatttattcttcttatgaagcacatgttctttcactaagaagttcgaatattatagtactgtccaaactttatgcaacatgatgggtcctccaaactccaaagtgatcaccgtctcaaaagataggtaatagaaatagaattaatttgtgtttataaaatataaatcttaattatttatcgtccacttggtaccacttttatatcataacgcacacaaaaatatatgtatatatattttaatttgtttgttcaaacacgtcagaaacatctacaaatatatcctcgtcaaacagtcaaaaacagagggtcccattcatttggtttggctttcaaaataaaaatatatatattattattcgttaattgggcgtgttcccacttttgttaacactttcttttttcttgatccaaccttaaatcaaaatgaacaatgaaaggaggagtcttcatcatcagcctaataattaaagaaaaagtacatgatttgttacgtatatattagaagaaaaaatacatatctttgtatccttatcatattattaggaggaattatctaaaataacttattttaatttatttgaatatatttcaatattcttatttatacatagttttcttttttttttttctttcttttttccctattttttattattctttttcttctttttctttctcttctttatt

SEQ ID NO: 240008 - DNA, 1741 bp, Cannabis indica
taaattattttaaatttattaaaatatattttcttttcatataactagcaacaaaataaaataaattcatgttgttttatgtctccaataataaattaaaataaataaaataaaaaaaataccaaattcaaaggatgatgaaaaaaaatgtatgaataaggtgatgcttaattttagtttataagattatatatatatatatattataaataagaatagaatatacatttaatttattaaattttgaaatatattgatatcatgatatgtgttgacccccaaacattactaagtgtaatatttggagtcataagtgttatgcccgaaagtttgcccagaggagctccgcgcgcccccgcccgtggcccctgcccgcgctccctcgcccgctcgcccttgcccgtgaccctcgcccgtggccctccgcctgcagccctcgcccgcagccctccgctcgcagccctcgcctgcagccctccgcccacggcccccgcccacgtgccctcgcctgcaaccctcgtctgtgggccctcgccttagtgttcgctccctcatatgcgtcaacaccctgccaattttcctttccttcctgacaccagcagacctagtaaaaagatatcaggcgagataacaatggcacgataagtataaataatgaggataaatttcatttcgcctgaggtacaaaatagaatgggcatttttagtgtaacttaggatttcagatgtgtcagatcacttaggatactatgttgtaatagatgaaagtgacttaacatagggagtatggggatatgctctgggtgcaaagggagaagggcttactataaatatcgggttgcaaatatttaattgtaacccgctcaattaaaaattagaaaaagttcaactcgcctaataatttcgtcggtttggtcgggttaacccgttcaaactaatctttactttttttttttttataattattgttgttagtttcaagtatttaaataattagatttttaaaaaataaaatatattatttatattttaaattaaaaaatgttgtagtctaaattaattttaagaacctaatataagataaatataattgagtaaacataaaataattaaataaaataataaaaaagtaataataacttcaatatttaaatacaatataaattattaactatactgcataaattttacagttaaacattaaaatgtccaaactttaaatataaaatagtttaactaataaatataatttatgtaaatatattatatacactattattaaaaaaatatatgaatcggtttcattcggtttattcgtattaattggacagtttagaataattaattcagttggacggtttgtaaatttggttgaacatcactaaatttctctatgtttaatggaacgtgccaaataccaaacgatgtctaaaatgatgaagtggctatggcgtagttgtaaaataaggtgtaaaacagggacttattcgtcattcggacaaaccctagtgtaacagtgactcagaggagggagctcccatttataaacctcatcgtcattcttactccttccgcttcattttagttactatcgatcagaggccttttcaggtttttgtttttcctcaatctctcaaattttttttattcttttctcatttaattccgctttctgtttgattgtcgagaaaatggactgcatagaattcatgatggagcatttccatttccatttccattt

SEQ ID NO: 240009 - DNA, 1049 bp, Cannabis indica
acacacaaaaatatatatcttactattcaaactttcaaccgaaatggacccatcaaatccatgtggagtagttcaagaactctggaagtgtttatatccagacacttttgtgagaagtttttagtttcttaccaagctgacatggtccgcacttccaccatagattctttatccaatttgggtaattctcgaacaattctttcattggataattttctcagatttttgtgatgaatgtgtctaagatttttatgccataaataagaggtgttatttatagtagagtgacaagttgcataggtagtgattgtgtaacaattatcattagatctaaacccttgcaaaataatttcattgcaaaataatttcattatggttattgagaacataacaatgactactatcaaaattaacagcgtaaccctcaccaaaaatttgattaatgataaggagattagctcttagtccttcaaccaacataatgctcttaagcctcagtagaccttcaaaattaaggtggcgtttggttgaaggtaatattatggaatagaatggaaatgaaataatttttattttattcctttatttggtcacattttaaagtattagaatatcattctaatagaatggccttttcatcattttggtggaatgattattccattttaaaatgaaaggaaagaccattctaatgtaacatgagaaaaaatttaatgatttgtttatcaattttcttatgcattttaaattttatttccattattattcctattcccattcccattcaaattcctatatttttattcctcctaaccaaacgccacctaagagttctcatctctgtgactttttcagctagaccattaccaaaagtaacttcaccacattaaattggtctaatattgttaagataatatttttcacctgtcatatgtctggaacaactattgtcaaaataacatatttaagaagcaatatatttaaaacaagaaggactaaccaacatttatttttgacaactcatttttgtttttgagaaacatatttat

SEQ ID NO: 240010 - DNA, 1623 bp, Cannabis indica
tagaaatacaaggaattggcacattaaatttttttatactaacccaaatatattttaatttcaaaaaatacttcttgctcacaaatcttagttgcaccagggatacgaacctatacaatgataatcccagttctgcaacaacgcaacaacttcagctacaagaattctattaatttacggcaaaaaaaacctaaaaaaattaaaaacccaaaccaaaaatcaaccaaaggcgttctatcaaaaaaattgtaaaaaaactggctcgaaacattaaactcaaccatgaagattaattcaaattttgaaagactaattatcttaaataaaatttaaagattgccaagatgtaaatcggtaagaagttgatctagagttttccgaccaatccaaataagatatcatataattgttacattctaattgttgcattaacgttattttttgaaaattcaatcttggaattaatcaattccaattgcgaccttaaactaaatttgcattcatctcgtatcataaatttgaccacataattttgatattttgattgcaatttaattgtcgtacaattgtcttttatttttatggatgctcagataactggtgtagcaatacttatacattaattagcctacactgttttagtattatttgagggtatttcatataaacaacccaacacagagctctcataaaagcaattcaaatatagttagtttgttcatatctaaacaaaggctgagttgatgttgatttgcaatgttctcttcactaaataacctcaaactacaagtctttgttagttggttaaaattgtccttaacaatacctcaacacatatttcatacataattgccaatatgttgtttatgcattgtcaaatagttatcttactaatatcttataatgaaaaaaatcaagaattataattggaaatgtaggagtcatatgcaagaaactacattgtagtaagtttgtttataataacaaggggaggttattcatttttttaaattgtataatagttgtcttacaacaaatatattatataaaatattagctatcgtgcttgtattatcaatgccatgttgcatttcagtttctttataaatttctaattataatcaaaatttcaaaatttcaagaaaatgaaccaatttcatttctaatatagttcaacgcacaatttgatcaaataatgaaaacaatttggttaatggacattttagtaaacactacaataatattccaaagtaatgcaatgaaaatctcaagataataaattacaataacaatttttagatataatattatttaatacgattaaaatatcatatttgatatattaattttttcaattgcttccatgttgtgttaacaatttttatagttgttaacaaatattgaagtatttaaagcaatgatttcttacaaaaataacctcaaactacaattcgttgtttatcagttcataatagttgtttaaatattttcttaacaatatctaattacataattcatacatgaaggttctcaatgatattgtaagtgtaagtacatgggaccttcaatttgaagtgatcggttcaaagtacttgtattcccatttctgaaaaaaaaaaaaaa

SEQ ID NO: 240011 - DNA, 1796 bp, Cannabis indica
ttatcaattctggggagatgttttgtccatctaacaagaaagtacttgtgcatatgaaaacggtctctttctctctgtcattctctggttgtcattattgtgttggttagattcttaatgattcttttgtttgtttcattgccttgtgttattagaaaagctcacgttccttaaaaggtttggttggttttgaagttgttggtttgaggaaatttttagtgaagcctgccttgccgtgaacagaaacttgtgcctatattgcttctttggtgctgttattgtgtagttttgtttttcctttgtagctttatatgtgacgatttcttttcttagacaaatattgcttaaataggataacatcttatactaaattgatttattagttttaactttaaggatatggattttgattgatttcaatttcttttcaggctgctaataagaataacttagaggagtttgatcatccttccttaaagtttcaagtggatacttcctcaaaccatgaggttgggctttcggtaaaggtattcttctctcattttgaaaacaattataattaatgaagtaatgtattcgaaagttgaaaatatcataaaaagtttcacaattataggagattaatagaaatcagttaattatttaaaaatggaccatctgttggttagatgattcaagatatttagctatatcatatgcaaagcatctccaatggagagctataaatgtggtgtattgccattttttaagaacattttactaaaacttaactccgatggtgatggaaaatgtgtgacaaatttgtgacaaatatataatggggaagatcctgtctaagacaagaaaaaaaaaaaaaaatttaatgtcaaatttggctgggccaaattttagcccacaataaataccactttttttaattacctctttgccacttattaatactattcattaatgaaagtaagtttttatttttataagatcttaaaataatataaataaaattaattgtttagtatatttttaatgagtattaatggtaatattgacttttatagctaatttgcacattgtgcattggagcacaaatacaaaaattgagtcaaatatagttttatagtatattttaggccaaatttaactcaaaatatgcaccatccattggagatggtctcatatacttatgattgttttattcttactactttttaactcagggcttgcttcaaccagttgaagttacttgtgatgcagaatcccttataaactttatggaattttttgacgtattcaattccttcgaatctcattatgaaagggtaagctttattagaaatttcctctataaggatgttttgttttctttgggagatgattcagtttttggcttttggatgaactttttctatttattaattatactctttgcattgttgtcaaagagtatatgttttgattttctccaaaaaatttcttgtgacaaactataattacttgtcaatatctccttcccaccataataagcttttgcatgaccttcctgaccatgagcttttcctatatacgtaaacattatctaccacaggtgctgtcatcactgaatgggataaaagatgctgacagtcgtctgcaatcgaaagctgagtaagtgttcttgtaaattgttatatgaagactcaagattctctaaagcttattatcattaagataatttgagtgacaatactatcatccttcaattaaatttaacttgtattgtctatattggcacgttgctattcatctctcgcagctacatt

SEQ ID NO: 240012 - DNA, 1121 bp, Cannabis indica
ttttttgcttatgacagagtgtttgagcatagcactctctggctttgttggtctcgcctgcaatatggggtccgtcaatgtcaacccctaagtgtcctaccatctgaggtttgggcagagttggtggtatctgtctgtacgcctggccaaagatggaggccaacctttggagatggaggccaaccttcagaggcaggggaaagacctcaaagagggaggccaaccttcggtgccaggggcagacttcagagatggtggccaactttctgacttcctgttgttgacctgccctgctaatatgtcttgacatgctgtgctttgggagctttgatagaagagtgaaacatacacacttcccctccttctttcttggacttcatgacttaaaggaatcattaaatttccatcttttgccatacgttggtaagagccatcatttttgtgcttttctccactattctcgttgtttgagaattgataaagattgtctgcgctggtcagcattttcgacaatgcttcaggcgctatgaggccttgtgtttgttcattgttgtcacaccctcttgtttgggcttgccgcacagcttcttctaactttatgaagccatcagctcgctcaaggaactccattttattcgttgagatcctcctaatatctttccaaaagtcactcaatggtaggatgcctctaagtatggccgtatatcgtccttcttctgtcaagccagtgaccctggtggcctcagccatgaatcgttgactgtagtccttcaagggttcatcttgtctttgctttattttgacaagattctccaatcgggcaagtatttgtcttgaagtagagaattgaatatagaattctcaaaagagctcttcccaagacttaaatcttcctagggccagcctaaaataccattattaggctattttatctagagttgcttgaaagaatcggcatcgcacatctccagatacttgtaggagatcgatttggatctcaaagtacttaaggtgtactagagggtcttcttttcttgtgtacatcttcaaagacgacatcttgaattttggcaagggtaaggcattgatgtatgatgtgaatggtgatcccctcacccttg

SEQ ID NO: 240013 - DNA, 1095 bp, Cannabis indica
attggattggattggatcgtgcagattggactggatcggatactttgtgaacacccctacatatgttattgaagatgttatagtatcaggagtatataaattagcatagccaaattaataaattagcacagcaagcatctaagaccatattacaaattattgtacatctatagatgctgatttattatgagaaaatgtaaatttttatgaataaaattttagtcattttatttatgtcaagtaatcataacgcacattttaaaattacttgggagacataagtatattcaccaaatttaagataaagtgaaattataaaaaaaaaatgcaaaaatatgatattcgattaaagttggtccaaaataatagaaatcaaatgttgaaatctagttataggcaagaataaaaataacacttgttgtaaaaacgagattatcaaaaatcttgaaaacaacatcgagctaaatgcgagcttataaattaataacggcttgcatatataacagatattatgaacaagatcctgtactaaatcttgataaataatacataagctaaggtgcgaatacatgaataactactcccacatacttgatcaaaaaaattttaacaacaattaaaaaattagttatttaaaaaaaaatatttaagttcactctttacttgatgaaattagttatttttattgctctatgtggacgatatcctcatcatgagcaaagaaaaaatcgtgatcaaaagtattaaaacaaagcttaagagagaatttgagatgaaggagcttggatcagttcaaaagatacttagtattgaagttttgaggaacagaaaggaagggacaatcaactaaaagcagtctaagtacattaagaaagttatttagaagttcaacatgaatgatgcaaaaagtagattcatatcgttgggcggatagtttgttttgtcaaaagaacagtttccaaatagtacgaaagtgaaagaggaaaagaaagatgtaccctatgcagtgttttaggatgtttaatgtatgtgatggtgagcgaccaagaccagaccataaactcatgctcgaaagcatcctaagttggttcatgt

SEQ ID NO: 240014 - DNA, 1421 bp, Cannabis indica
agccacttctttagggccttcgcttcagcatctcccctggataattccctcacagtgtaattatgcttggcaatgcagagctggaccctttctttcttaggatgtgcaggagtcaaaataatgcctggaggcacaaaatactcgtcgacctcagaaaaaatccccgagtcaacactagggctaggggtgttaaccttcttcagcttcttcaacggctctggctaagtaacgacgcatttatgctttcggtcgagaagaggaaccacctcttattcctcttcatcaattaagagcacctcctggttcttgagggcttcgacaacaagtccccccggagtcacacttaccctaaggtgctcagacatgtctgactcagggttgtaagtttgggcgagggcgtctaaaaggtcctccatgagtttcgcttttcaaaataagcaagaaatcataatgacaaaaaattacaagtgaaagtatagtgcagcaagactagtcctaccctagtgatctaatgctgcccttgtacagtcataaattaaaaagttggtgttttcatcccctaaaaagctatttgaggaaaggaaccaattcgaggttatgtagcaggaatgatccaaaagaattggtacagaaggaccaaagtccatccgggaccaacccaaataatgacttaaattggagaaataaaaacatttagcattatcgccccaccaggaatggggcattcgaaaactatataatattttatcaaattccactagccttaagtcagcatagtcttggacagaaggaacgaagtgaatatttaaaggagacttacaggctctgaaggtacttgcaccggcaccgggggctccagagttagggactgggaacgaaaatttgggctggattggagttttctccttcccatcttcctctcgggagaccctcctagaggcagcttgcagctgagtgtacgtgagctcttgctccctcttgtatctatacttgttgtatttctcctctgcggacaaaatgatgtctaccctgagcgccttctcactcctaggattctagacattggggcagaggactttgaacaagttgaagtcatcaatagattgactctctagggtcaacttgggcctcttgcagttgaccatcgtaactaggtcacccatgttcaaattttctttcctgtaaccagcgaacacttgggcatggtttaggaagagttgggtgggagtggtacggtgcatgggggaatcctgacctagtccgtcaacagatctgggcgcttaaaacccttgaactcgaaggagaagaaaaagctgtggcgatactcctttacattcttttggaagttaaaggctactgaggtctcattggccgaatgggcctgaagtttataaaaattgtctttaaatttgtcccccttc

SEQ ID NO: 240015 - DNA, 1150 bp, Cannabis indica
tggcgtagatactgatggagtatctcacctataaatatagggtattggtccccgagctcctcactcatttctgttcataaaagcaaaattctatctaaagagagttgagagagcgaggaagcccgattacccatggtagtctatttcctttgcagatcaaagcttgttgggattgaagctcaaagaatcaatggctggaggtatttcgatctttcattgcatatacatttcgatatgtttatagttttttccgcataacatatcgttcatatatgctgtatttacatatactatattatagtctaacaaatcatattaccatctatgtgttccagcgcaagaaactcgctgaattgttctcttcgccgcaaccagcttccaatatcaccaccttgaaattcgtatgatatattatgttttttcttttttcttctttctatctctatcaattcttttaggtttatctatctatctatatatttgtataaggctcttgctaagcacaatgatattgcattctatatgaattttcttccacttttcttgctctctcattttttttttcaatttactaatattataacattgaaaacaaaaccctaactatttaaattgaaagagaaaagagtgtgtcttttcattttataactctcatatatgttataatattaattataaagtttataatgtatatttaattataattttgtaacttctaacattgataaaaattaagttacaatcccttaaatttttgcatatatatatatatatatatagcatgacattttattccacttttgtatatatgtatctaaataaaagatgcactatttttctactaaaatggagtttgatgggtcctcttctttttatgataagtgtatataatcatattcaatccagaacaagtattgtttttctctctatcttaatattgttgaattattttttttctttaataaatcacatttttataataatattataattattgtattaagaaatttattacattatcagtccattatgtattacatttttcaaaacggatgatgataaaactaaagatgaaactattgaactcttgcgtggagatggtgatgttgatatcacaaaatgaaattaatcttagttcttaccattctaa

SEQ ID NO: 240016 - DNA, 1830 bp, Cannabis indica
gaagcttatcatcccaaccaacccaagacccctccgaattttttaacctttgagtcgaattatttcttcttctagaggcagccttagcatgaaaatacttggaattttgattcccttcacgaagccacaactgcttacttctctgcttccaaatatttcccattgaagtaaaacattactaagatttacctccgcttctctatatctttcaattgacaccgggtctcgaccctcttccaccaacgcactttcgctttgcaatcttgattttttttaaaaaaaaaattaccataatagtctttttcccattcaaataacacatcggcacaatttctaatcttctcaataatggagctaccagtagaaaaattccatgtgtcatcaacaaccttgaaacaaagggtttctcgaagtcaagaattctcaaaacgaaagacttgtcgtttaactatagtaaccgaatttactgggatcaacagaagggggcaatgatcagaagtagacacctcaagattaaaaagcttacaagtaagaaaaatatcgagccattgttaagaaacaagagctctatcaatcctaacttcaacccagtcaattgaacctcgactacgctcccaagtaaaaagatacccattcaactctaaatcatggagaccacactcttccaacacatcacaaaaaccattaatcaaccagtttgggtactaattaccccaactcttatcttgttgagaagtaacattgttaagatcacctatagtacaccacaacagatcatactcctctcgcaaattacgaattaaatcccaagttcttctccgcaagctcctattcggttctccataaagtctagtaagtctccacttcccacagtcacttgcttcaatggagacatcaatgtaattcaacccatagccgagcaaatgaacctcttcactacatcgccaaagcaatgctacaaccccattcttacgtccttgtaactgcgaaagcaccctcaaaaccaatagacatttgaagcttttcaacaacatctttccttgacagagtttcacacagaaaaataaagttgggtttcttttgaaccacaaggtctttgatgaattgaaaggcccatagttttccaagcccatggcaattccaaaaaatgatactcataatagttggtgggcctttgaaccaaaacccacctaattgcttaagttttttgacccatcaccaatagcccccacgtgagccatatcccctccactaacatctgccacctcatccatattattaattccttccatttccacaagcctttttttcatctccaaaataatggtcattcccttatgagcattgctattaggcaccagtggtgcctagcacctcctcgacatgtcgcgttgcgattgactagcgatattctctaaaagctattatttaaactatatgagacctgatacttagttggaccaatagtgatattgacacataaaaaggtattaagcaccgctggtgacctttagcatttctcattcctaatagcagtgaccttgaaaccaacattaattggtatgcttatgctagttcgcttttggtatattaattgctcaggtggatactaaaaagttaaactaaagtatttttgtaaacttttttttgatggaaaatggctttttttaataaatgaaattaataatatatatatatatagtatataattaaataatatagatttaatattactatataatgaaattattttaaattaatattagtatatttatatttctcttataaatatatttatatcatacaattaaataatcgcgcgatgagaaa

SEQ ID NO: 240017 - DNA, 2180 bp, Cannabis indica
gcaacatcgcttcatagccataagctgaagcgaatggatttttccctgtggcatcttcttgatggacttgtgcgaccagagtacctctaggaggaattttggccaatttccttttgccccttcaacacactttttcaaagtgtccttaagggtcttgctccagcttcgacctgcccattcatttaaggatgagcaacggtagagatgtttttgatgatgtcgtgtctattgcagaaatcagtgaacatgtcactgtcaaactgcttcccattgtttgacacaatattctgtggtagtccaaaccgacatatgatgttcttgacaataaagtcgatgacttttttttggatgttattgttgccaggggttcagcttttacacacttagtaaagtagcctgcaaagactacgggatactgcacccctccttttccctttagtatttgaccaatcaggtctattctccatatggcaaagggccaaggagactacatcatcatgagcttgttgggtggagctctcatgattttgagaatatttggcacttgtcacatcttttaacacagtccattgaatcctcgatcatggttggccaaaactacccctgttagagtatcttttgagataggctttgcctcccaacatcaatgccacagaaaccttaatgcaattctattaacaagtgctcgacttctgtctcagtgacacagttttggagcaacatttaaaagcctcatttgtgcattactccatctaggattagatacctagcagcttttcttctcatcttttttgcctcgttttattttcgggcaaggctccattttagaggtaagctgcaataggtgtcaactaggttggactgtcgtccaacatgtcaacttcttcagggatggcaatgctatgttctttcaaaaactatattggcactaggtttgccttatcgacaatggtgttgcttgtcagacgtgcaagtacatcagctattgcattctcttttttgggaatctaccttattgtaaagcctttgagctgacttagctagtcttagatcttgctcaaataagctatcaatctttcacttcgagctgtgtattcacccaagactctatttacgactagctgagagtcgctatatatgtccaggtggtcagcccatacttcgtccagccttgtaataccctagaattatgaaatagattagcaaaaccctaattggataattatgtattattaaggaattatattattatataatttaatatatgtgaatttatgtgatttatgatgtgttaagatcccgttggagagctaggggtattttagtaattttaaccagagaagggtagaacagtgaaattaatttattaacgtgcttatgggactatattattatatagtatgcatgtattatctttttaaagtgtgttctgacaggttgacgcggtgtagtcacaaccgagtatttcgggccgaaccgggttcgggcccaaaatgcaattgggattgaattattggcattttaattattagtgagaaatatgaaaattaattggacttatttatgtgtgaagtgacttaaatgcccttaattgtgtatgtatatgttatatggcacaatgggcattttggtaatttggtttgggatttatcttgttataaaatggaattattgaggaaaagagatctgattttctgcattttaccttcagcccaaacggacctccccctctcttctctctaaactatttttgctcttgattttcttggttgaggttggcttgatttcaagctttgtgttggaagctttttgagctagtagttggaaagaactgaggtagttctttcactaattttaattgaaattattgctgaattttattgttgcaagagcatgaaatgagttgataatgatcttaggttgcatgttagtaatatcttgttgagatcagcatgtttttacttgaatcttttgattttgtgtttgagtgaactattggatgaattttagggtatttcttatacttgaattcaggttttattttggtgttgttggtggaaaatataaggttggaaagatttgaagttcttgttattaagcttgagatttgttggtgttagctcttgagagaagcttgtttatgcttgttgtcttgactgaaattatgagattaatattgg

SEQ ID NO: 240018 - DNA, 1605 bp, Cannabis indica
gaaatagtgccttttaaaaaccggagaagcctcttgcatgcttcccagtgaatgtgtgtaggtgtatgaatgaattgagacaatttgttgatgatgtaggccgggtcctcaatcatagtgcattattcaatgtgtggagtgcacccaatgtgctgcgataaagagtgacatcctcaaaaggaaacacctttagcaagagataacttttgtgcagtagaagtgggattagcacaggttttagctccttccatatttacccgagtgagaagatcggttatatacttggtttgagacaaataaagaccttcactagtttgatgaagctcaacaaccaaggaaataatgcacctgaccaagatctataagagaaaaagcagagttaagatcagtaatgagtctctgaatgagagtagcattaggacctgtgacaagtatatcgtccacatatactaagagaataatcagattagaacccgtgccatagacaaacaatgatgtatctccttttaaggcaacaaatccccaatcaaaacaaagtagacttgagtttgtcattccaagcacgtggggcctgcttcaagccatacaatgctttatgaagcttgcacacatgtgttggtttagtgggatcttcaaagcctttgggttgagccatgtaaaccgtctcataaggtacaagtttccaagtaccttgggatataagagctcgaaattccttgttcatagaggcaaaccatcctggttgttttagtgcagccttgagagactttggctctgtgggaagcagagattcaaggaagggatgcttggtagccatataagctttaggtttgaaaatgcctttttgagatctagtaaccataggatgggttctttgtggaatatttgatgcaacagtagagccaatggctgctgtagaagtgactgggaacacatcagggacagcagtagcttgttcagaggatacttgagaactagatgccgcagaaacaggataaggcagagaggagctattagaaataggctgactcgatgtagaatcccaaaaggatcagcattgagttcatgcatctgatgctcatcacagataggctcagcaataaggtcaggttgagaatgaccaggatcaggagcattagcagcatgagaggcaataggaacatgattagtaacatcagagatttgattagtgccaacagaaggaaaatcagttgaaaattgagcagtaggcaagttataagaagtagttgatacctgtgtggcagaaaaggctcaaagagcaggatagacaagcttattgaaaacaacatttcgagctataaaaattctcccagttttactttcacataggtaacctttatgcttaggagagtaccccaaaaagatgaattcttctgatctaaaatcaagcttgtgatgattatagggtctaaaatggggatagcaagcacaaccgaatgacttgagaatgccataatcaggagcttattgaaataagcattcataaggactaagaaaatttagaactaatgtaggcatcctgttaatagtatgagcagcacattggaaagcatgccaccaataggttgttggaaattattttac

SEQ ID NO: 240019 - DNA, 1301 bp, Cannabis indica
tattttttattatttgtattgggctactttaaaaatgggcttgattagaatgaggatagactcataaatcatgattaaaatattgagtgagggcttttatgaattggactttaataaattaagtaaagtgaattaatatatgtatatatctacatgtgaaaaatttgatgtatatatttgagtgagggcttaagcctacatgtaagctaaagtccctcgggtcatttgatattttaatgagaatatataaaaactattgttttttattttttattgtttaaataatagtaatatagtaaataaaaaatgtaaagtttagtaaaagttaataaatcataataattagtggccttatagtaaataaaaaaatatcatttattgtggactaaatttagcacaatatcttgtgtcaaatttgacacaacttttagcatgtgccaaatttaacacattttttagaacaccattggagcaataatttttgttaagtgtgttaaatataactatacactatttttttagcactccattggagatgctcttagaaactaagtatcggttcttaattagtctatatcattaagtttttattttaattgtaattttgtcatacatatatataatctaaaactagataatattttgtgcaaagtacgtttttttggttttatattaggttacaataattaaataatgttacaaatatataagttaaaatgaaaggttttagcacaatttacatgtcgaaagtatattacggctattatatatgataaaatactaacatcactttatacttattattattttggcacaaatcaatccactttttaatggtaaaaaatctcttaacttttgattaaatttgttttaataatatcatgtcaaagaaaaatttattttaattaaattttaaataaataatattatttgaattaattaaaattaaataataaatttattaaagagcaagtaagaactcaaaactatatctatttggttatgtataatagaatcgaattaaaataatggttttatataattcatatcgtaaaaataaattcaaaaaaatatttaaataaaataatattaatatttacatatttataaaacaaacaatattaatagcatccgttaaatttaacggaatattcttttatttttaaagtatattctgctaaaccaacgaaaatggttagatagatactttttatatataaagtgttaaaaaaatttaacactcataaaatatgcaataacaggattcaattccatagctaaatatattacatataattata

SEQ ID NO: 240020 - DNA, 2712 bp, Cannabis indica
ataggagtctggtctcgagtttctaggtgagaaaaatctcactataacaatttccaaaaatcggaaatctgtgttggctgtaagattaaacctgagatgcccagcatgttagcggcaaatttggatatgcagattgtggaatgtcatactcgctatctcggccactcggcttatgtgggacagcggaagaaggaggtgtttgagtcaatctgtaccaagattcgaaacaaactccaagggtggaaggctgggcttttttctcaagcgggttgggaagtgctcctaaaggttgtgactcaagaaattccatgctatgttatgagatgctttcgcctacctaaggaattgataaaacatatccactccatgatggctcaattctggcggggcacctcggataccaagcaaaaaattcattgggagaagtggaacaaactttgtaaggctaagaccaagggaggcatgggcttgaaggatcttacaagatttaataaagccctcttggcgaaacaaggttggaagattatccaaaacccgcaatctatgttaggcagtgtccttaaggcttgcgacttctccaatggctcatttctagaggccaaacctagtggtttttgctcttatgtgtggcaaagtattctttggggtaaagagcttattagacaaggcctctgttggcgggtgaagttgggcaggatggtgagaattaatgaagatatgtggctgcctcagcctacaacttttgctcttcatactccagcaatagttgctcctagagcgacagtgaattatcttaaaacaagcaatgtgacttggaatgtatagaagatcgacagtatttttcatgaagatgatgttcctattgttcttggcctcgccccttgtacatcaaatgcggatgatgaccttgtttgggactatagtcccaatggcatttactcggttagcagtggctacaaaattgccgatatgacccgtctaagactgaaagctcctcttgccaaaacatagagaagtggtggaataagttatatggcatttggaggtccctccgaagattcgtaatttcatttagcgcatttgtaagggctggattccggctaaggttaccctcaaagggcggggaatgaatatagaaacgacctgctgttggtgtggaaacaatgaagaaactatagcccattgcttgtggttctatcctatgaatttcgccatatggaaagctttctcatataaaaggcttctgcaccagaatatcgaggtccctattactatactgctcgaggtgcatcgcaagttggccaggtatgactggctatcgtttgttgtcttaacttggctaatttgaaactgcaagaacaagaaatgactccaactcttcatcccgagtacagaacattggattgatttggctagaggtgaagtggctgagcagctccataactgcaacacttccaaccctctcgattcaaacttgcagttggccaatcggatcaagtgggagaaccctcatccaggctatgtgtgtataaatagtgatgcaagtgtcccaaaagaagggtcttactgtggtttaggcgttgttatccgagatcatcatgggaaagttattgcagctgccattcataggttgaagggccatttcaatgttgagcttgctgaatcgttggcccttcatctcggtcttcagttagctgaaaagatccccccttctccttttatcatacaaactgattgccttcggatagtgcagtatcttcgtgatgaatcttataatcttcttaatgattgtctttctattatccatgtcaaaaaagattgtaataaagtggctcataagttggctgctttggctttgaatgtggctgaacacaaagtctggtttggagatttacctctttgtgcatctatgctttgacagcaaatttgccttaccctttgttttgggctttttgattaataaagtcatttcaaaaaaaaaaaaaattaccttgtagtaatagtaaataaaatctaattggtaattctctctaattggcttataatatatgtgccgacaaaggacggcgcctcgaaagaatgtgtaaaatttaatttggtttctctttttctatagctttcaactaaagttacttgttaaaaactcctaagaactacaagaataggagtaatctcctactatagtagtagtactagccctagttgaaatctttgtaatcataagtttaccatcaatttacaataatagattgcattgtttcaaacgctaagataacgtagatgagtagaagtgttggggattacactaatattatgttaattaataattgggaattaagatcattttctcagtctttaaaaaaaaaaaaaaaaaatacaattttctcaggcatatttttatcggtggtggtaatatagtggtaaaatatatcctacaaagattttcctttttaactatttaataattaactctcacaaactgcaatatatatatatatatacatatggaatactaattaatgggtattattcatgaatagttactaaacaaatttaactataatattaatttaaaatatcaaaccatcgaatttgatctaataacgaataatgaaaccacaaatttgaatttctatacttaattaactacttaattaaaaaaaaatacaaaaatatttacttttaatactatatcaaaaatatagttcatac

SEQ ID NO: 240021 - DNA, 1544 bp, Cannabis indica
attttttttttcttctttttaaagccactctctttcttatttctctctcttcactcaaattttaaaggataatttctgatcacttctctactcagagcttaataaaaatatcattgtaatttaatttaatgtgaacattttaagatgtgaaaagtatatattttttgctattactttttttttaaaaaaaaaaaatactatttggagactaatatagtaattagttagtgttttataattttttttaaattttagttaacattcattttagatttttttatttgaattatattatattatatgataactaattaggcttcaaaataataaaatatataaataattggtatataaaaatagtatgttattatattacatgacaaatcattagtttcgaaataatttttaagggtaccttaatgtattttaaattataatctaccataatataactcaaaaataattaattaattactatgatgtatataaataagttttagagataatcaaaatctatctcaaattatatgatataaaaataatttttttttttataaaaaagtaataattagtttctcatcaatactattagtatatataagtaaaaagtaatttttaaaatacaggaaaataataaaaataaaattgaaaaatgtattaagtagtaatagtaatgttattattgtaaattagatatgaaaaatgtatattattgttatttaaattatgcggagagagatctatctctagtcgactgagagtcttgggcaaattaaaacaaaatctaattgccattttttttaaataaattgttgggagtgcttatataatgatcatatttctataaagtttgactatactttttttaattaaaattggctatacttaattttgaaactaaaacaagctataatagtttgtatgtaaattgtttgtgcagatataattactattatatatctttctaattttccttcattttctcacctgaacaatcaattttttaactatttttttggttgaaatttatagtttttatatatatataggaaaaatacatgtaccatacactcaagttacctcaactactaggaaaaatatatatagatcgggtgaccaaactatgaaaaaattaaatcaaaattttgcatgtagatgtagtttggaggaggcctttattattcaaaagagttcctaacgacaactgatgttaagtttaagtgactatattactttggggaaaaaaaaataaactataattaattccatttctactgacacagtgacacacgacacgtacgacactaagcacgatctatataaatatatatctatatatatgttataactaataacagaaccagtggttcttttcaaaaataataatagaacagtactggtctacaacgtacggacctataatattatatagatacacacacaagcaaaccttaattaacagccgatgtataataatcactggagatgatgacaaagttgaaagataacaaacaaacgcgtacctctgtatcaacatttttgtg

SEQ ID NO: 240022 - DNA, 2414 bp, Cannabis indica
attcgattttggtgtttgggttggagtcggggtcggcatccaagtctggttttctaggtctacattaggggtcaaagtcgaaaaatattagattatagaaataaaaactaaaaaaaaaaaaaaaaaaaaaaaaaattagactcaaaaaaatttttgaaaatgatttttttttgttttcaaaattttattgtcaattaaaaaattaaaaaaaaaattataaaacatgtttttaggggaaaaaataattttttacaaattaaaaaataaaaaaaaataattaaaaacatgttaccaaacacatccatataatttataaaaatatgttcatataaatacatacaagtacaatctgtagcaaccaatagaaaggcatatacatatgaaacttatttttcttttagtggccaatgaataacaaatattgagtaatgttcatgcacatggggtttacagattacaatagaagaatttgaagtattaagtaaaagagatgatctcaactcagctcaaaactcttctactttaatggcctccctaggcaactcatagacgtctttaggctttgacttcttcacaccagcagtgaaccaaactttatcagatttgtagctctcaacaccaacactagtcaccttaacccaaaccaatacctttgtcttcattccttctatcccactaagctttccccttgaaagtgtcccttttactctagtcgcataccttatcacagatgagtccttgaaacacacctccgatggtgatggaaagtagacgatcagcttccccttcgcttcatcgagctcataacatgttatgtttcgaggaaagagccccggaggaaggttgtactctcggaggaggtcagccaacgctttttgcggttttcctggaaaaagaaaccatcttaatgtttttgaactattgaattttttgtttcgttttagtcattaacttagaatttagaacaatcggcatcaacctttcttgaacgtttcatcatacaaactctactacatgttccattggaattttagatgaagagaagctaaaattagataccaacattaaaaataattttagtataaataagttactgttgtttctgaaaaaaaaaaataatttaatggctaattacgtagctagttttatagcttagaattttactaaacagggaaaatattatagaccttttgttattggtatctttgacataatatgaatgttttactggaaagatagatatagactcaatactatggttattgtacttctgaatggtgaaaatggtgactgcattcaaagcattaaagggactggtaacaagtctatctcagtacctcactaaagtaataaaaggtctaataatcactatctaagaatatgcaaagcaacttataattaaagattagcaatgctaacctctttgcctaatgacactctaccaaacacaattaatgcctcccattaattttttttcctttctttctaaaatttttcattaagggaggtgtgaaaatcagctttaattaatagaaagtgaagattagaacaaaagattcaaaaatcgagaaagttaaagctaattgggtaacttcatagttcaattctgcatatacatatatatatgtatatgtgtgtatatttgtacagaataaatgaaggcaaaaggaaaacaatcataagaaaattacaccattgttgttggcttgtaataaggactgaagttcataagcttacaaagacgcagaatgtatacatatatatatatatatattcaatattataccttttagtttgttgaatacccatcttgccttttcttcaacagtactggagagtgactgaaatcatgaaattaattgaaaaattcaataaggaacaatttgatttagttttatgtatgtaagaattccaaaaaaaaaaacacaattgaaaaccatttaattagaaactaattagtaataacacaatttatccaccgaaataaaatgtgggaacttgatcaaatgtgcaataaaaaaataaaaataaaaggataaaaaaaaagtgcaacttcaactctgttttccaatgcataaatgttataaatttcaacctattttctatcacatggaaaaatattcagatcttaaaaagcccatgaaatagacaaagctgttggaaccagcattattacacgaaacaatccagttcctaaacaataaaagtaaaaacagagtgagtgttggtttacatacagagaggtcctcagtaatattggagatctcttccttggcctttttagaaatccaaaaactgccaactttagtcagagctttctccatttttggctggtgttttctctccttcaattttctcaaaccagagagttttataaagaaaaaggagaagaggaagaagtttctatatttgtt

SEQ ID NO: 240023 - DNA, 805 bp, Cannabis indica
atatatatatatatttttttgagcatagtcccatgttgacattgaatgtcgtatttctcattgtatttgggagggtatttaagagtaatatacatttacaacactcagattaagggtttgtttgaaacgtcatattagatggtattgtattgtattatattgaattgaattatatatcatatttttatgtaatactatgttaaactttaatttattatactaaaatattatatatttaggtgtccatagaaattaataccacctatagttttacataaaaatattacataaaatacaatacaatataatacgacttagtacggcgttccaaacgagtcttaaatgttttataaaatacataatttttgaaatatttaaagaatcaaattagaaacatgctacatcaaaagttctcttttttattttaaatctattttaaaatttattttaatgttctacatttataaaatagtattcattgctttataggtatttttattaattatttaggattttaattttattttttatatgagatgcatatgtttaaatattaatcgtatatatttgaaatgaataaaatatattaaatttgaaaaaaaaaattagatgatgtattttaaaaaattaagatatggtgtaatataaaaatatgaagtcaaataaaaataataaattttgatgatatatatattttgaagtatgaaatagagaagctgataaaaatattcatataattacaacagtgatatattttcttaaaagacaaacaggagtatttaataaatattagttatttatattt

SEQ ID NO: 240024 - DNA, 1108 bp, Cannabis indica
tattttatttaataattatttataatttttaaactaaaatttagtatttaaataattagatttgataaatgataaaattagagaaagacaattcatttcacttaagctaattataaaagatggaaaaattcaaatcatgggcttttctttgtgacttcggccatgatagaagtatttagcctaattgtctttattttagccaatctcatctaaagataaccctaccgtgaagctatataaggaaagagatgagagctttgttaaataacctattctaagtgattcaaccctaaacttcaagaaaatctctctttttctcatcatatttttgaaatacactagaattatttcactctcaattttgtgtgtctctatcgtgaattgtgtactagcccactctattcaaggtggtacttaaatctttgtggaagatcgtgaagatttatcacttgtcagtgtaagaaagtaatctaggttcatcacttggcaataccctactacagaaagagaatcaagggttagagtgattaaatggaaggaatcactaataatgttagtaaacaaatcctggtaaaacaagtcctaacagttttatagtaatagacagagccaagcatatgaaaatctatccgtggaaaagttaataagccaactaaagttcctcactttgatttaatggagttttcacattaacatatattaaatatattcaattttctactttttttcttttgtttggataaagatgaggtcgaaatgatgttggaatgtaaggtgttgacttagaaatctggactagacttctaagctacactcggtcactagattggcgaggatgaaaaagtagttaagtaattataagagagacacggcaaatttatagtagttcactccctgtattatgataatattagagctacgtctacttcaagtttatattcccacagatggtattacaaaaaaaggctaagtgtctgaagctctaatttctagagagagaagctttgaccttgtggatagttttctgaaaataaaaaatgagcttaaggagctctccttttatagttgaaggaggcccacaaaaataggagaaaaatacaaattagat

SEQ ID NO: 240025 - DNA, 537 bp, Cannabis indica
aatgttaaattatatacgtagtgctaatgtaacaattgactaattaacttcttatcattttatttgtcatgtgtaacataacttgacaaaataactaatgtagaatagttcaaaaactatttgcaacgaattggaaaattcttccaattcaaagtatacaataacaataatgcatatgttattttataattcgggaagcaaaaatactaaccttatatttaattaaataaacaaaaaatcatttaaacaagtgttattgaacatgacaataattataagtatctaatctaattcatgatttaaaacaatccaccattcaactcaaacatcaaatcattttatttccaccaaaaatatatatccgtacaaggaggcaaacaaccttgaaaatgtagaacactgtaaaataaattgaataaacaatatatacacttacaaatctacatgcacacttaggctactgtagtatggctcttctttatattgacattgactatctctatctaaaacacaagctgttggaagtatcattaggga

SEQ ID NO: 240026 - DNA, 947 bp, Cannabis indica
tgaacctcttaaatgagggttgcgagttgcggttgatgatcaaggtactatggtttctctaatatttcaatatgaacatttgcctgatttttgttatgattgtggcatcactggccacaaggcgttggactgtccactgcgggactttgctggggataatcccaattttgatagtggaaggtttagttcgtggatgtgtgctcctggttccccacctcgtgatcgttatcgcttcaataaaaaaagagatgagtctccgaacaacaggccaattatgactatgggagaaccttctagaattgattctgctgttgagagaaaccgtgcacgatactctggtcccacgccagaagaattggcaccaacctctgtttaggaggcacgtgaacgagaagaagaattgcagcaaactactgctgtgaaatagagtgaggccgatactcctgttgtacaccattcgcctgagtctgctcggatggtgcaggggatgattgtattggtggggacaaggtgatgatggagactgttacgggtagtgaggctgctgtggtggatgttgtacccgagaaaaagaaaggcaaggaagtggctgttgatattggcttgactggttaggtacatgcctccacacatgtaaacgttgaagagaatgttgaagttgtacttggtgatcacaacaaggatcgggggagtcaattgaataagggaaagggcgttatgtaccattaaactcagggtgaactttctttccgctaggtgctccaaaatacgtttgagccactaatcaaagcgcaaaagtcaaaaacttggaaacgtgtcaaatcttctactagtcatggatctaaaggtaattctaagttgacctcttttcctattagcccaaaactatcctatgttattgtggctaatttaatgaataagttcaagtcccagagctggcggtagtg

SEQ ID NO: 240027 - DNA, 1185 bp, Cannabis indica
tcctcaactctgttttttgtttttgcatttaatttgttatcttccaaacatattgcagtcgttatatttacatttggtaactaaaaattgttatttgatatttaaagttgctttataatattgtataattattttttatattatttattaaattaaaatagataggacacgatattaaaatgcatcaataacactatatcacgttttgtggtataacccttaactggtgtttggttgtgatggaatggtgattgtaatatgctattagtaatataatggtacactacaaaaaactgttacttttagtgacaattttttaatacaacataatttttttgtaattaaatgtgatttttagtcataataaaatgttaattaaaacatactatttagatacaagttgtcactaatttagttttagtcacaacaagtattgtgactaaaaatacatttaaccatagatcttttagtcacaatataggaataataatttgtaattactcacaattttttcacttttaaagtaagaattttttgtagcggtaattgattgctatgtctagtttgttattagaatgaatattggaatagatagtaatttgacaaaattatctttactttagtaagaaaaagtataaaatgagactaagatcattttaagtaatttgtaacgagagttcatgaggtataagagtataatcacttttcatacatgtaatattaattacaaatataggaaattgttaattaatcacttgtaatgcaccacatcagtatggttagatatgttaattcgatctaatttgtatttatttttgctcatagtattctatctgtactaagtataaattttatattttgcatccaattcaatccgcatagtaattgaaattcaacttaatctaattacagattggataagctattttgaatttaattattttttaatattgaattgtttaatatttattaaaagtatatattttttcacctaagtaacattaaaacaagaaaattattgttgttttatgtactataaaaaattaaaataaataaaacaaaataacaaaattaaagcaaagaagaaaaaaattgtaatgtaataaaaaatatttaatttattttagatttatattttcttaattaaataagtaatgtaatatacatttgaccttattatatttt

SEQ ID NO: 240028 - DNA, 1359 bp, Cannabis indica
gattacaaccaatctttccatatcttggcagcctcaattttgtatataatatttagtattattattgtgtttgtggaagtaacacagattgattttccatgatccaaatgggcactcaaaatatctcttttggcctaccttgcaatacataagaatatgccttaataaatatgaagatagtggaaggttttagtatgaaatgaatacaatcatagccatccacttgaaattttttaactctcacaataggcattagaaagttttgtagcaccattatctcttattttaggtcaaattgtccctagcaatggcaatatataatggatttttttaaaatacatatattatacatttgtatggaaatagctaatgaggataccaagtatgcataccccccactcccatgatcaccaaaaaactaggctcccgagaccagaaaactataacaattgctatgtaagtacccaaaagtttcgaaaacttacagtttttcttgcaagcaaactagatcatttgagctatctctctcaggtcaaattgaaagtaaaagataatttaaaccaaggaattgacttaatatgggacaaaaagtcttcaataactcagtaaaaggttatggtcatccaaaaagtaggctaggctagtttaggctagggtttacacatagatataatatccaccaacctgcagttaacctttttacaatgcttttttttttatggttctgaatgtatttccatgttgagcatgtcatgtataccaaccatataatgacaataataagaataagaaagatatatttgttttctgatgtcaatgatttcttttttcatagcttgttctttcaaaattaacacaccctaccacctaaacctaccatagaacactcctacataacactcatttaagatatgtatgaaatattttaacttctcagtgtttggtaggagcgaaaagtaatagaaaaattattggataaatttggacaaaactttttgtccaattaaagggattaatttcgggggattaagcgggaaacatcatcccctaatagagaatattgtcccacatagattaaatgtaaaagtacttagccatatataagaacatgggctacttcactcatcaccaattggtttcaagatggaattccacgattctcattataatatcagagctatattggaacattattccttaaatataaaagtattgagccatatatataagtacatgggctacttcactcatcaccaattagttttgagatggaaccccataattctcatcatctccccatcattactctccctctcattttccctcttaccaaacaatagatttttgcgctcattcgac

SEQ ID NO: 240029 - DNA, 957 bp, Cannabis indica
ataattcaaaaatccaatccaacgtacataatgctattataatccatatacgccttagtatatgcacatatatataaataaagatatcaatttatttataaacacatataaacttaagaataaaattaataaaaatattttaaaaatatatataattataattagaagacaacttgatgagaattggatcgatttgatcaattatctattggaccaaacgtctcattcaacaaccaatccgatttaattaaattttaaaaatttacatgcaatgatccaattaaaattgaatatccgatagttggatcgaatgactttctgaacaaactcttcctagtttagtagcttaatacgtgaaattcgatttagattctagaaattattcatgccataaaatttgtgctcaaatgtaatattaaccataaaagttaacaaaaattttaaatttttaattaacataaataaaatacaaaaacaactaattgtattaataagtgctaaaagaataaataaaaatatgatatttattatggtgttcatattatattttatgtctaatgtaatacaacttttactgtgtgcacaatttagccaacattatacactacattggagtttaactatataaacaagtgataaaaaatattcacataccacatttataagaaatgctcttaaaactaacaagttgtcattgataacatcttataaggttggttgctaattagttataatataaacatgtttgactgttacattgcctttggaaatgaatcaagatagcattttactgcattttatggaaccccatctactcaacaaagagttcaaacctggacacttttgcaaaaacttaaagatgtggcacccttgtctccttggcttgttattggagacttaaatgaaattttatccaattaaaacaaactagggagagccttgcaaaatgaatctcag

SEQ ID NO: 240030 - DNA, 954 bp, Cannabis indica
tttttttttgaaacaaataacttagataattaattgttacaaacataataatttagttacttttatttgttgaaaaatgttatagttcaattaaaaaaaatcagattaacaaatttatagctcaaacaaatacaaataataaaaagtactttttcttataattttattaattcgtactagtttaactgttaagtgctaactcaaaaatacattgcgatatattatttaaccacatattaaataattattatttaccctattttttaattaaaaatatacaaatttaaatagaaaaactaattgaacaaatatgacccctggaaatactatactacttttataagatatttgaaccattttctagttttcttattgtaaatatagtaaatgttggctactactcttttttgtcacttttaaaaataataacattaaaaaaaatataatctttagtaatatatcccaattttaaaaaaaccaatacctgtaataagttttttttttttaaaaaaaaaataactgaattaatcctaattttgtctaattaataaatgtaaccatcaacagtttaaaaacaaaaaacaaaacaaagtagaaaatattgttttttatttatttttttgaaaagagaaaatattgtttaattaataattactactagagtggccggatttatctagttgattttactagatatatattttaaaattttaatcaattaattaatttgttttaagtagtttctaatgaatattattaaataatactacctagctaacaataaaatttgatgtaataatactaaaatgtgacaatttttttcaaagcattaattatgttgaatgtaacatttcataataaattatttatatatacaattataaacaataaaaaatttcttaaaaaaaaagataataaaagtttctcacactaatttttcttctttttttttta

SEQ ID NO: 240031 - DNA, 1866 bp, Cannabis indica
acaataatatagaatgagatactctctttcattctcctttagaaaccagcataaactagtataggtattgagtcccttatttatgtgtgtataaatatttgtatgtataaaaaaataatgggcttttgttatctttgtgtgttggcatatttttctgtcattttgtttaattgggtgattaaatttcagttttgattattatattggattctgcctataaactgtttgatataatgcttgttagaacaaatttaaacctaccatgtctcttaacttgtgaatatagattatgttttggccattttggggtatatctttagcatacatgtaataatattttctagtaaactatttttccatataatgacagggactttctaaaaccattcaacttttattctaccatataatattatttttagaggctcacatttcatactcatattagacatttctgttgggcatttaaggatacatttttccttcattttgtaacacagagtgccattgagagagcttttttgtagaaagccttgtaaaaaagagaacacattgttatgtcatttcttcaatgtgtatttgcaaaagagagaaaaaagagagttagtaactttgtaaaaggagagaaaaacagtgataacaaaaagagagacaaagttgtaacctttacctgatatgttgatgaatgaagatcaagactactctgaggagagcttgacggaaaagtagccattggtgggtgaactccgagaacattttcgggtgttgtctttgcactgtttgttttctcgtaaccctaatttttgatttccctgatattgtgtttatattgtttgaatttggttgtaagttgtaatctgttgtggataaaaatgtcatttcatatccaatgattagtgatctcatacttaggttatataagggaaactgtcttaacaatttcattcaaatacaattgagtttgtgcaagaagcatcagatgttggttattaattacctttggtgtgatgaggcctctattttatatcttggtggagttaagaatcgcgctagccaacaaacagataggtttagaatgaattgggtaaacaagttcttccacaggtgcaatggtgctctctcgagtttaacttaactcagtttctaggggcttatgtgtttgttacagtcttttttaccagttgcttttagcaaatagtttatatcatttcttattttatgtcatgttgactttgatttaatttttggtgtttgtactctgtatatgttatgttagtaaattatggtgtgagtattaaggtgcataaatagagtttttgtcttgctatgctttaagtaattttatataaaatgtaagttttctttaaactatcatataaaatgtgttagctgaaatgtatgagttttctttaaattatcatataaaatatggatatgtgaatgtcatttggaggcatgagtttattgtcattctcaacttttgaacaatattatagcttaaaaacagaggattaatatgaggcttgaaattctcaaattatttctagatatggactccactgattttgcctgtagtctcttttatatttgtatttcatatttggcaccccttaggattgagaataagataaaaatactgcaagtattagatattttatttacttttatcatttcttttggaacttggaattggaaaattcaatttttttccccaagtgaaataaaatatcaatattctgggctaaaacatatgtgtgtagtgtagaacataaaaaataggttagattttcttgtttcatcatttaccatttgtactgcgaccgcgtatttataattgtaaacattacaatatgaatatgtgttaac

SEQ ID NO: 240032 - DNA, 614 bp, Cannabis indica
caaatttagtatttaatgtaaaaattccaaaaaataatacttaaactaataaatatggttagataatcacaatttagagatagaaatattaaaaaaggattattattttagatacaaaatttgttgtaatgatattggataataatatttttttttaataaaaataatagtgtattttttttagtctaatctatttcattttttttagcatattttaatgacatatttcattgtggttaaaaggttcaaatttgcttaattttattttgtatgaagagataaataattaaagattattaatgatatgtgcatgtgtacaatatttagtaataaattgtaacgattttccaattgtaaatcgtgtgttaaaaaaagaacttaatttttcttttcaacaaatatataatggtattatatattattgagaaaattatatgatatacccattttaatttatttgttttaatttttacctctatttttatattattctttaacatatacccacttttatagatgatatccccattagacccctttatatattatatatacttaagtagagagtggcggtatattgggtaacctacccaaaaaagtaggtacattttaat

SEQ ID NO: 240033 - DNA, 2199 bp, Cannabis indica
taaaccacaacctgatcatgactaggaaaacacaatttcagattttgaaaaagatgtggctttaatgatgatgaagctgctgctatcattcaacagaattggagcgcacaatgtgcaacaacaagtattgatctttttcttgataacatgcaagcttgtacaacttccttacaacattggcatgttcacaagtttgggaacatgaagcagcagatttccaaagtgcataaagatattgcagcactcaataattctgccatcaggacacaacaaacaatgacatgtttaagaaaatcaaagtctatcttggatgatttacttgcacaagaagagatctattggcaacaaagatcaaggatagattggatgcaaagtggagatcaaaagacaaagttctttcatgctcatgctacttcaaggaagcaaaataacaccgttaaatcactcacaaattcagcatgtcttaaacacagttctaaggaggaaatgacagcaattatcacttcctattttcaagaactctttactgcttccacaattgacagaagctctctcaaccacaccattgacaccattccaacaacggttactgctcccacgaacttgcaacttacacagccatttacaccagatgagatatatcaagctttgaaaacaatgagttcgaataaaagtcccgatagtgatggaatgtcagccatgttttatcaacaatattgagagataattgggccttttgttacggatgtgattttgggagttcttaacaatggacaagatatggatttaattaataaatacatcatcactttaattcctaaaatcaataatcatgctggtatgagtgactataggccaataagtctttacaatgttatctacaaactcatctcgaaagtgttggtactcaggttcaaagatgttcttccttctattatttttgaaactcaaagtgcattcctttccgaccgtctcatcacagataatatcttgattgcttttgagttagtccatcatctcaaacataaaactcagggaaggaaaggttattcagctctcaagttagatgtgagcaaggtatttgatcgtgtcgaatggagctatattgtagcggtgatggctaagaggggtttcaatgctcgctggatttctctcatcatgaaatgcctctcttcaacgagttttttcattctcttcaaacgatgaaatggttgggaatgttattccaagtagaggtcttcgacagggggatcttttatctccctatttgtttctgatgtgttctaaaggtttatcccgcttgttgaatcatgaagaatctttaggtaatcttcaaggattttgtctcacacggcaagcccatccaattacacacttgttgtttgcggatgatagcctcttattctgccacgcttccaactcgtctgccatagctattcagcgtgttctacatatctataactgtgcatttggtcaactacttaacactcaaaaagtcagttatgtctttctcaccaaacacaccaatcgcaactcaataattttttcaaggaacattgaacatgcctattagtgattgtcatgaaagatatcttgggctaccaacttattctggaagtgataaaaaagaaatgttcagttccataaaagaccaaatatggaaattgcttaatgcttggaaggaaaagctattttcaattggagggaaggaggttcttatgaaggtggtggttcaatctatacccacatatgctatgagctgtttcagattaccacaaaagttctgtcaccaaattgaattgatgatggctaatttttggtggggatcaaataaaaatggtaacaaaatacattggaaaagttggaatttgttgtgcaaatcaaagtttaaaggtggtatggggttccgttctttcatacattttaatcatgcattattggctaaacaagcatgtcgcatctttgaaatgccaaactctcttctcagctgtttaattcaatacagatacttttccaataccaagagccccccccccaacgagattaccctgatgactagtccctgaccctttgcggtctgaggaatagatcttattgggtccctgccaacgggaaagggaggggtaaagtatgccaagtagcagtagactacttcacaaagtggacggagactgagcccatgaagactataactgctaa

SEQ ID NO: 240034 - DNA, 1998 bp, Cannabis indica
aagagagtcaattattaaaatttaaatattagaaagaaatattttcaaaatgtattaatacattaaaaatttgtaataaaatatagtgtgtctatactaaattaaacattagtttgtttttcaccaaacatactaccaaacaattattgaaaatttattttatttattaccacaaagtgtagtttttattggtatacgtggtgtcatattgctattatataattaagtattggatactacatattttaatttaataattattataaaatatcgttattgtcatttgcaatttgttatatgtagtggtattgagcatcactaatccctaataataatatttttattttatcatttaaaaaaactatacattaataaaagagcaattgatttatctataaaattagccattaattaattataaaattacttttaattaaattaaatattcattttaattgtatcctaaatataattaacattactctatctataccattttactcaatttttgcacacttcaaatgagtccaatactatgccatcgtttttgtctcatttttattatatttatttatatagtttaatttagggggccaatatgaactaccacatataactcctgcccaatgggaatagtccttttatgtgtttttgaaaaatcatgaggggcaataagctatcctcaatgggatagtggtatcgaacatatagataataattaagtgtaaactttttatttttttcttctgagataaattcattacacataaaatgaaaattggtaaagtaaaatgtatacattgacaattggtgtccgaaaaaacaatcgatttcagcacaggtattatatatttttctttgttataatgtgaatatttaagtgaatgactctctctaatgccatacatatatatattgatatatatatatattagagtttatcttagtttcttcatattaaccaatagactgatcactaattaatgtttgttaggtgagtcgattgaaaagcatgcatgttgattatgtcttccgataatatatttgaagaaaataaaaacattagaaaatataaactaaaataaactattacctcaaaaggctaactcctaggaaacaattaatatttccctcaacaaaaaaaaaaaaaaggaaacaattaatattaggtagatttttgggtagtatacttttgcttttactgcaaggttgtaatatattttggggcaattaaatttgttaaggttatatatataaatatatcttaattataatatgtatttaattttttttaaaaaaaaaattaaataatttataacattgaaaaatagaatttgaaaatttagaaattactctatataatattttttaacttttttttataaatttacgatttgggttgttctgttagtttctatgtgagttgctagttacaatttaagttactctgttatttgctatagaagtttctgtgtagaatctgtaaaaatgcaaaaaatatatatattttttaaagtataaaaataaaaaactcccttgaaaatattacacacatacttatatttatatataaaaatatatattatatatttggggtcattttagttgcagtgtattgtatatcattgtttttagagatattgatggctaaaccacttaaattttaaattttttaacacttaatcacaaaaatcaatttcttaggagcaaaactacctaaactcctattctgttttgctatgtacccctccgtctaaaaattatagttaagtgccacaatggactgcccacgtgtacacacttgtacacgcgacaaatttttagtggcacgcgtagtattaattttaaaaaataattataaatatttaaaaaattaaaaaatcataaaaaaataattttaaaaatattttctttttaggatattggcagctaaaccatctgaactttaaattttttaacacttaaccacaaaaattgattttttgggggcaaaattac

SEQ ID NO: 240035 - DNA, 1404 bp, Cannabis indica
gggtgcggtttgaaaaattgaaaaaactgcacgtgcgagttcgtttgaaaaatggtaaaaaactacatcacccacatcgtaaacatccctagtttctctcagctcatgtatgagtaatatgtgttatttatattatagtcatatattcatagttaccgagtcataatcgcttgatgattaatgctattggtcaagggatgacaatttacgtcatgacacgataacacaacacgaactcgatacgaattattgcaggttaaggtcataaaaaatagacacatgttaaaattgggtcgaactcaaaattagtgttattaacatatgtgacacaaaatcaacacgaatagacccttttatatttaatatattattaaaattattaatttatagttaaattatatttatttcaaagaaaattgcttataagaatataagatagattattatatttaatattgagaattttatttattatattgataatttgtgataaattaatataatgaaaattgaatatgtgataccaatcatgttgatcaacatgtattgtaacataaatatagtcgacacgtgaacaggacgggtcaacgcgagaacatgatgtgtcgggttagggttgagatttatttcttaacacgaaatatataggtcgggttagggttgacaaattaaacatatcaacctgcataacacgaacatgaatatgacacgtcaacacgaattgtcgtcgtgtgattgagatttgtcaaaaaaaagaggaaaaatacgaaataagtctttaaaaagttcactttgatgtagataagtcctcaacctcaaaaaattacagcaatattcccctaagcttgagattctagtaaatttattggtcctcattttaatagatttgttagttgctcccaaaaatatcacatgttgatattaaactgcagtaaagtctccaaaaaatttacattgatgaagaaatattattgttaattgatatatatatttaataaatataaattaaatggttgcctcgtactttttgagacacacacacacaaagtcccaaatttttttaggaaaaattgtggcaaaagtttccaaaaagttcactttgattcaaataagtctccaacctcaaaaaatagtggtaatagtctctaagcttgagattcttctaagttcgttagtacttattttaatagatctattagttgctctcaaaaatatcacgtgttgatattaaattgcggtataagtccttaaaagattcactcggatgcatatagatttctaatctcaaaaaaattgtgataataaccctaagctcaagataggagtgttcatccgatccaatccgtactttttttagtcaaacaacatccaatccgcactaagtgcggatttcatattttggat

SEQ ID NO: 240036 - DNA, 1033 bp, Cannabis indica
cattttcctaaaacaaaaaatacaagactcattataggggacaacaaggcgcgaggaaaaccatctctggacaagaactggagaactcaacctggtgcaatgactcgatgagatgcacttcgacaaccctcgcagtagagacctcattccctcgcagcagagacctcattccctgcagccgagacctcattcctagcctcggaaaatttatcaacatcaatcataggctggctcaaaaatttctccgtgtaagctttggtctcgggcgaattgggttctttagtggaactcaagacttcatcagcttggactatcttcttcctagatctcttgtcggcttgggggatatctttgaacatactctcaaaatctacgtccattcctgtggagacaaaggcaaaagatcaatgaattaagcagtggtggtgttgaataaaaacattgggtttgtagatataaaaaatggattcagactaggccaacatttacaaaggacaatgtttacttttggaaacctcttgtaagaatcgcctataacggttgatagtttcttcttggtttcgattaatcagacaatcttcagtcttggaatcatacatttccaattttaattgagctttgaagtttttagggatatatggggaggataggcatttagtatattccggtgctacaaatgttggaggataaatttctgagtcaggatgggacatctctgcaagagaatgacaatccaatttctagacgaaattcaccaaaccaggagtttatggaatatggctaacatgaaccattattttatactttgagcccagtaacaggaagatcaagagatgggagatctaacagctggggagtgaagaagtggaaagggcaggttattaatgctaataatgaccctcgaaactaagaagccatcaaaatcaaggacatgcgtgatcttgaagaagggataatgacaaatgtaccctctgtgataatttaaaaagcactttttattaaaaagaactttttaaggggaaattattatact

SEQ ID NO: 240037 - DNA, 1209 bp, Cannabis indica
gctaacatatgttagataatagtcctcttcgagacaggacaaatctccgaaatgcactcttcgagtcagtgccaaactcccaattgaaccaaagttctatttactccattcatatcttacaatagtctcacaattacatatttatagtaatacacactctttagaaattactaataagcccctacactatttcttagtgtaacactttctcacccttcaaaatcaccttgtcctcaaggtggtaaaattaaaaaaaactaaaaacatgagcaaacataaaaggtaaaaactagttagaacccaattattattttggtctagtagacttttcagcaaagcccaagcccaagtccaaagtacctagggcaatcaatcttctttctttctaatgattcaaagcgtctagtttttttgttttttttttttttttttctttgggtaagcagtgagttcgtgacctccctgatttgaagcttcatcttcaacatactcattatttgaaccacataatatgtatattttgcagaaaatagacagtaaggacatctacatatatatatttcttctgcaaactagtgaataccaagcaagggatcatcctcaactccacctctccaatgtaattctgcgatccgacgcgaccaagcttccgatcgtcctccggtgaccacttcgtcccgtccatcatcgtcaaagatccattttcgttcccgatcaagtatccaccgtcgtccccgatcaaatatcctcctccgttctcgcagccgcaggtggaaccatttccatggtgtgccagcatcaacactgaaaacgatctctcgtagcaccactttacgatccacaaacactccactagcatcaccttcttctatgtacacgcaagatgatctcattgctcgcttaagaggtggcgagattctcagatccccaatctccattcgagccgagagcttttcctctacttccgacgaactgcgattcaaccttggcagcacatcgcagccatctcggatgataccgataggattgactgaagaatcatccattgaatccaccgctgaaggtaccacatggccttcaatgagttcttcaacatccacgaattcctccatatttgcaggagttgattccagagtagattgtaccgccacatataattgatcaaattgattgtaatagtgtaaaaatgttgctcaagcatagactaat

SEQ ID NO: 240038 - DNA, 1290 bp, Cannabis indica
taaaaataggaccctgagcttaatttttttaatataatcaacttacgaacagatacaagaaaatgtaaacaattttatcataacacttttagatcaaattattattaaattttatttggtcaggatctattttgtaatttaacaaaacagagaatcaaatcaataactttttacaaaaatacaaagtccaaaataatatttaccctattatttattagaaaatcacacccacattgcaatagttcattgttttttataaaaaaaaacactatcattgatatatccccatattttccaacaacatgtttaaaaatgttaataataaatgaaaaccaatacacacatgtatgatcatctctcatgctaataaaaagcttatttatatatctacaaagaaatctgaaaataattaaaaagtcaactaaatatacaagattcaagcatatgtggaaatctttgtgtgtgccaagcacgttattaatttttgttccaatacataaattgaatatttatatttttctcactacatctccacctcctttcccctattatagtctccaaacttatataaactctccattttcttattcaaaaaccaacccaattatccatctactgctcttatcttataacatctcaaccttttttagcttcctctgcttatttttcatgtagccaaagagggtcaagaacagggacgacccaagatgctttacctgtctctaactggaagaaatggtccaatttcgtccctcttcttgtcgcccttgttgttatgtcagagatcacctactcaggtcgtctcgacgtggccaagaacgttgctaagcttggtgtgttgatctctcaggcttcacctgctcatcaagtgagtttttgaatatactgtgtcctaaattaaataactttgctcataaaatttccaactatgtattgtcttggaagaattgataatagtaaatcattggcattctatattttaattttctctctcacttatttctgtcatctaactcatctcaggagacaccaacaacaataaagtcacttgtgcaacaaaataagaataaaccggaaatcatgccattttttgtcaagtttttagatcaaataattcaaactccagatattaaactacgttttgaaaatctcgtgaatgctaccaatggtagtaagatagacatggtgatatattgtattgggagcataaaaaaccgtgaactttcaaggttacaactaagcctagcacttctgttaaaggaagaactggattggatatttaatggtaac

SEQ ID NO: 240039 - DNA, 1437 bp, Cannabis indica
aaagataaataataaaaaaaaaaaaggtgatgagacacttactgtatgaagtagtcgagtagtcggggtaataggaaaattctgacaaatggagacgtgatgaatggcgtgaagtagttttttgaacacttgaagttgaagagaaaatctaagtaaattcgtaggaagaatgtcaaagataaagagggtatgcacggtttcaggaggcttggatgaaatttttttagaaagcttaagtttttgaaaagacaaaaattgtgaaagatgagttctttaccatcttatactttgaatttaataaccgtaaaatcaaaatgcaaaagatccaacaaatagaaatggaaaagaagtgaaaaggatggctcattaatgttaatgatgtccctcaaaactaccaaatcccaaaaattcaatggcatcaatattttcaaaatggattatgagaaaaataccctcagtattcatttaaaaagcaccttttattagaaattgacttttaaggggcaattgttatactcgaaatttggctggtacttcagaaggtgacacatgccaatctcagagaatatgaaccagcaaatatactgacaattatattaaatgggaaaactcattaaatatattatcctaactaagtgtaacagcttgaaggacatagataaccgagagtaagcatccatatcgctataggaacgcatactcctagtaaactccaactcgctgccagggttattgttgctattaagaaccccctaggacatggttgtccagtttgtaaggccttatggtcaaagagcagttcttaagtttgctcagtacacggttgctcatgccattgctggaagacttatgaataaaccaagctattcatgtaccaagtcagatgtcactactacaaaaaccacctttagaggcagtttttttagggctttcagcatcggttttggcaaaattcgctaccgactctgatcagggcgacactgtagggtttaatttagctgacgccatatatacccctatggtgtcggttattagctaggaaccgatgccataggggtataaatggcgtcggttactagctaataaccgacgttatatatgccgtaggaaccgacaccatatatacccgaatttctatttttttaattttatttaatttatttaaagtatatatttattaatttatataataatttatttaatttaaatttaaattacatatttatttttttaaaaggtaaattaaatattatttaaattaattttagaatttgcaaaaatacataatttcatttcatagaagtaattaaatattacacaaacattgtaaaattagtaaaagtattaacaagttaataaatctaactgcaagttaacctaaaaaaataacctaagaaagaaaaattcttgggcctttcagcatcaatcgtcatcgtg

SEQ ID NO: 240040 - DNA, 1010 bp, Cannabis indica
aagggaaggtgaagagttttgaagtcgtaacatttttaaacttttcatatagatttaattaccactaccactaaacaatataatttgataatatttgaccaaattaaaatttgtatgacaagttttttttttaagtttaagcagcaaatactttagagccaagtcaaatttcacgtgaggcgatcgatcgcccacttaatttgcatgtgagttcgtccatgcaaatattctcacataaaaataattattaaaacttaaaataattaataaaatatttagatcaataaataatataatataattgtaaaatatatatgaataataatttttaaagaaactttaaaataaagaaagaattaaaccatatgttgtagcataattttagtacaatatttcattaaatttttcaaagctcctagttgtacaatttgtgtcccgatggatctcaaaatagtaaatatatagcatatatttatattattagagatgattattctaaacttcaataataaaatttaaggtattgtaaaatttaacaattagcaacggataaacgtctttaattttttttttttgaataagataaacgtcttaattagtttaatataaagaaaacacaagttgtttactaattaattatcaataatacaaatatattagaacggtacgtaggcctaaaaaaacaaccctagctgtccattttttcagcgaccatatgcaaatttgtttttttttatatattatgtaacaaccccaaatataaaatttcattaaataccttctttgtgcggggttcggtgacccgagaaaattcattattttataaccctattattattattattattattattattattatttactttgactgcaatttataaccccgtgcgaaatactagtgagatcagttgtaatgatttttattattattttttttagggtaatttgcggctaaaacctcttaaagtggtacaggtttttgcaactaaccctctaatctaaaattt

SEQ ID NO: 240041 - DNA, 1748 bp, Cannabis indica
tttaattgtgtattgctctaactgtaatcaattgaatcagagcaatatacaatcaaaagtaaacacccctactcaaaattccatggagttgaggagagtaggttgttttaaggttatatgcatctgcttttgtgtctatggatgtctcgtttgagttagtcatgaaattgtttttgttgtttgacatgatgattctgaaactcacttctcaatttgataattctgattagaagagatcacggccggcatttcaaagctcggtaagtgtatatgctgcgcaatgtgacaattgccggaaatggagagtggttaactcacaagaagagtttgaagaaatcagaagcaaaatcgaagaggaaccattcatttgcagcagaaaaccccaagttacttgtgatgaccctgctgatatagagtatgatgccacaagaacatgggttattgacaaacctaaccttccaaaaacaccaactggcttcaggagaagtttagtgcttagaagagactactccaaaatcgatgtttactacattactcccttgggtaagaaagtgagaactaaaaacgaagtagcggcttttctcaaggcgaatcctgcttatgaaggtactgtttctcctgaagaattttcctttacagtaccaaagataatggaagacacaattcctgatgatattcttcttaagaagagctcagagagtggtagtaacaaaaagaagcttaagacaatgagaacagaaggtcaagagtgactccaagtttaggtgaaatgaacttaatttgggtggcattgtgttgtgattttctttattcttttctttcttgcttacaataagaaactagccatagaacaaattcagtagattgaaaaaaccaaaatataccaaaatatatagtccaactttttccatccataacatgttactatctatacttatagaatgtgttgaaacttgtaacaacaaattttgagaaaaaagagtcagatgctgacataaaatatcataaatatttcatgcaactgtggtagcctccacacaagattacaattttgtttttaaggttctactacacattctaattagttttaaactaaaaatatgttataaaaaaacctcatttaaaacgatgtgctagaaaataatgtgcgacttagtgtacatatcgaaaaagaaatagaaataccaaaatatatctacgaaatcatctcaaatggacatttgagtaaaaagttatctttaccaaagtgtttttaagtttttatggaattaccgatgacattttttttcgtttaaaaagttttattttcataggattgctgctacaaatttatttagggaaatttacatgatatactaacttttgtcatttttttacaaaaatactgccaggcggtatttttactttttatttatgttttttattaagttttatactgcagtatactgtgttaagtttcactggtgctttactagtgttctactgttgttttgagtttacactgttttgtgttttattgatgttttataaaacacagtatttttgaaaaaatttccgtgtgatagtatttttgtaaaaattaaccaaaatttaccagtatttttgtaagtttccttttatttatttattttactatacaatcaattttttatgatggtaattaagtttcatgacaccgttataaatcattgattttagtgttagaaacttttacgtcaacttcagtcaaaaaaataaataaattacat

SEQ ID NO: 240042 - DNA, 2592 bp, Cannabis indica
ttatatagaataaatatatatatgatcatattataatttcatattattatattattatagatatgtctaaggtggttgtatgagcaaggggtgagttttgtggtgaagagcttcaacaaggaaagaatgaaacaaaatattgatatattggattggagtctgagcagtgaagagttggaaatgattgaccaaattccacagcaaaaagggaatccagctattagcttcatctcaaatcaaggccctttcaagtctgttgaagacctatgggatggtgaaatttaagtgtgtttgtaataagagctatatttacatattgtatggatttttatatgatgtgtgcaaaattataactttattgaattgttttaaaaatatttattatttagggcacaattttataacttttatatatgaaataaataaaatacatttgagtaatctataaagttgattgatactatagtgagttttgattaagttaaaaatagattgtttattggtaattaaatataaaagaaactaaatgtttagattttattccagtcattttctccgctgatgacaaaagatatatatatatatatattttccacatattaaaaatgattatcttaaaaaatagatcatgatcatagtataaatttcaagatcaaataattactcgtgtagttgaaaaggtatttaaattttgaaaagatgagaaattgacagtgtacgtgtagtaaaatataaaatgaaatgaaaaaatattgactacatcaaactaaaaagaaagtaaaaagtggaatataagatttcatttagagttctcggtatacatgtttaaagctcaaaaaaaaagtcaacgttttgaataataaaataatatgtaatatttatgtaaataaattaaaattaacgttgtcagatgttatttgtaactgacacttcaaatttacaaacattagtaaaattagggaaatattgccaccaaaaacaaatcaaaaggttaattgtatacaaattaaactataaggagatttaaccacaaattactctatttttaaaactcaataacctttttttttattctaatggaaaagaggaggaggctaccgggtgtggcttctatctctaggcatgagcggagagttccaactcttctcacatatgtttggtaagacctttgagcacctgataggttagttttaggttcattttataaattattttagaggagtgttttaattgattatgttcattttgtgtagaattatattttctacttgtttcaagtttaaattgtaaaaatcataatatgaaataaaaatgagaagaaatatgttaaatgacatgaatatgatcaatttatcatggaatttgaagttctaagatataatgagtgaaaaattctaagttttggatgctcaacatgttccgtttgtgatcgaaaatcaaatatgaaactacaagctaatttttgactatgatgcgttcactttcaagaaaaactctgtgaataaaagttttagatctctctttcagcttcccaaatcatattgaatcgtcagatttcaagcaatatcgaaagacttatggccaaaacgttatcaatcatcgcaccaagaagctcgctgcccaaaaaccaagtacccgagccgcgacattgaaagggctactgcctgcttttagaggcccagagggttttaaaacctaatttcgaaaaagaagaggggttttttgatggggacttttgggatgacgaaaatagagatagaaatcgactacaaccattgattttcaaagggtttccatcttttatctttatttttatgtttttaattagtcttaatcaattgttcacaatgacaatgagtagcgaaatttctaattagggtgttaatggacatcgattgatatatctttatggtttaatacaattttagttcttcctcaatttcttatgtgtatctattttatttgtacttaattcttttaattgtctgatcatcaattaattatttatgatttcaatagaaaatctaaaaagtgaatgttaattattctattatacaatagacatagatttcaaaattagataagagtacctatatatttaagattttcatatttaatgcaaattgtatgactaatttatcgtagaactttacaatacaatttaaattctatatatcctaataataaaaatgtagattgaaatagttactccgttatcacataaaaattagaataaaaactaaaattttattaaaccatagaaaattgatagaatcaaaattaattgctctaattatattcattgttattagtccttatttttattgctttcaatttatttatttttttcaaaaatttcttatagattattgcaaccagataaaataaaaaattaaattatttgatatttaactatagtcctgtgaaaacaataccctaattctactattattacttgtaagtacacttgcacattagaatttccacaaccgaacactatactaaaccactcacttgtttaaaactcaataacttgactaaacactcatgggcaaccctctttcatgaacaacactatttttcttttctttt

SEQ ID NO: 240043 - DNA, 300 bp, Cannabis indica
gtttcaaagtgttaattgcatgttaaaaataaacaaataagctataatataagtgctaataataaaaatgtgcccatccataaaatttctcaatatataaacataactgaaaattaacttccaaccatttgtaagagatctattttcttatttaaataagagatctattgactttgaagattccattttttcttttttttttttttaaaaaaaaaaaaagattgaagattccttttaaaatgtttagtttgtatactttatagtatgcttgtattacaaaacataatttgaaaaagaaaa

SEQ ID NO: 240044 - DNA, 1353 bp, Cannabis indica
aaataacaaattatctccattggcagacaaaataaactaaaagtctaaaaaaaattaattacccttcaagaaagcagatattacatgagatacatagtggtccctaaaggggcaagcttttgctttcaagctacaaatcacaggtgcaggaggtgatcttgtgcctcgtacccttgtttggtgtcagtggcccgggattgtaggggtagtggctgcagtgtacctgtggtcggatcttcagaccttacaggtgtgttgcttccactactcgaacctcccggcttttaaagcttgcaaaaggcatggtcgtatgttcctcccatgcacaccttgtgcttgtgaccgtgtgttgctccttacctaggaaaattttactaagttttatcggtccatggtggagtgaccttagaaatgtcattgttaagtgacattgagaatgtaatggccgagtgaccttgagggtgtcatggcagagtgatgtttggaaatgtcatggccgagtgacattaacaatatcatggccgagtgacattgacaatgtcatggccgagtgacatttggaaatatcatagccgagtgacattgaaatgtcatggctgagtgacatttggaaatgtcatggccgagtgacattgacaatgtcatggccgagtgacatttaaaatgtcatggccgagtgacattaagaatgccatggtcgagtgacattcgagaatgtcatggccgagtgacatttgagggtgcccttgctgagtaacttccaagatgcatgtcgagtgacatttggaatgtgcatgtcgagtgacattccaaatgtgcatgtcgagtgacttgtgtttgcatgtttgtcgagtgaccctcgggatgcatacaaagttacatttgcatgcccatgttgtcgagtgaaattctcacatgcatgccaagtgatacttgcatgctcatgttgctgagtgacattcacacatgcatgccgagtgacatgcaaggtgagattcccagtggcattcacacatgcatgtcgagtgacatgcaagatgagatgccaagtgatacttgcatgctcatgttgctgagtgacatgcaaggtgagatgctgagtgacatgcaaggtgatatgtcgagtgatactcacacatgcatgccaagtgacatgcaaggtgatatgtcgagtatgcttgcatgcttatgttgcaaagtgacattcaaacatgcatgtcaagtgacatacaaagtgagatgtcgagtgatattcacacatgcatgtcgagtgacatgcaaggtaagatgtcgagtgacattcacacatgacatgcaagatgagatgtggagtgatacttgcatgctcatgtt

SEQ ID NO: 240045 - DNA, 1985 bp, Cannabis indica
taagcgagttgtcacatcattgtcatgtaatctgtaattaatttagtaaaaaaattatttatttgttaaatttagtttatataattttttaattattaattgatttttagtttaataagttttttttttaaaatacattggttttttactttttttatgttgaattatacatgtggcactgatgtgataattttctaaacagtcatgttattattttgtttgccacgtgtgataaaactcgacagattgaccaatttataatattgtgaatagtcagggattatttgtaacgggctaaaaaattaaagggtacaataacacatacatcacagttcggagaataaaaatcctaaatagcttaataaatattaatattgagaaaacttcatctcttcctatctataaaacacaattaactattttggaaactattaacttttgagagaaagaaaaaaattaactacaatttttaagcgtaactaagaataaatttgtttaacatttttatcattcttgtgtcaagttatttttttagcttttctacaagaccttgaggctcctacagtatttgtcatcgcattaaagtttaaccactatgttcgagatggattagtgtggtttctctacgcataagacaccaaaatatcggtatcttgcttgagcaaagaagacgagaaacgaagctgcttctttaatagccctattgctaatttttttttcttgtaaatgtatttttaaatttcgtttccttccttaccagaaagagagcttcaaagttcttgtctttaatttactttaacattttgatagttataatttactttaacatttttttaattgtataattattgccaaaccttactataaaattaataattagtttatatgacatacaataacattttcaaatattatgaattaaaacttttctttgaagtaataattaatttaaagttattatattcaaataatttcaatctatcatccggaaatttaattacatgcaaataaagtttaattaagtctctcagctagcttcttttaattcgagttttctttgtcatcttcttcctttttattttaaaaaataatcccaacttcttgatcaataacttcccaaataataagaagatttgatgtaccaatcgaaatttctttcatcatatgtgcacgacttattcccgcattgcttttcaagttccaagaagtactgaaagtactcattaggatgaacaacttgcgcctcaacctgtgttaattatcgtaatacaatattagttagtttatcatcaaaataactacgttttataccacaatcgaattaataagataccaaatacaaaaacaagcaagcaaactaaccttttcaattaaagccaaatgcgcttttctttctctgattaatcgttgtaagttcgctcttttttcgctttcttctctttcctctttttctttttcactccttgtcttttcgaatatttcccgcggccttttcttcaatttctcatcgacttccatctttgtagcttggtaacttgagttggcatgcatagattttgcatcaagaatagctttcttgagatgacattctatattttttttttcaaaaaaaaaagaaaatataggttaataatttatcattaactctacatatatatataaattaatattaattaaataaattaaattaaccaattacctttttcaaatgacgaagatggaattatagtttcacttgcagaaactattgatttacgatatagagttgacgtttcagaaatttgagatttcccgttagtaaatcttttcatttcagacttgttcagtgatcttctctggctaggttttttagcagtacgggattgcttctctacctatgtacagaaattaatagataaactattagaaaatgcatttatatataatacataaaaaaaacatgtggcctaattaatatatttaattaagatgattaaagaagatta

SEQ ID NO: 240046 - DNA, 907 bp, Cannabis indica
cgcctaagatagttagggtgttacaaatagaatgtgaaaaattgagaaacaaaaaagttaataccattgaaggagttcagacgagagagagttcaaacgtcatccttgtcgtcatcattggagagagagaatgggccaccatccttatcaaggaagagacaatatgatctctcttccttgtcgagggagagagagaatgattcgtcgtccttgtcatcaccgtcgacggagacgatgttggattatctaccctaaataaaacctattgtaatataattagatttactaattaatataagatcataaatcattttatgttgcatggttcatatgatttatttcatgattatatgtttaatgtataaattctattaagtttaggacatatttatttgttcatgattatagtgtcgtcagcacagtgaaatataatcttgattatatgttcaaatgtttaagtcctatgatttgttagttcattggatttagactgacattataatcagcgataaggtatacttacaccttagataagtgtcatgtcctttccaggacattggtaaagtttaccagtatcgaatgtatggagtatacattaaattagaccgatattgattttggataagatatcataaacttaccgttatatctttctaagtcaatatcactggttgatcttaggtctatagatcttaatccttatatggttaggttcagcttagttgtattatttatgctcttcaagttgttcgtgaaagctaatcaatcattcaggtggatatttacaacatggggacatggcagttaaattgagtgtgagcgctaatcatagatatggaatctatagcttctataagtatttagatgtgaaacgatgaattccttcgagctttggctagatagagat

SEQ ID NO: 240047 - DNA, 1037 bp, Cannabis indica
gcattgtttatgtctaattggtgaatatgccaattatacatggcagcatgggccaagaatatttttaaagaattgaacttgcaataggggcataagtttgtgaaaaatcaatgccttgcctttggttgaaacctttggcaataatgcgagctttgaacctgtcaacatccccatgttggctatatttaattttctggattggaattgctctgcgatggagatctagcattgatatttcttcgaggaacagctgtgttcatggtaggagcagcagcaggtggatcgaacatgatatcagttgctggtgtgttgaccaaggataaaggagcaccatcttgcgatcgagtggaatgtctagccatggaagcagtgggcagagaaacttctgataccatatgagagaaagaaacagaaagaagaaaagaattgaaatctgttatttctcattgattgaaaaaatgaatacagggcagtctatatatgtagccaacggagcttagttagttaggaaggaagaaagactaactaactttaccatctaattaatcactaattaacaataataactaactctaatagtattatttttatttccattaattagttataagatatttgtttaaaaaaaaagttaaaaaaagtaatatatttttaaattttaaaattagatttattttatttattatttgtataaatcacactaataattgatcaaattattaaaattattatttaatatatactgacaagtttcatttattatttatttatttatatattaaaattattatttattttaataacatttattttaaatgtaatattaaaataattatttatttctaacatttattttaaatgtaatatgaatactacatattattcacacacgagtaatatagataaatatatactgacaagtttcattgataatttattttattatttaaaattttaaaaataactttttaattttaaagtttttcaaataatttaaatcaatgtataagtgccatgtgaaaagtctaacataataa

SEQ ID NO: 240048 - DNA, 1250 bp, Cannabis indica
ctctctctctctctctctctctctctctctctctctctctctctctctctctctctctctctctctctctctctctctctctctctctctgctaccttagaccccaaagaacccaacccttttttttatgtaaactagactaattcaagaggatttatcaaggtttttagagattaattacttagaaagttaaaggtaagctggtttttctcctttctctttaaagtttcaaggtttatgcatggtttctttgaggttttgggatttcggttttattttgttttgtagtttttaaaattgggtcttggaaattaaattgtgtttgtttaagctagttttgagttagttggttgttgttaattaggaaagtttgagctaggtttgagtttttaagctcaaacttagctcaataatggaaaaatttgatcatgcggcttgatgatatagtttttagttaaaatattttgtatatgatatttttaggtgttttggggattttggttcgatatggggtagaattgaacttgaaattgagatttgtgtgttttctatagacaaacggttgaccgtttccccaagaaatgatgaatcgtttccctaggtagaaccttaggaaaaagtccactgtttgaggattcggtacacccgatggtgtgatttttggagcctcagtttacatgtgtccttaatatttagggtatcgccacactatttattgagagagaaacttctagctttgagtttaagtctctaaaagtgatgtagctagtcacttaccaattttacataagctaaaacttagggcctctaatcttcaagcaatagtttccactcaggtcgactagcacgcctaaattcagaatcaaggtataaggttattataatggatatacatgcatacatgtttagcgtacatattttttatgattgcctattagataacatattagtaagagcggtattagtgttgttaaatgccaaaatattacatgtttaatagtgtaaaaatacaaataattaaattataaataatattttcataaaattagtgttatatattcgtatgttgaaaatattttatttagattcaattttagtatttatggtataattgagaaaaagaaataaaaagaaaaaaaaacacaaattttattaaaaaaattataaattaattagattttaaataaatattttcattgatttaatgtaatatatattatgttggacatattttgtttgaatttaatttt

SEQ ID NO: 240049 - DNA, 1659 bp, Cannabis indica
cagagtgaacgtaaccgtaaataaaaggatcattctgtgagtgtaaagacctaataaaaacttgtaaagtgggaacattacaatcataatatcaagttatataaaaaaaattaaaatatatactaaatccaatattaaattccactaatcacacgatatactacatatataaaatggtactcgacatagggtgccacacacaatattaattccttttttaatttatttttgctcaaatttaaattgatggtattatttttctaacaatttacaaaaaattaaaaggtttttttttttttttcaattttcttgtaatatgtaaaattaaaggttaaagttgaattagctaaggagtcaagaaaagtataaaccttaagttatttattttttttttaaagaaaatcatgccattttattaataagtaatcaactaaaatgataacatgcaactcaatcgaaacatctctaaattttaaagtgagaagaagaaaaaacatgtattctagaaagaataatttcttttgatgaacaaatatcatatttttacaaatattttaaatgatgtgacacaaaatttaattaggtaaaaaaaaataaaaaaagaagaagcaaaaacacgccttcatattctattttaataaagttgaaatattaatgactatatctactaattaaaaacatagtactacaatataaaccctacctagctatacaatatttatatatatatatatttatattatttatataatgattataaataaatatcgtttgaacatataacatatgctctccaccgacgataatactatatatatatatatatttatatatatttttcctaataagactatacacttctatgccctaatattattgcattatatattgttttacaatttcaaacccaaagacctataatatgttatatttaactatttaattattattattattattattattattatatataataataatatttattttttttttttttgtatttatatgaaaaaaaagagttaaaaaataatatataaaatgatttccatattttctcatatatatatatattttttttttttttgaggtaaatattttcctatattttaattgttggtagtattatagttttaattatttcaaacttttgaccatattaaacttagaaagataatataattatataatattaattttaaataaagttttgtacatagttttaagtattcttcatcttaattttaagttaacattaaaaattaaatttataattagatgtttaattaaaatatcaatccaatctaattattaattggattgaattaaattttgaactctaattaaattgaataagatgattatattttcaaaatctaattaataattagattggattagattaagaaaaaaataaaaggtttttacactatatattaaaatttctaacttctttagtgtgaagcaaattttttttgaaaaaatactgtataagttttatactgtctactgtattaagttttcacagctgttccacgattatttcttagttgttccactgttgttttaattgttgcattttgttgttttacgactgttttataaaagacagtatttttgtaaaatattcgtgtggcaataaaattgtaaattttt

SEQ ID NO: 240050 - DNA, 1125 bp, Cannabis indica
atatacaaattttgtatcttgggttattttaattttctaacatttgtttcttccatataattttcttttaagatttagaaacatatcaattaaatatcatggcatatccatattagttttgttaaatatttttttatttgaaagttatgtcaattttttttaaaattttttaagagttattttgggtgttagtatatatattttgttgtataatatatatatattttctatcgtaagatatattattattcttacatgacatttattttttattttattatgtataatggtggtatatattttgttagtataatgtatatattttaatgtaggtatatcattttattggcgtactatgtatattttattgttatttttatatattttaatcatatgagatatcatttactttatataatatttagtttctattttattatatacatttgtgttattaattttgttattatggtatatatattttaattgtaatatataatttggttaatatgatgtgtgtgtatatatatatttagtaatatattttttattattattgttgatgtattttttttggtaaatggtatatgcaatttttattttatggtatattaaggttttaagataatatttagtttttacattacaatatatttttgttggtgtgacataataatgttattagcatgctatatatattttaattgttgttgttatatatatatatatatatatatatatatattccattgtatgatgtatattttttgttgtacagtatataaagtttattgtatataatatataatttttttaataatattgttatattttaattattggtatatattttttttattgtatagtatatatttttaattatatacagtatatcatttatttaagatgatatttaattttaactttaatatatctaatgactataattttttttggcatggtatacatattatggtggtatatataattttgttagcgagtaaattaatatttaagtttaaatctcggttacaaatatttacttaactttaatttttggtagtaataatacctacatcatatatccctgattggtcttgatcatttaaattttttatttttttt

SEQ ID NO: 240051 - DNA, 2308 bp, Cannabis indica
gtaatacttggcgtagtggttggtcagtgtatacccaaaaaggacgagcatggaattagggccttaaattccttgttgctaagattaggcagtaagtaagcaattgtactaatgggtatcgtcctttagcttcaacgagtcttttgctgatataatttataggatgttctacgttattctctttcctgatcatcacaacactcaaagcatattttgtaacagctaggtatattcctaattcttctccatccagaggttttgagagtacatgaggcttttcaagttgtcttttttgttcttgaaaggcattcttccattcctctatccattcaagtttgttatttcctcgaaggatgttgaagaaaggaacacacttatctattgattttgaaacaaatctactgagtgcggctatccgaccagttatgctttggacttctttagtttttgttggcaatttcatattgattagggcttgaattttctctggattagcttcgatacctcaagccttaacaaaaaaaccaagaaacttacctgaactgagtccaaaggagaactttaagggattgagtatcatgttgtattttctaaggatttcgaagcattcgtccaggtcatctatatgccccccaacgttcttggatttgatgtgcatgtcatccacgtatacttccatattttgtccaattcggtctttgaacattttgcttacaaatcttttgtaggtagctccagcgttcattagaccaaatggcatgaccttataagagtacagacctgtatctgttcagaaacgtgtatgttctttgtctagtcgatgcattctgattggattatatctaaaataggcgtccataaagcttaggatctcgtgccagactattgcatcaacaagctgatctattcttggaagtggaaaacagtctttggggcacgccttgttcagatcggtaaaatcaatagatactcactattttttttcggggttgggtaccagtacagggttagccacctaagctagatagaaagcttcaatgatgaacttgttatggcataggttttctacctcggatcaatgtttagggcgtgggatattatagaaggatcgatactgaccatgtcctcgttcgaccaggcaaaaatgtctatgttttctcttagaaattttatcaaagctaatttaactcaagcaacaaacctttgccaatttcgagtttcctggtcgggacatttgggtcgattcaatctctcctaattcttcaactggcccgatatttgtgtttggttccccatgttagggatcgacatcctcatccccgacttgggcgacttcctatttggaaatgcttttccattctttgttgggaacttgacgcaagcatggaaaattgatgtgacaacttttaggtcatataaggttggtcggcctaacatgacattgaaagctaatggaacatcaattatcaaaaattgtgccatcacagttatgctcttcggagcttgtccaacagtgagggataggcaattttcccccaaaggtgcaacactctggtcagagaaaccatacactggctgggtacagggtatcggatctttgagttggagtcccatcttctcatatggtgtcttgaacagaatatttattggagctccattgtctatcatggtcctgtccacttttttatttgctatatgtacttccacgaccaagggatcgttgtgcaggaagcaaatgtggatatcatcttctttagtgaaggttatagtggattcccctacccgtggcatttttggctttctttcctctatggccaaaactacttccttgtgttcgtgttgtaaagttccagcatacctctcccgagctttggctgagtctccagcaatgtgtgggcccctaataatgactttcaaatgtccgtctactggtggaagcattagtaggtcttgattattgtctgcttgggcagtccgttgattctaatcaatcataatgtatttctgcatgtgggggttatttgttctgattaagaattcaatttctagcttcatgttgttgcacacatttgtgtcgtggccataatatccatgaaaaaaagaaaaatttggacgtgtctctcttgcttacgtcctttttcatgggagaaggttttttgtacgggaacatagactaggttgccatgtagattgtctataggtcgtcagttaggagagagaaggcaatgaattcggaggcattttctctaggggtttgttcggcttcgcctgcaaactttcctttcttcccattgccttgcctgccatt

SEQ ID NO: 240052 - DNA, 1697 bp, Cannabis indica
ttttttttttttaattttttatgtatataaaatcaaaattcccaatattatcttctttgatgcaataatattccacaaccccacatctctaaacccaagaccctttttagtttttagtttatttcaccaacacaccagctcaggaaactctcataatctgaattgcctttccacaaaaaaccacaaaaaacttgattgattcttttaacaaccatttggccccattatgtattaatatatagtaagcaaaatagagttataattaggaaaaatcttcctgcaaaataaggaaaaattgtttgaactccaagttctactataagttatccttcggttgttttagtcaatgaacttaattattaatgatcttcatgctcaaataattaaaaggcaaggaattgttgatgtatattttgtatgtgattataaataaatcgattgtttattaatttgatgtacaaaaataacaatacatatatccaaagtgaaaaacaggagtattattctctaacagaatccttgcttgaaaaaaaataactaaattatgatagaatagaattggatttaatttttttaagagtaatttgtggcataaatacttaagttttgtgccgagtagcagataaatacctaagtcgtatttttggcggtaaaaatacctttcgtcactagtgtagaacttctgtaggtatctgatcgttaactgacaggtcgacatctacgtgtcactcgttaattggtccatgtcattaatttttttatttattatttaaatgtttaaatattataaaaatttaataaaaaattaaatataattaatttttattttttaacatttatttcttttccatttctttttctttgaattaaaaaataaactcaattgagaaattgaaaggcagaaaagaacaaaacccagatcgatccaaatatccaacttcaaacgcaagaaaaaaaaaaaagcaatccaaaaatatttagggtgtctacacatttggtaccctgtgttttatcttaaatacaagtttggtaccttgtatttttaataatgcttatttggtaccttatattttacaatcatacgtatttggtaccctaaatttaattttttttgataaaatttaatcaatacaatcaattttctaaaattttatgaattctgaatttaaatttatttatttgattacatataattgagaactgtttggttaaattaataaaattgtattgattaaattttattttagggtactaaatatgtacaatttaaaaatatgaggtaccaattaagtattattgaaaacataaggtaccaaatatgttttccataaaaacacaaggtactaaatgagtatattcccaaatatttaccctatctatatcaactcactattttccttccctattcatcatctaatttcaaaaatttagaaaacaaatttatataaataaataaaatctcaaaatccataaatatttaaatcccataaattacaaacaagccaataaatttcagattcaaacttgttgcattcaaaccaattctttacaactacacagactatactcagatttatacacaaataaatagcaacatttcaccatatgttcatcattgttcaatattctctttgtacagaagaaaaaatagccaaaaaaaaatcaaaacaaccaatacctctataatcttctcttct

SEQ ID NO: 240053 - DNA, 1740 bp, Cannabis indica
agagagagagagagagatatgataatagaagaaagaagaaaagagtaaaaaataaataaatatatataaattaatttaattaattaaactcattgtacttggtttctctctcttggtggaagagaaagagaaagagaaagtgactattacttatattttttttttattatttataaaaataaataaatatatattgttattatgtatggatggatgtgattaattaattagttaattaaatctacttacttacttagttagaatttgctttcatcaagtttgacgcctttggactttccactcactcaaaaatgaatgtatcgtttaatttccttctcgaagcttgcacatgttctaaatattattgttatttattgttttttcttcttttctaataataataaataattaatagataaattgtactataaaattaaataaatgagagaattatctcatatatatacatagtataggtgttagtaacactaaatggatatattaagtgatatgagagttactatttttatataataataaaaattaaaaagaaaataaaaactctcataagcttaattaaattattaaatttattataaagtatgattatttaattaatgatgatcgattttgaatcatcatgttatacaaaatttgctccaatttgaattttaagttttttcattggtaaattatagatttatatatataagaataaattacctattttaaaatgttgtaaatttttaaaattataataataacaatttataatcacaaatatatataaaaaatatttaatacaaaattttattttttatgtcattaatttatatttttcttcaccaaagtataaataatattatatgcatttgataaaaaaaataaatttgaagataatttatagtattttaaattatgtttatcacatgtaaaaaagaaactctaaggtgttacaagaataaaaataaaacaaaaactaggttgatatagtcatgttaataacataaattaagaaaagataaaataatatctattttaagacaacataaaaaaaatgaagatttaaatattatttactttattataatattaatttattttagaaataaataataaattagaatcttaacaattattaatttttattataatattaatttattttaaatattttttaagtaataaatgatacatattgattcaatccaaacatgaataaaaaaaaagaatggatttattattatttttacaatccaaaaattaaatgcccaaacaaaatctaaagaaattgaagacaagaaaaaaggttaaagagtaagccatacatattaataagaaacttattttttttttaattttatttcctatacatatttaaaaaggttcgcttctatatttatatgaatttgatatttataatcgacgtaaaaagaaaagaaaagaaggaaaaaaaaaaccctcttttagtgaattagatgaaacatttttgtctttaaaattttaaatgtgcctagctagcttttaattaaaactaaaaaatgcatttctaccaacaaggggtaaaaatattgaagtccatttttgttgaaagttgaggtaattaaaaagatagaattagttctataaaaaaaaatagggggtttttttttatttttacactttttttttgtatttttatggatttctacatagaaacttttattacatctaacgttgtaatttaaattgcaacaaaaa

SEQ ID NO: 240054 - DNA, 1084 bp, Cannabis indica
tttttttaaaataaaaagtgaaagaaaagttagcaattatattttggttctaattctaatattaaatttaactaaaatattttgtgactaattaataagattaataagattaactttttttttatatggtaattacaatcacttatggatatacaatataaatatttgtaaatcgtacgcaggattttttttgaagtaggatagtttatcgtctacttaaagagcatattttgtcaaattattaactttgactgttattgaaataattaattagtaattttattcccgaagtatgactattgtaacattttgttttttaactactactaagctgtgctcattctcattaaaagatcaaattatagcactgataaagatatagagagtaaaatatattaatggttgtgtattttaagaagcaaaatttctattatttaacaaaaatcttatatttcaataatggtatttaacatatgattataatttaagagatatgatatggagtaaaatatttatttattataataataggtatgatgcttgtcaacattattagttttagtataattgtaattttatctattatttgttagtaccttaattatatatatatttattttgtatttataattttgttgctatttgattattaaaaataataatgaactatttatttgaatataataatattttgataatattgctatactagttcaatttaaaatttcagtacattcattaaatttgtcattctctagctagcaaacacacacaattgagaggctatacaattactaacttaacatttgtcttccatgccattgttttgtcctatagtttatccattatgcatattgatctcgattttgtgttttttcctaatattgtacaatatatattatttgtccttgtatagttttgttaactagtaaaaaaagttctatgtatacttatgagatgtgctcaatgcattacaactatcttaaatcccttcctccaagaaacaaaaaggtgaccaaaaatgacaaaaaaatgacatcataaatttggtgagagagtgagaatagaattttatttgataagt

SEQ ID NO: 240055 - DNA, 1186 bp, Cannabis indica
acggttataatttctaaatggtcggttataaaattataaaaactgaccataaccgaccgattttcacccctagtataagattattaaaagattctcgtcagtagcaaggccacaagccaatggtcaagtcgaggctgttaataaaatcttgaaagacactataaaaagaagcttgatgaggctaagggaaaatgggtagacaagccacgtcaagtactctgggcttattggataacagaaaaaatagcaacgagacatactattttttcactagcattcagctcggaagccatgtttctagtagaagttaaaattacgacacacaagtgagaattctaccaccaagaataaaaccaagaactactcaaggtatccttagatttgctcaacgaaaaatgcactgattcaaaaattataaaagcttcatactaacatcgaatcacaagacacttcaataaaagagttcgaaaaacactttaaaagtggagatttggtgttgtgatgcatgtttgctaatacacgagaccctgcaataggagtatttaactcaaattagaaaggtccttatattatcgaagttgttataagaatgagagtttataaattggcatggtttaacgactcgctgataaaaaacacctggaacattgagcacttaagatcctattaccagtagctgattctgttgtatttcatttaccattccatgtaaaatataattcattttaatgaaagtattttgttacaagtaataataaagtatcttttcaaaattatttgggggcatatcattagtataaagttaaactttgatgataaccatggtaaacatgaacaaaggactaaatctggtgaataaatactagaaattagtagttgttgaaaataaggtcaaaaacctgatcttaaaaatgacacaagactaatgcgagcagaaaaactaactgcttgcataacattttagcaagtactgtaaacaaaatcatataaattgattttgaaaaatagtatgccaaagctaatttcgatcagaggaataattgctcgccaatatgatctgtaacatcaaaatagcattgaattggttagatgttgaagttcattttattatttgagaaaataacgagtaataacaagtgagaaagtcaataaaacaagctgctattcataaatcatttaaaaatta

SEQ ID NO: 240056 - DNA, 3697 bp, Cannabis indica
atttaatagctattcaatcatttcgcttaaaatttatatacaattttttcaactcacagctattttaaaattatatttaccaaacactcaatagctttttttcacagcacagctacaactgcttttactcacagtacagctacagctgctttttctcacagcacagctgtgctaaactggcgctaaagatacaacttctgcctggataataacaaaagttcttacaaaagccaaaatatatgagtaagtaataagtctccaactatgaattaattatttaaaaatatcataaataataattttagattatataggaatcataattttagaatagactcgctggtttagttataaaaaataacacaaagttaaaaaagatattcaactcaaattgtataaataaagttttacggaagtttacatatctatactaataacaattttgttgaacaaaacataataataattattatttataaccaattttaaataaataaaatatattttccctaataactttccataaataattttattgtacagtttcactaaaattatcccttttttttaacatatcaatcatttgtttacaagtctctattttaagttttgactatgttaggagtgttagttagttactgttcattagaatcagttaattctgttattggttcatttcggtttattagtcaatattagttctaactgattctgttgtacctaactgattctcctcatgtaattcattggctatataatgccaatgtctattctttcaatattgagattgccttttgttcaatctgtctttcttctatctttcttctctttactgtctttctctctctttcttgttcttctctctactgttctgtttttcttgttactggttcatcaatggcagagagatttaacatggtatcagagctcgttcctcctctatctgtaaacatggcgaacgttggaggcaacaacaatgctacacagaacaacagcagattgaacaatcaaatgaatggagcacctaatctcaatcgatcgaaaaacaacactgatgatcacaatcctgtatatttcagccataacatgtctattagactaaatgatcacaattttcttttctggaaacaacaggtactagcagcaattcgaggaaatcgattacaaaaattcattcaagatcgagctcctccacctcgattcttaagtgatgcagatcaagcttcgaataccttcaatccagattttcttgattgggaggttcaagatcaactcttagtttcttggctgttatcctcaatgacagaaagcctcctcactcgcatggtgggatgcaacacagcaagacaaatctggcatgcactcgaaaagcatttcactctgcaagtgtcttcaaagatcctggaattcagaacgaaattgcaaaaaatacgaaaaggatccatgtccttgaatgaatacttgttaaagatcaaacaacatgtcgatcttcttgcttcagtaggggaggttctgagtgcaagagatcacatcgctaccattttcaagggcttacctccagaatatgacacttttatcatttcaactaatactcgaataagagtattcagttgctgaaatcgaagctctactattagcttctgagtctcgaatcgagaagacagatcaagatttagaagctgagttgagtgtgaatcttgctacaaccgagttggatcaattctctgaagtcaatattgcctatcaaaattatccgaatcgcaccagtcggttttacaatcaaaatcgaactcctcctctctcatctttcacttcatcatctcgaggaactggtcgtggattcaccactcaaagaacctataatggaggtaatcatctgtccacctcttctttccctaattctaacagtcgtggtggtttcagtttcaatagcagaggtggaaagtatccaagcaactcaaatcgagttcagtgtcagctttgccataagcttggacacactgtgcttgattgcttctatcgattcgataaaagcttcacaggagtgtttcctaactccaattctccccaagctcaagctaatgttgctcagacaacacaacctgaagacagctgctggtatcctgattctggtgcttcgaacattgcactccaaatgtgcaaaatcaacacaggtgtcgaatatgaaggagatgaacaactctttgttggtgatggctcgggtctctctattcaacatattggtcagtctattgttcacaccaactcttctcattcacttgttttgaataacctgctgcatgtaccaaaactcacaaaaaatctgttaagtgtttctcgttttgctcatgataataatgtgttttttgagtttcattctgacaaatgctttgtcaaagatcaggcaactcgaaccatccttctcactgggacacaccagaatggcctctatacttttaatccctctcaattccatgtgcaatctccaaacacagccactgttcccagagttttaactgcatctgtagcttctaatcctgctgtttcaagtgttctcacagcctctgtgtcaccaactaatgtaccagaaaactcttcttgtactcattgtaataagtctcaagtttctgactatgagttgtggcacaataggcttggccacccctctgaaaaagttgtcaaagctgtattgcaaacttgtaatataacaatcagcaataaagatcctttgaatgtttgttctgcctgttgcttgggtaaaatacacaagcttcctttcccaaaatcatctcacacaatttatagtgagcctttacaattaattgttgctgatttatgggggccagctaaaacaacttctgtcaatggctatagatactacattcaatttatagatgcacactctaggttcacttggatttacatgttgaaaaataagtttgaagccttaaagacctttttgcaattcaaaacagaatctgaattacaattaggcacaaagatcaagtgtcttcaaacagattggggacgggagtttagatcatttagtgagcatctcaaacagtttggtatcactcatagacacccttgtcctacaacacatgaacaaaatgggttagttgaacgtaagcatagacatgtagtggaaaatggccttactcttcttgcccaagcttcaatgccattaaagtattgggatgaagcttttcgaacatctgtttacttatccaatagactaccaacacctgttttacaaaacatatcacctattcaaaaactgtttggcatcatacccgattacaccactcttaaaacatttggttgtcaatgttttcctaacattagaccttataataaacacaagctccaatttaggtcttcaccatgtacttttcttgggtatagtctaaaccacaaaggctacaagtgtctagatgtttctggcagggtatacatttcaagagatgtaatatttgatgaaatgtcatttccttacacatccattcccaaacttgcaactgatacatacacttactctgaatttcttacatctgccaacatacctattgctcaagtgtccaactcccaacatcaccccactaccactgttattcctaattcgactgtgcctactgtggcaagtccatctgttcacttgcaggaacatattatgcagcagcagccatctccacaaaga

SEQ ID NO: 240057 - DNA, 2342 bp, Cannabis indica
aatatcaataataaattatttaaatagctataaataatttcatgattaacataaataactattaatttccaaattaacttagcgggctttacagatgagttatcagacatagagattaaggcttaaggtttgagagttagggttttagggttaacccaacagttattcaccgtcggcaataactatcccaacagttttttcgctacagtgctaaaccgatggaaaaaacttccacttaccttttccaacggttccaataattgaccctcttttaaaccattgggaatagcctattttgtagtagtggtttgactaatgctctttatataggagaggttacatccctaaactcccttaaaaataggtaaagtaagctattatttacataataaattaataaaatacaaataactaagttgcccctcgaaaatagggaagttgctaatattttcctctattttcatgggttgttaaggcccaatttgtggtttgacttactatccatggatgaaagttgcacaccaaaatcctgcgaagataaacgttggtcggccatgcacctatagagtgcatgctcgccgcccatgtgatgtccagaagctagccggcctaggctagccatagggccagccataggtggctggtttgtcatcttgtcatccctcctatgtacttaagcttctcattggttgaagtgctaagtagatggcttagccttcttgttggcgagttgtacaccaacgtggcattgatgttggccacgtggacatgccacgtcaggtgggcaaaaagtaagataatatttgtcctacaagtcgttgtgcagacatctgtgcggataaggacttcttagcttagttcggactgatgtagccttacccgggaaaatcttgcagcaaatttagcctttgaaatattttctcttgaatgtgtgatcacattcctcagcagtatgttaactgcattattcttctgctatgctgttttttagttacacactgcatggcaagtaagaaaggggtcccataaaagttgtataagcttatgggagggaaatcatttttcactttccacattttaatctctctatagaaaaagtaactcttgaaagctcttccttctctctagaggttgacatccatagtgcttcaactctcaaaattttcgcgccattttgacgattcaagcttcccatcttcttcatgaacaatttctaggagtgggtaagcttttaaatcctgtgatgcacttatttagttaattttcccatggttgtttgaagcatttctccactttgaatattttacgatttccacattagattgtaatctttttggtattttgattcacatgatagctttaggatgtataatgtgtgattttttgacgaaaaaaatctaattttgacattcgttgtgattcttgactctttgagtcacaaagaacacaaagaacttgtttgagttcatgagaaacacacacttagatccgtagcacaccctggccgaccacagggccttctcatgggagctggtcggccatagggggtaccctaaagtctaggcagcctatgcctgggcttagggtccctggctgacccttggctgggtcacggaaccctagccgaccctctctaagcttaggaagcctggctggccaaggcataggttccaagcgggtggctaaggttttgttctcttttgacttgcgcaagggctttgtcaaggccctgtaggcatatactgctatagtctcatacgtggttcccttggaatctttgtataagactcagtggtgagtctattataggcgaatgtacaacttaagattcaccatttgtctaagttggtatacttaagacagtactttgctgatacccatccttgtacgatgtactttatttggcaagtacacttgggtacgattggccaaaattttgtctgtaccttgtgttgggatgttatgccctaaataaaatccatttcaatataatctttgttgacttcgcttttagccaacgataatgagtctaatttataagcgataaacgatatgtagtaacagatatatgataaagtaataataagacacaggaattttaaagaggttcagccccgagcagttcggtaatagcctaatcctcgttatttgtattgacttaagatcaaggaagaagattcctttcttgtagctcttacaacagtatctctggatatgtaattcttagataatagtatagtcttagcttagcttcttttcgaccgatcccctccctattgagtatacatcactatttatagggctaggaaacttgaggaggaagagttccctctctcgttaca

SEQ ID NO: 240058 - DNA, 1487 bp, Cannabis indica
cgtacgaggagggacggggggggggtctagaatgtcaatagcagaaaattacctcgtcccacaagttagaatcgcctgagttttctctgtatcagggtgggaagtcttagggctcaaagctatactgaccggaggatcatctcgtaatttctgctgcttggtaggggacttctatctggagcagtcatcaaccttcctcttcaacaggtctttcagtctgctcatcatagctatatagagaagaaaacacttagtaaatatttgtgcaagtcataaaaagtaaagctaatgttgaaatagctaccctaaaactctagagcaacaccttcaaaactaacagagatggagtgtgatcatccaaagagtctcctttgtttggaaccttgactactcccttccttttaagaactactatttgggcggcaggatgaaaaacttcttcagaatcatctctgatccgaataagtttttcaactgagtcctaagctgtcttcttttggttcttcttcttttctccttcagaacatcccactcagaagtaggattcttggctactggatcatcttcttgtagttctttgggcatatatactctgtacttgagaaagttctatgtggtggccatccttgagatgttctgagcatctactgaaaattcaggaatggcctaagccctttatctaaccacaaggtgaaaaggagatggcagtaagtcaggttcaactagaaagacaggtggttggcattcatgccttgcacaatataataatcctcaatatatccacctatcatggacacctctgattcgtttatgtcggtcagccatgggtgttccagctgtgaaaaatagaagtagcccgaccaattgtgcctcaagctagaatttaaatcaaaaatccaaatcgtatcatgagaaaccagcttgccccaaccttgcttgtcatacaacacaaataatgcagccaagtacttgatgcccttcgaagtgaactgggtccggcaaattttgtaggaattagagatcttcttatagtatggatgaaaaggcaagatcgcacctttctcagtgtggggactgaaccacgcacaaagcccctccctggggttagaggtgagctacctgagggtacgaagaaaagcttaaacatcttaaaaaaggcccttatcatggggattcttcaacctcttgtaagtgagagtggacgaaggtgaaacccactgaggaaatttcttctccctagtccccatgggatgtgccttctcatactccacctcgacatagtcttgagccgaaaccaagacctccttggactctaaaacgagcaccttagccttgttataccctctaaatgggagagtgcatggaacctcttcctcttccattacctcttccccttcaccatctggagaagcagctggatggactttccctggtcttctacctcttagacttctttgtcgccagcaggctgttgggttttatgccct

SEQ ID NO: 240059 - DNA, 960 bp, Cannabis indica
aaaaaaaaaaaaaaacatatgagaattggagcaatacaagaacacttacataaaaaaaaaatgatgagtactcaaaataataagtaataaaatgtaaagaaaataacaaagacagaaagggaactataatggttcaccaaatcttgaattgcctagttcaccattcaaaaatttgtgattaggttatatacaaaacagatgttggtttacataattcatcattaattgattgttttgcacattaattacaacaaataaattaaatgctttaatttgcaacataatcattgatagatttcagtttttacgttactcttgttacatattattttacacatctattatgtgagtttatatgtatttatacttagtgtacaaatataataatttaaattgttttcaagacatgtcattctggttcacgctaacttaagtctacttgtatttatagtttgagattatactcgcttatagataaaaaaatatccatttaataaaaacatatttagaaaatttaaagatttcttcttaataatattccaaatttattagtactatgattggtaagaaaacaagaaattaatagagttggaaaattttcaaggattgaaaaacaaattctatattgatgaaaattactattttgtttatataagaatacccattttggttttgtttacttttggatagataaataatggtggacgttgtctctaattttttttcttattacaaaaaacaccactttaatgcaaatcacaagagtcgaggattaagaaaatttcattaatcaaatagcatcaaccataaatttgcaatacacaaaggataatcagaccatcaaaataaaaagaatatttagttaaaacatgagcaaccacattaactgttttagaacaaatataaaaattcataataaaaaactaatgtgaaacaaacaataaatcattaagaataagt

SEQ ID NO: 240060 - DNA, 961 bp, Cannabis indica
atataaatttacatgtcaatcttttgcttttatagttggctattagtttgctttggtaaagaaagaaaagaaaaccatttagtttactaaaaatgtactcatcacaattatctgccttagcactcttttatttctgatagaattttaaattttgatgtttaatcttgtagtacttggcaccttaaagtactccttcgcatttatcattatcaataataatgataaggaaagatcaatgacaagtatgaattgacgttgacatctcaatagtgtccatattggtgccacgaaaagcccggccctatcaagtttcgcattataaaattctgtgttattctattggttcaagtatggtcggttacaacatatttaaaatagggaattaggaatgaaaacgaaaatattgtatttagattcttcatactacatccataatatatatgagagctcaaatgaatattattaaaggataaattaatattatcaattgcaacactaacattgattatcactaataattaaacactcaaataataataataataataataataataataataataacaacaataataaactcctttcatcattcactcctctcctgcatcaaggataacaaatcactaatttattaaactactaaatactaattataaagaaatataagagaaaatcatcaaaaactataaattactattcttcaatacaaatacaaaactaatttttgatgacacccgatagtgggctaaggtgggctagtcccaaggcaatggcccaaaaagtttgttcactatataaatatgtgaaaaaaaatggtaattttgtaaaattttggaaattaagggccactaatatccacccccacctttacccaactcaaattcatattttgaagagaaaattacacttagtatgggattttaaaagttcttatgataaatatggcacatttaagttt

SEQ ID NO: 240061 - DNA, 2569 bp, Cannabis indica
taaatcatgttctcagccatctacattattaaattctcaaaacaaaagttgtaataatcatcttctctgagaaactttgataagtgaatcaaagaactcaatgaacacaaacacgagttcataaatactcaggatttagaccgatctactattgatcatctttatgatatgaattaggtctttatggtaaacaacatatttgataaagataacttaattacatatcaatccatatcacatataatctctattatatataacacattcacttagatgtcatactacatcagtaatccgaattgagattactggcaacgaataacgggtattagtgaattgcactagtaatcgttgatttaagattccataactttaatatgttgctgattgttttattcatggttgagtgatcttaattttccgtacaatacaagtcacagtctcatatatgaaaatgaattttttgatatttatatataaattattcaatattgaatattaataattaaacaaacaagtatatatgaaaatattcaacttttatttataattaaaaatgtctttacagacttttcatggcataaatcctaacaaacaatacaagtactaaacaaacaacaggtgctgagacaagtaaaccttgggcaagagtctgaaagggctcaagctcgaaggcgtcaaccaataggccctccacctgatgtgcaacgaccatagaccactgagagaaccaataaaactactccactagattcttctcatcgctctaattaatgacacccgacctcaagaccatacaaagggaaagaggcctgttattcgtaccaaaggagaaaatcaaagactctactttgaaactgaaggctataacatccgacaagtaaggaccaatgagccacttcatactcgaaagtatttctgagatgaaagaggtgagttgtgcagtcacttttcctgtggccccgatggccaacaatattagtacttcccttgaatacaagaagaggagttgaacatgagcagtcaattcaattctcttcatacttgtgatctagccggagactacttcgagtgaagtagccactacaaatgctctgaatgattgctcccacagtgtatcatcccaagatgactcgaattttattctaaagacatcaccaatattgccttcatgacctcgtggttaagaaacaataacagacctaagttttctggagttcatgatcgacttggaaatccaaaagacctgtgtgacactataaccaaaaaatggttggtggaagcgggagcttctagaggtaaccctgatcaggtaattgaagttttaattgggatgcaagctaccatccatggtgttaataagatgaagtttgacaacctagcaaccttaataaaaggaataatagccccaaagttgtcagagatcgaacttgacaaagagcgatgctcaccactctctaccgaatcaaagctctaccaatccctttgaagttcaagaattcttcctgtcattaatacgccagtaaagaagacccgtcgtctcatatctattactcaaaagtgcagaccgatctgtaagagtaagagacgatgtcaggtccagaatttttcctgctacactgacatgcttagcttagcggtggtacctcaagcttcccactagatcaatcaacttatggaaagatctaggggatgcttttggcaaccaatttcgctcattcgcaacagcgccaaatcgagtccaatgatttggtagatgttaaaacagcaagaagatgaaccccttaaggactatatttaacggttcttagaggtagctgctaagacgaaaatactttgtgaggacgcaaaggtaatgacacttctagtcagactcaaggagatgagtcatttgtggtgccaacctaaatgtgccacgtctacaaatacataagcaattcatgttggcaatcaactgtggtaaatggaagacaccttaaatttgctaacggctcatcagttcaaagggtttcaccaccaaatttaagttttgatggttaaatgtaagtaaaatgatagttgggagggcttagccaccaaaaactcttattttttttagttataactggtttttgagttattgtgtattattttttttactcattttggtgtggaaccggttctattttaatttttattttaatattttggaattgatttcatcttgcttgtgtatagttttttttttatttattaataatttaacttattcttaatatattttattttattttattttttcagctaacatatttaaagattaactgaaactataggtttgttagtaggttgcaaagatcgtgttgcattttatttgtgttggatcttagttgattttttgtttagttaaagggcagatgtcctatttcaaggaatctcctaagaagcacgttaatttttatgatgtggtatggcttttactatatatatatatatttaattataactgatttttgagttattgtgtattatttatttttatttgttttgttgtggaatcaaaactgtttaatatgatatgtcttagtat

SEQ ID NO: 240062 - DNA, 1766 bp, Cannabis indica
agctagaattaaattgtagagggccaatatcaagtggtgcatatttggtgccttaatttcattttaatggtgcctacccattgaaaacaagtgccttaatttcattttaatggtgcctacccattgaaaacaatatcataatttattttataaatattttacatgttactttaaaatgatataaatcaagtaattataataaaaaagaaaattgagtggtgatttatgagttaatatgttaaaagctcaatttaatactatctaataataagggccgctaatgcacttttaatcttttttggtatttaagaaaatttattattttaatttttttatagttatatataatataattatttaagacatattacaattttttaaaaaatttaaaataatttataatagaaaccacaactaatttatgagataccataaaatagggatatttcaaaaaaaaattggtaagtatacttgaaaataaaactattattagttattgttttacgaatattcaattaatctaaataatgttgttgcaaattaaaagtaaatattaaatatgcaatatattagtgtttaagaaattttaataatctaactgcaaattatttttaaattaattcaaaaataaattaaaaattattgttcgaataattgtgttaaataaaaaaatattaaaaaatgaagataaaatctgtctaaaaattgtagaaaagaaaaataaagatatttgaacttatgatcttaaacctgacactggttggtattggcgcaaattatgtcatctgagggagaagtttaagaagtatgatatccttaaagcagacactaatgatcagtttagaactaattggttatacaataacagtttagcccaacacaacactaggtcaactatcacaaagatatttggagttacaatcatggtgtggtggatgagactttttaccttaaaaaaaaattctagatagaccactaaactacaacaaaatctactacctatagttatgccataaaagtgtttatataaatagttaactgtgaccaataaaattactacattaggagtttaaccatcattatcccttaattttatttgaatttttacaataatgtttatccattgtttaggtgattaaatcaattatgtttaaattatattcacaggtttagtgaatacattattaatttacataaattttgtgttaaataaaaaaagattatttgaaaaaaaaataattaaaaagtattataaactttaataattttttaaatattaatgtttttatttttaaaaataaatatagtattatagaaagtataaaatttttattgtatatatacatgcaaccgtctcgtaaaaatatacaccttacactataataaatctaaaatcaataataaaaaaagtttcctaccaataaaaaaattttgttaaattctataccctatagtcttgccatatatttaaataaaaacatataattgctgtcttgaatgacccacgctgaccattcattatttcattgtataggtaagagttggtagtaatacaaaggagagaagagacttatagataggtcagtaatggttggtgtgataaaatatcaatggtgattattatgaaatatgaatgatatgaaagctgtgaaagtgaaagttaaagtgaaagtgaaggaaaattaaataatagaaattattccaatattattgaactagcttgaactaatttctatataaggaaaaataagatagctagagagtct

SEQ ID NO: 240063 - DNA, 676 bp, Cannabis indica
agagagagagagagagaaggaatggaagagagttaagagggaatttgatcaagtggcaactctcttctcatggtttatataaagagttagtttgtacttgtggtgtgtttagttggaaagtgatgctgatttggagaaccaacaaacagagaaagtagtcacgggtatttctgaacagagagaaaataagggaaacaatctaagccacaagagatgatgcactttttgcttattaaaaccttgtttataatgcactttccactttttagttgttcttacttccttggtcttgttagtattgcccgtgagtcttctctcttttctgtttgtgtgtgattttttctgaataaatattcctgtgaagatactagctagtactactatatatgtttatgtttcagcaattatatacttaataatataataagaatattacctacttcttttctttccatcatgacatctctcaacataacttgatcttaaaaacaaatcacaatctgatcattttgaatggttgagattagcttggcctcttccatttccaagctactagtagttaatgatacgaagacaacataataataaacgaggcccacttgcagagaacaaacaaaaagaaccagaaattagcaacattgctgctctctcttaccatattctacttgtgtggggg

SEQ ID NO: 240064 - DNA, 1086 bp, Cannabis indica
tttcaataatactctttaattatggccgaggaaaaccaaggttacaatgctggaacacaattatgatataaaggaaacatctcaaacatcataataaataataaaacataaacaaaacaaaacaagtactctaatactagaacaaccaaaacacaatctaactcatacccggagataagacatacctgcattagaagagataaatttaccattaactaattaattaggaaagattgtaaatttcaagattgagtaatttaggaaagattagaaattctctacaagttctctcattttgaactgatatggctttccactgttgaagatcaatcaggtcaagtaataatctgcaaccaagaaaatgggaagtttgataattcatttgagtactttattaaatggaaaatacataaaagcctgcctttcaaaagaagaccattatatatggaataaggtgatcatcatatttattcatatattggctgtttgattagaagacaagaacaaacctgagattgtggcattgggtatgtgactaatcttgttccagtaatcctcattcccactctcctttcggttgtacattttgttcaccagaggtcattcccttatccacaaataagtgagggaggacggaaagccttcttctgacaatgtatgcaactcggggcactccaagattttaagtgttcgcaaggaggtgagttgtgtaaagccatttctgtccaagcttttaagttttgcaaatgagataatactaagatgggtaagagtggtaggcagtagcccttcctccggaaatgattccgtatcttctttattaccaaaaatacaaataaaggtaagatggggtgatgtttgccaattccatttcaacctcaaaaatgcatcataggatatattaagtgtagacaaactaacaggcaaaccaccttcattttcagggcaaggctctatcaaaggacaatctctgattattaaggactctaaagatgagagggaaatcatcatctctgccaaccacttcaagttaggacaattaataatctccaactcactcagtttgggagcaataagtccaccatc

SEQ ID NO: 240065 - DNA, 1594 bp, Cannabis indica
gtatatatgtcaaacaaaagttggcagctttctaattcattgtctggtccacacataaacctggcctccaaccatggcacctgctagcatcccaacattgtaagggtgtgcatcaaatctgcatggaattgctttcatgtgttcactctgtaatgtcacaatagtttttccttctgaaggtgagatgacatccactcctttgttcatgttaccaataaaaatatatgaatcgtcccagccccatatagccctattcaacaataaacatagcagagtgagcaatcatagcttccaaagattccaggcccagagagtatgttactgataactcagacaagaaatgaacatgaattcaagatttctagtgaaatttaaaccacaccaacagcctattatagtggtttaatgaaggaattgataatttaatgatactaaaggggacatacaaaaatacagatgaagaaaaaagttggtacctgaattgaggaatccatgttcccgactgattactatgtggaatccatgaagattcctcaaagttagctccgctaagtatacgaactgtgtcgtccaaactacaacaagcagccaaagaatctcctcaaaagaaagttatttcaaaacagagcatattcctccaataagttttttattattcaatagcatttatataatacaaatgaggctatgaatggaaggaaccattggtaaagcaaaaatatacctaattattttaatagacaacaaatcaaagaatgttcatttcatgcattattagagctttgttgacctaaaatatttctaaacaaaagaaactttgaagaaatgcagtaatgagacacaattactaaaacttgagaactaattaagtttttaaacattgccctccttatatgtcagaagaatttttaaatatgtttcattgaacattcaaaacctgatacaatttttctctttttatactacagtttagcattgcaaatgggaataatcactatcatgtaagaaaacagtacgccgtttatgtaccttgtagttgccaagcaatttccagagggtgaaaaatatgcagaacatacagctcttttgtgtgtaaccgtgttcaaagtcttaggcttatcagcatcaatttttctcaaatcccaaatgcaagcagttccatcagcgcaacttgttgccataaaatttggattttgtaaattaaaatcaatggagttaactctatcatcatgcaaactccactgagctgcacagcacccactcctctcatcccacatactcaaatttcctaaccccgcaccaaaatatacacacttcgcgttatctgatcgttgagacagagagaatatagcttcattgtcatcagcagaatatactaaatcaaacttctccttttcagcatccatcaaccggatatgtccatcataacaactggtaaacacctgcacttgagcaaaattaatgagtttgaatacaaatgaacatacaaacagtttacattgacatcatatttggctatagtgacataaagcaatggcattattcaaatcaaatggaatccaaaaccaatatttacttattaaaagttaccttt

SEQ ID NO: 240066 - DNA, 3049 bp, Cannabis indica
aaaatataaagccatcagattagcattgttgcctcagattttttccaaaatacgtggcagcggctgcgtgtggcacgtgaatttcaaggacacctcacccgaaaaattaactaaaccatatatagacggacaagtacaattcaaggagtgagcccatggagaggcacataaagcatgtctctcctctctaggagctagaaatacaacaaagcatttccgggagaaggagaatctgtttgaacagtcattgcacatttaatgtggcatgggagaaacgtcttagaatgcccataagaggacatgacatatggcggaagccacgtttacgatgattacacgataatcaaagagactagtgacgactccattatgaagaatcacatcaatcaaggaaggataaagattactttcacctaatccctatgatacctaaggcataggtcatgtatgctctattttatatctcatagaaacttgtgcacctagatggctggcactcaaagacaagtgatccctttttagtgatccttgcaaaactctataaatacccctgaacaaaatgggaaatgggatcgatcgaaaaaagaaaacaagagagagaaaattcaccaagaacattctctgtataggaactctcattaataaaaaagactcgtggactatggcccattaatgcccaaaccacgtaaaacatcatgcattaattattccaaagctctcatcattatatcgtttaattggttgccaaaaacctcagtcaacattttggtgccttcattgagagttgtcggaagcgtcttaagaagaaaactgttaaaatatcagaataaaaatggtggaaactcaaaacaacaaacgttaacctcgtcctccttaggatgctcaaaacccagaaggcgaagaagtggcctcacgagtaaatgtgggttctgaggaatgagatgaggcgaacaatgaggaatatgaagaaaacttcaaagtgtacgacacctacgacgaaggaagttatgttaaactgttggtcctaaggcaaaaagcggctgatgatgaagttgaactggctgccaaaaaagaacagaataagaggatgcaagagataatggtcgccatgcaaaaagctatggaaacggctggaatacatatacatcccaaggccatccccgcgggaccagaggaagcaaaaagaggagtcctcgtcgaagcactcaaaggcccaagtccagggaactgagccctacacggtacccttccgagaagaaccttgagaaaaacccaacttcgatcccagggagaaaaaagaaggcgcaggatccacaaaaggtcctctcaaatttcccaaaaaggaaaggtccgcagaggggcaagctccctcgagcgagtcttggcccatgcgattgtgaggaccgaaagagcatatccatccaccaagaacccgaagaaagagagaggaaaagtcaaaggtgccctttggctaaccttagagagaaaatgtttgaaaagcatggtgacttaagaaaccatcttgaaaagaagaaacacacattgccagtctctggaggtgcattgaacgagggaatcttggctgtattttcaatattggacaaagacattactagggtctctcgaagacaaaaaggggatgattcaaaccctgattgcgaggaccgagaacaatgcgcctgacacgtactggatgtggaacttcctacaaattttaagatgcccaaaatggcaacttacacgagagattcggaccccagtgatcatttgtcccagttgaacccggttatgaccgtcatgaaggtcaacaatgacacaaagtgtttatgctttccactgacgttgagtgactctactgaggaatggttcaagaagttggagccaggatcagtggagttttggaacaaattacaagtcaatttctgaaggcagtttttcgcaacaaggaagattaaccttgaagtcaatgccctaactaatataaaacaattgcctacggaaaccctaaaaaacttcattaagagattcaaagaggaggcttcaaagacccagaaggttgatgacgggcaacagctggcccttcttcaggctggaattcgcacggggacccttttgcggcacgagctacagcaagaaggagaaactaatctccaggacattaagaaaagggtcaaaaaatgcattaacttggaagaagcccaaatagtggcttactagggatgctacacgaccggagtgtcggatatgtacttggagcgcagctttcgggagccccatctcctgccagtcctcaaatgagcgaaatacaattctctgctactccaggatataatcaaaccctcgctttagctcccgcttcatcgcactttggggcacccatgagcaatccctcggggatgagcgtccaaactccgtcccaatctgcacttgccactagcctgataggacctccttagagctcccagagtaagaggtcctcaaagggcagtaaccagtttgaggacaaacgacagcggaggtgatataccccccaatacactcaatatacggagctcacgaatacacatgagcgtgtatacttctggaggccccttacctcagggagaagtaagaggtatgcccgaagggcaagtaccccccgaagcggcactccctcagtaggtgcccagattgccaccacggacaaatgggagagtagccatgatcttcggtgggtctcatattggaggaaccactacaatcgagttaaagcgttacgctggtgccataaaacacgatgaagtatgggaagttactcaactaccagcacaaaggttaaagctcatggaccaacccatcactttcacggaggacgacgcaaaaccggtacgcttctgtcaccacgatcctctggttatgaaaactcccattaccaacaaggtcgtggcaaggatactggtagataacgggagctccgtgaatctatgttcaagaagcatttatggccatagagctcacggatgtcgcttagcagctcccagctcacaggattcaatggaataacactcat

SEQ ID NO: 240067 - DNA, 1677 bp, Cannabis indica
taccctaagacaatagtccatgtgaggaggagtggatggtcacgatcttttcggaacaaggcacgatccccatccaacggctagggagaccaaagatctacgagtatctccacatttaatgcctttccaaaatcaaggtgcgatgtaacgatgaaaatcttctttttttgatttttcatgccagtcagtgaacagacgtcgaaatatagtcgatcctggaagacgactcctcaataactgcatcctaactcacgctcctcgactgccacgaggacataccatcattaaaagtggaagtcaacttccatggtcgagtaatttggaaaggttcattattttcttcctctaaaatccacacatccagatcaagaggtcgaagcaagcttccatcatgagcagcatcctaaaatcttgggggtaaatgttatccacgtttttggaatgggacacgtggattctatgtcagcattctggaccctcatcaatggtaaagagggccaggcccatcaaatattagatatgtcctctcgagagttattttgatttcgtgctcaggataccttccgccttctacggatcgagcttggaagacagttctagagttgttagcccggaggggaagaatgcatcattcccataagactcttccagtttccctatttgtttcctcctatagataaggaaacaacaggtgtcagattgggcaataatatcatatcacggttaaagacaaaacagactcatggactaaggctcgttaatactccaaccacgtaaggttgtttgcttcttattatactttctctgttgattgttatttcttcaattcttattattattatcctgtttctactcgggaaacaaattataatactcaaagtcaagctcaatcacaaggcccttctccatctattagtccagaagatatgggagtctttgctgaatttatgttaaaagtgggtgataagattgatcaatctggcacctctagtgacccttctctacatgacccatggtttgaaaactttttacaaaattcttaccatcacaatagcaaggtagtgcgtctacttcaaccccacatccaatgtcaatgccacaacaagtttttcaaaaaaccacaaaatatgcctcctaacatgtccggtaactcctctcagatgacttagttctcttaacaacatcaacaaaattctctcaacatgtctgttggctcttcacagtcgcctcaattacattacatgttcaggcatccctcacagtctcctcccatatatctactggatgccacaggaggatctcagacacaacaacctatggttggccattttggaggctcatcgcaacaacaacataccctatgtatggtcaatttgggtcatcacaacaacaacttgtgtatgatcaatttgggtcgcaaaacaacctatgtatggtcaaatatctccacaacagtctgtgtatggtcagatttttagtccgcatgcagagtcagcaacaacagcaaactactttagttcgtccacaaactcgacaatttgtcgagatcttacctatgcaataatctacacaaccttattaccctacctgtcagcgcctcaatctcgtgataattgtgatagttcaaaatttagttgtaatgcagatgactttatggaatttagtgattagaacaat

SEQ ID NO: 240068 - DNA, 1843 bp, Cannabis indica
ttgaataaatagattacattgaaattgagttttatttagggcataaaacccaacaatggtgtaatgtggatgtccccatatacctttgagaatgtcattgtatctatgataaaatgcatgaattgtaccatgaaagtgtaggaggttggggtatactcctagactaacacttcatggttggcggttatctcaatggtcatgactttacatattcttcattaatttagtcccggtattttgtgccgcgtgttactactcttgacacatcatcatcataaaattttgggtaaacagtactattattgctatgtaacaccttgaggtattcaataccatactgatgtactacccaataattggttagaagttttccaaattattaattaaattaaaatttttgagagttgatattaaaatgcaccaataacggtatggtaccttttgtagtgtttgacaccttaatgttccccttaatattttcgttattaatatgtaaatatctttctaactttgattagattttttttttaaattaatcgtaaaattttgcaagactatctctaatgatgtatgtaaaaaattgtactatatttggctaattctttcttttttttttaaaaaaaaaaaatataataaatctcaatccttttttaatctcattttttttaaaaaaaaaaaatcttttatgcactccactttcaaaaaatatatatacttaatcattttcatttgtacatttttttgcctatattttttctcttatgttttgtttgttttttcaattttgtttgctattcttttcttagttttttttttccttattttcttattagtaaataatattgtagaaaattatacgagcttaaataatatttagtttggtgaaataagaatagtaattagaattaattacgatgtttatgttttgttggaataaaatttgaataagtaataaattaaattatccctatattttaatttttattcttatataaaaaagggaattgaagcaaatttatttttattttatttaatatttgtgatgtaattctcattacataacttctccaataaaataaaaattccatggtataatataatcatcattaagttattatctcattacaacacttttaaaagaaaatcaaatattataatagtaattttgatcacataacaattttcattacattaaactaaccatgatcttacacattatattaatatttttgttttgttttatcagtatataatgttgaaaaaaatcatatgatcgagcatacatttaaacaatatgacaaatgatacacattatttttttaaaaaaatttatcacactgtctttatttaaacgtaagtaatgaaaataaaatacataattaatctatatattttgacgggattacgtgactctagtacgtctccacacactagtatataagtgaaattttgtgagtcttttgccaatcaaaatatttgacattaattaattggaaaatgaaaattgtgtaacaaataaatagtacccattaatattatatattttaccaattatcaaaacattaaaatattatgtttggggtaaaataaaaaatatataatatttgaaatagtatcgtatttatgggagaactcatatgaattatgaaattatattgtgtacataaaagcaatgtttggcatgtggttaacagtgttactcgtggcatgagtcttccacaagttattatattctccacacttaagaaaattgctaagcggcaatagtaatgtcaaatatcattttgggatattggcggctaaaccccccaaacttttgggtttgtgacagttaaccaccaaa

SEQ ID NO: 240069 - DNA, 1480 bp, Cannabis indica
cttagaaaagaaaatagtgatttatcacttgtcatatggtcagaagcaccagaattcgcaatccaaagagatggctcttaatgagttttgttctgccatggagaaagacaacaagacaaaataagtatagaatcttagaggagacaaactgagagagaggacactgaaacaacgttgttggagtcaaagaagaaccagagatgaagaaacctgagagagacaacgtgaaaaaactccactggagattgccacgcatgtacacgcaccggttcatggagagagtcgcgacggatggaggtggcgcgtaaggcccacgcccagctcagatggatgcaaatttttaggttttgtcgatcggaggtgggataagctccctgggttggaggtgagaatagaaaactcctttaaatgagctttctaggataaagcctccaaaccctaattttaagaagggaagggatgagaaaaataatatgttttaagaagcttcacatgctcaaataccatgaagcaaatgagagaaaaaggtttttatttctaatgatctattttagtatataaaagggtatatataatacaatgtgaacacctagtaatacaagggtaaattaaaaaatcattaaatataaatttagaattaatttacaactagcttgattttctatagtatatactatataaatatcaaatacatatatacatatacaattacgagttcaaagcgatggggtcggccaaccaccatggactaccgtggtcggcgatggccatgtaggctaggagagaagacagtgatgcactacgaggagcacatagagagaggtgggtcgaacccgcctaagacccagtcgggccttctcttttccatgaagacggtcataaaatgtccttgcatgcaccatgtatgcatgcgattatggaggaggaaggtggtccaaccaccaccaacgtcgaccatcgacatttacatccgggaccaaactcccttgctttggtggcatcgatatggtgaaggggcacggaaccagagacaatggtgtcgtggtgcatggccggggttccaccatgaacctgagctcacatgtatgtgatatttttgacatgcatggctgagttttaagtttagaaccaagatcacgcccaacaaacattacaatgtataatttttatgtaaaaataatttcataaataaattacataaaaatttctatgcctcaaattggcttatattattttttaaaaatgataacaacaaaacctacattcaattatactatataattaacgattcatcacctctcatacattcacaataatataaccatccattcacacatatattacatactagcaaaaaggtacgtgcgaggcacgtatattaaattttatgctagtttttttctatgttatttgaaaatgatacaattaaaaattaaagaaaaaatattattagttattaggtgagattattattatgtgt

SEQ ID NO: 240070 - DNA, 1367 bp, Cannabis indica
gtacacccaatataattagactggacatacacataaacacatcaaaatcatatacaattagtcaattacattattaatattaacaaagaaaaaaaaaggactcgtccagtttattataattaattacatctcagctttggtcgccttaatatcctcaccgccagagggcttatgatcttgttcaacaatctcaataatcttgagctgtctatttctctcttcgggctgcttgggtaccgtgatcctcaataccccattctcaacatgggccttaatccgatccaaatcggcattcacaggcaaccggaattgtctccagaactttccactgatcctctctgaccggtgccacctatctccctctcgctcctcctcggccttcaactcgccgctgattctcacaactctgttctcttccacctcgattttcacatcttccttcttcacacccggaatgttgacggagatcacgtgctccgtcgctgtctccttccagtccgcacgtgccagcgcccgtgattccgcttctttagtaaacggcgtttggtcgaggattcggaatgggtcatcgtcgggaactatgtttgtcatcgcctcccaaagtggcctcatcgtcctgtatggaactaaggcggatgattggagaatcaatactgagaaaaacataagtgtagaaattgctagatctttcggtttagacatttttggaagatttgtgatcggaatatcaattaattaagactatgttgggacttgtgagtgagcttgattagtatgttatatggtgatggtttgattaatagttaatacattatgtatttatatatatggtgattggttttctcgggtgttctagtgatttccatgatatatggaaagttccagactaggaggatgatgtactaaatgtttgagattttataacaaaaaatcaaaatatattacaacttattttcaaaaaaaaaaaaatatatattttataactctattataaaataatacaaagattgggatcacaataacttgaataaggtagtctaaaagcttatttcccctatctctaatcaagaactctagaatatagtttggggattatcaagtctgggttatctaactaagtgctttcttgatagaaaacttatctttctcaatatgagcaccttatagctctttatatagtttttaagtgatcacacttagaattcaaacacacaacacctcatttctctcatataaatgagtactaatatagtttgtaacaactatattttataccatttgaattccaccataaattgtgtaacatctcttttattacacaaaatatgatcaaccaaaagaagttacaaaaataattaattttgtaa

SEQ ID NO: 240071 - DNA, 1520 bp, Cannabis indica
gctctgataccactgtaggaataaatgccctacacacagcagagaataaatcaattctcttggtcaaatctgaccatttttccagtcaaagtttttctttttgaccctcagcattaattaaacgacaacccttctttattttaatattaatactacaggtcgtttcatacactccagtaaccttaatattcttcagtcatacatatattcctttatcttcacaaacatacacttacgcctccactaagaaaaccctagcagagaaaacaaaatactctccttcttcaatgttcttcaatgaagaacatgaagaacagtcgacccaaatgcaacccagaaaaattatccatgcccagaaaataaacccagaaatcaacactttaacccgaacaccttcttcgttgttcttcacagaagaacaagaagaacaccaaaaatattacccaaaaaaatcccaaatacccagtacgaatcaccccagaaatcacatacacaagtaaatatatatatatcgtaaatgcagaaaagtaaagggaaaagataacaccggatttatagaggttccccgaaattgtgcgggtacatcctcttcgagctcgcctcgttccactatgattcttcaatgttcaagagttacaaagctaggattccaactcacaaaggtacgagtggtaatccctgtgtattacaatatttaatcctctctttgctctctgtatttccctctttgattgtctctaatctcttcttctcctttgattttgcatgaacaacccccttgagttgtggatctccaaaccctaactagggtttcaaggctaaccctctgtaagcctcttccaccaactccctttgattttgttgctctgtgattaatctggagagacatgcggatctgtttatctctttttctgatctggtattgtgatgctctgctatgtaaaatgtatattttctggtttatatatgtgttgtatttagagcatacagagaggaagttagttacaaagtattaataaactttgtaactaacccaactactttgtctaggtaaatagaggcctgaggccacataagattttttactgcctttgtaaactcttgtgtaataatctggttttacagtgtatagttaatatgggattttatttcaacaatttccacctaaaatcccatatgaactatgcactgtaatcttgttgttgtttgtgagtaactgagggtcttagctcgaacccattaagggttttaccaacctgtgtcaatccccaataagcttaagcaaagcttaaacttattgagggacacaacctttgtgcccatgtctgctggattcacttcagtaggcactttgtctatcccgatctgtccttgtgaaactttatccctgataaagtgatattttatctcgatgtgttttgtcctatcatgaaaaactgggtttttgcacaaatagatgctgctctgactatcggagtagattataggctcctttttcattaacttcagctccttcataa

SEQ ID NO: 240072 - DNA, 849 bp, Cannabis indica
ttttagtttttctaaaaataaatttttttaaaaacaaaaatttttacttttattttgtgtttaaaaaattagaaaataaaagtgttaccaaacagcactttaatttatgaaaatgaatattcaaatcaaattattgctttaaaataaggacacgccaaatactttattttaattatatttttatgaggacaaaatgtgaaaagggtgtccatgtgttatttttcttcttgttttgtgggttagctgagctcggcacacctccgaaagaatttgaagaaaaaaattatggcgttgcaggctgggatgtcctcctccaaggttctcgtcctcgtcggagcaggtttcccttttgttattcttattcttattggtttctctttccgtcttcgtcgtcttcattgttgtgttagcccaattttgtttttaattttgattttgattctggaaacttcagttattatgatgtgcttatagtcagatgtaaaagtgaagcttttcgggttgggttgacactagttagggcaattttacttgttaaatttcttcatgtcttgcttttgttaatagagttttacttagtctacatcttcattaaactagtgggtctaccgtatattggaaaatttagttgctcttttcttcttggggatttgtcattttaaagaactgccaaaaggaatagagggaaatggtgttcttgcttatgtatttcctgatgttatacaatttttattcttccttttaattgtaaaggttataaataaatttatataaggtaaaagtagacttatcatggccagaaaaaaaaaaccaataaaaggctctcacttgccaagttaccatggttga

SEQ ID NO: 240073 - DNA, 792 bp, Cannabis indica
tgttctcttatgtatatatccacttgaataaaaagatgactcacttttacttcgtcaatattattgatcacggaatactcacaagtaattctctaaagttataatttactgtatgaatttaccataaccagtcagtccatctacaaatagatgattcaactaccttctttcaggtgagcaatctaaattttatggaggaataatcagagtttgactggggtgatattttagctttgtttgaattgatattttcaaattttattaaatttaatgaatttttgttttctctaattactaaaatgactaaatttcaagttgatacaagctcagaaaagaaattggattgcagttgattcttttgagttctggcgcaagctctggaatttgaaggtactaccgaaagctctcaatttgggatggcagactacttcaaattgtttgtctaccttgactcaattaagtggttagaaggccccagttcaaatcatgggtccagattgtcaaaaaggtgagaatactatttttcatgcacttatttcctgttcaatcgctgctcaatgtttgtagaggcttttagctagggttaggccaatgctgatttttgcagttggtttgattaatttttacaaaggtctagtatagacaagtgtgaggaggttgttatgttgtgctagggttagaaggctcgaaacaagttagtttggaaccaattacatgttcacttggagggaatgtgaatgttatggtattgattctcatacaattgtttactaaattttggaaagggagaaa

SEQ ID NO: 240074 - DNA, 2062 bp, Cannabis indica
aacctctcctttagctacaatttttctaataagtaaaaatttatagtctatatgtttagaaacttttcatgtagcataggattttaaatcaagtggagtgcactttgattagcacagtatatggttatgttgttggagtttaagccaagttctgctgtcaaacctttcaaccagaatgcttctttgaaggcttcagcagctgccatgtactctgcttctgttgttgaaagagcaactaccttttgtaggtttgagtttccagatgactgctccaaccaaaacagtgaacaccagtctagttagagatcttcgttgtgtgtatgctggcagcatagtcactgtcaccatactcctacaacttcttcagcagtttctatttggttgttgtagaatattcccatgtttagtgtgcctttaatatacctaagtatctatttaaccgctgtccattgagcatttcctgggttagccataaatctgctcactacacttagagcatgagccaggtttggtctggtacaaactatggcatacatcaagctcccaacaatgctgatgtataatactttctccatgagcttcttttcagcattagtttggggattctgagattgagagagcttgaagtgaggagccaggggtgtagatactacctttgagttgtccatcccaaacttttcaagtattttcttcaagtagtcagtttgtgataacttgatcattctattctggctttgatcaatttctatccccaagattttcttagccttgccaagatctttcatatcaaattcctcactgagcttgcccttgatcttcttgatctcactcttttcttttccaagaatcagtatgtcatcaacatatagaagcaaatatacatgttgattcatatacacacagggatcatactgacttttagtgaaaccaatgttagtgataaagctgtcaaacctgatatttcattgccttggtgcctattttgagccatacagggacctttcaagcaagcatacttggtctggatctccatgttcatatccttgtggttgttccatataggtttcttaatctaattctctatgaagaaatgttgtcttcacatctatttggtctaccttaaagttgtctttggctgctttggcaagcatgactctagtagatgtttgtttgacaacagggtaaaaaatctcataaacaatagaagctaaacaacagaaaatggaagaaaaaaacagaatagaatagaataaatttcatgcaactcctccaatcaactaccagagggcagctcctcgaatcaactcacattgtctccttgtaaattataacaacaacataaaatagtgtttgaaatttaatcaaccccagccattccatctctgtgaaaactccatatcgattcccaattaaagcttgtaagtgtttcatatttatagtatataaatatatatttatataggtcctatattgatgtacaacatgaatcccatgaggattatttacactatctacataaatcaaaccaaagtaattaaataaatattactaagaaacactaacaaaaatattcaaacaccattttgcttgattgatgaaaattacactcccaaccttgagcactataaaaagaatgagaaaccttctattatattagaaaatgaacattgaatgcaggacattgaaactatgaaattagcatgtacacatctctctcatcaagcttgagtgttaatctgaaaaacagagttaccaaatctacaaataaccaagaaaacattaataagcagagaaacatatatatttattcaagcatataatgtaaaaaaaaatgaaaagttactaaattttttgaataattaaatgtgaaatgaaagaagccaaataatttattttttaatggaagttatgagaatgaaaagtcattaaatttttttaagtgaataatactcaaaattaacaaaaatctaaataatgtaaaaaattgagagaatagaaaaatggaaggaaagctcatacaagatgccatatcacctaccttaacaacacaattatataaata

SEQ ID NO: 240075 - DNA, 1902 bp, Cannabis indica
agctcaaggtttatcaaactaatgtttctatttattatattcccattctatatatattgaggtcagcactaagtttgtaagtttttggctttattctgaatcagcccccgtcaccaaatttttgctatttctatgcatgtccatgtgagtgagtgcctaaccacaagtaaactacataatttcatttacaatatactttacaattttgaatgtgtttagtatgtaatatgtacattctgttaaaaataattcaacataaaacaacataaccaaacattaacactaccatattatcctatttaaagcatcgaatacaatatataataaaaattttactttataataatcacaatgattatcgaacttctccttctactcatgcccattccttcaatctacacatcaaaagaaaagaaaaataaatgtgcaaggggtttctatgaacacaactcttctatattctttacctatcttaaccacacacatttaatacttattaccaaataaaagagcacatcccttttaatgaagaattatgggtcaatgggcctacatgctcaatgtgagtattaattgtcttggctctatgggctgaccaaagacgttttagagcgtgttcataggccccgagcgtattaataagttatgtccatcccattatggcccgatgataataccatgtattaccgattatataattatcattatatattaatactgacactaaatgagcaacacttaattatgttggtccacataaaatattctaatattctcacactaagactacataattacacatatatgtgctctcactatacaatagtgtcaacaaacaaaaatctcaagaaacactaatgtctataaaactaattatgcatcatattgtatcgatatgatataaatataatacataataaaacatctcatcgaattcataaaaacaggatgataactactgatatgaatccactcaaacatagcacatagactaagccattggctcgcatcgacaagtgtgcatgcacaacatcaaagagttattcagaatatgcatgtatttaacaaccaataacaattcttaacttgtctatcacacatgaaaataatgactcccattgataaaatacatctttggatcccaacaatccaaacaagaaatgacttcttagtacatacgttaaggtaagttgtgttagtgtagtcattaacatgttgtttataagtgtgtgttatgatactattagaggattccacaattttcttactacatatggaacgtcatcactatttatgaagtaataatactcctcaagtttcgagagaaagatataattgcgatgtttatcacaaaagttcagtaagatcacaatagattcaactactcttaacactgaaaatgaaaatatcgcaattgtaatgtgttaacgcatatttcgttaacaaaaactttagccttttgtaataaatgaactacagaaattagttatgataataaataaacaacatgaagtttttaacgtgattttgaagttaattcttcatagttcacgagtccatcttattaggaaaagtatttgagttacataatacaataatattaatgataataatatttgactttttctctttagatttttccgtcccttttaccttgagttctgtccctattgatagatatgtagagtgacagttattctttagagatttattcattcataattgctcatgaaatgtagacattcctcacgttttattattggacatatgagataatattaaataaatgtttaactactcttttgacattattcataaacaattatgctgactatactagatgtttctcgctaagtatgcattatctttctttaccgtctttgtaggaaaactgctaagtat

SEQ ID NO: 240076 - DNA, 1135 bp, Cannabis indica
tttatttatttatttatttgcaaggttaacatgtatatatttcaatgtttgctaattattcccctttatgacaactttatacaggttattaattgatatatcaatatagaaatataaaattccgattaaccttattgctttcttcaatccaaagatacaacaaatatcatcaccatgttttaaatgaagctgttcactgccacttgatcataaaggataaaacatagttttctttatacttaatatatataattgtaatataaacttcagctgaaggcacatatatataaatatcatgatcccaattaataactataattatatataataatgagaacaactcattattaaagtgtatatgttgttagttaaagtatatatatttgataattaattaatattcaaatttagtactcgatctaatattatatattcatattctatttatatgttgaagtagatgcctatatataatgagtaatgactaatcatatataaattaattatatattatcataatatatattatttattaaactgtgttgtatattgcttactctcgacagactttgaagatttgtgtttcacgttatgctcatcgctcagctcagaaagacaacaaccgtttatttattcatattcaatttaataaaccaacgttttattatcctaataatatattattcgatttaaattaatgcccctttatattattaatcaaaataccgagaaggaaaatgcaatttgttttgttgcttaaaaatattggtttatgtcgattttcactcttttaaatgacttataaagtcaaatatatattaaacttgcaattaatgtagcaattgaaataagactgattaatattatgtaaatgacgtggtacacgtacctgaacataatcaaatacgtaggatataatagtaccattcaatggtagatactatatactatatatagtgctttttagaaaaaataaataaatatatagtaaaaatgattgtatatatacattgattattaaactgatggtagtaattaattatagaaaataaaatcattaaattataaaagattatggatgtacacgcagggctcctgagttgaaatggaccataaacaaaaaaaaaaaaattta

SEQ ID NO: 240077 - DNA, 2190 bp, Cannabis indica
ggcataaaacccaacaaaaggtttatctaaatcaggccagatgtgatcttgctgtccacgaaccttactctcttgaagaggctctcaaacatgaagggtggaaccgagccatgggagatgaagttatcgctttaaaaagaaacaatacctgggttttgtttcatcctagtgaagcagattttattgttcgttgtaagtgggtgcacaagataaaatacaacttagatgggagctttcaacgactcaaagctacacttgtagcgaaaggttttcatcaacgtccaggagttgattttagcgagacatttagtcccgttattaaagatgcaactgttcgcatagtactgactctagctgctgcctactcatgggagattcgacaagttgatataaataatgccttcttgaatggcacacttgaggaagatgtgtacatggcacaaccaccgggatttgaagatgcttctaaaccagattatgtgtgcaagttaaagaaagctatctatggtcttcgacaagcaccgagatcgtggtatgacaaactcaagaaaacacttctcaattggaatttcacaaactcgaaagctgattcgtctctatttatgctgcaacatccgaaatatatactcatggtgctcatttatgttgatgatatcatagtgactggaagtgacagccatgagatcaaagtgttcattaataaactgaatgagactttcagcttgaaggacttaggatctctaagttattttcttgggatagaagtgtttcgtgacaacactggaatatacttgtctcaaggaaagtatatttcagagttacttcaaagatacaatatgatgaattcaaagccgagtcctactcccatgtacagcaggaaagcccctttctctcacagatggtgttcctcttgaaaatccaactaactacagaagcataatcggagcattacaatacttgagtcacacaagacccgacatatcttttccgtcaacagtgagccaattcctaaagatcccactacggcacacctaagtgcaacaaaaagagttatgagatatctgaaaggaactattcatcatggaatacacatctcaccaagtgatcatctgaatcttgttggtttctccgatgccgattgggcttgctgcactgatgacaagagatcagtgggaggatactgtgtgttctttggtgaatcacttgtgtcgtggtcctctaagaagcagtcggttgttgcaaggtctagtacggaatctgagtacaggtcccttgctcaactagctgctgaattaacatggttgcaggaattactccaagaaatgagatttaagatggcagcaagacctgtaatatggtgcgataacatgagtgctagtgccttggtgcctaatcctgtctaccacgccagaaccaagcacattgaacttgatgttcactttgtgagagataaggtcttgcaaaaacaacttgaagtcagatttgttccttctcatgaccagatagcagattgtttgaccaaaggcctctcacacaccagatttcaatttcttgtaggcaagctgggactgatggaatcacccctacgcttgaggggtggtgtgaagaaaccatgaaaatcctggagggcaaatctgtttttgtgttctttccattctaatatcaacttagctgtaccaacctaattgccacgtttattttctctgcataattctattagcatactttttattccttttgtaacaaacctgtatgtggcagccatctattggcttatcttgattctgtaatcattggctttgctctataaatggaaaatacagagtactcggctaattgagctgagatttcaatttattacttccctaaaatttctctctagcattcctcagcattcctctacaatatctacaaaatatctttaagaaaaatatattctttcttatttttattgtttaaatgggacaaaggttaaataatttgcaacaccacaaaaaaattattatataaatatagagattgtatattattttattaaataaagcaactaaatatattaattttcgtagtttaattattggttaggttattgattaataagttaatttcctacaatgttctagctatagctaggaagctatatgattatatgatgcatattttaatgtctcgggagggatcataaaggag

SEQ ID NO: 240078 - DNA, 1393 bp, Cannabis indica
tttaaatttcattccattttatttctgttggataagttgctgcaaaaaataaaaagtaacgaaattactaaataaaaatttagattgagtcgcggattaagtcgttctctttaagacgtttgtagcactactcaaaaattgtgcaagcaaaatatcagcctcgtcgttcccagaataaaacaacccagtcaagccactatatcaggcctctattacacgataaagaaccgtcgaaatagtaccacacccaaaactctactgcatactcagaatactttgaccaccagcccattcaacttgttcactagtaagtttagtaagaatgcagtcatgatccatagacacttcatcacttttcacatctgttagcagtttcaaggctttggcaatttcatcttcagtgaatgaaaaccaatggccacgagcatagactttaccaaagaacttagattttttgtcaagcaaatcatcaattaaattagcataaaattccttagctatgtcatcaatataaccttcaaaggcagttaaagtgtcctcctaatttcgatattgaatatacttcacaatgccataaactctatgagcacgtaaatcaaaatttctctcatttttaaacttacgggtagcatataaattccaatcatgttgattgtcattataaaaaatctaaaatttacaacttcagaggaagagaggttaccagaaaaagagctcttcataggttgttttccctttgttgctgctaatgctttgactgcagaagcagatcgagaagttactgctgcagattttggcaaagatggttcaagatcctgatcaacaaaatcttcctcatttttaactgggacttcttcactttcagaagagacaccatcatcttctacagaaattgctttgtcaaatgaaaaagactcagttttggaatcggattccttagaagacacttccatggaatcttcttcttcatcattactcgaggaggccgagggagaattaagcttgagctttttagcaacaggaataggcatgtcatgacgccttttggtcgtgctttcttttcaagagaagcttcctggccactggtccgagatgaaggaccttttagggttgtgctgcaaaagcatcactagttacaccaagtggtgactgagaatcatgagaaggagagccctcagcaagtggtgaatagagacattgagtggctctagaggtgaatttggagttgtagaagttgttcttctttgattcgagtattggatcaataacccttaggatttgaagaagttaatggatgtttgatgcaagattttcacttcattgttggaccagtccaatttatttgatactcattatatagtcacgatccttcaaatgacagcctctgaaagtc

SEQ ID NO: 240079 - DNA, 1272 bp, Cannabis indica
tataatcacaattacctttctctgttaggagaatagcccaaaaatctacaaggttgagacttgaaatccaacttgtgagaattatatggcctcaagtgaggatattgaatacaaccaaaaagcttcaaagatgaatagtctagttgttttccaaacaagcattagtatggattaatattgtcaagaatcctagttagaaatctgtttatggagtacactccacattgaaaggcatggcactaataagataagtacaaaccagaatgtgcaagaagtgttaaaaaaagtttatgttatgtacttatattttcttttggtccttccattttgctcatgagagtgagggcaaggatgttggaactgaataccttgagcctgcagaaaaggagtaaacactctatactctcctcccagtcagattgtacagttttgataggtaaagaaaattatttctcaactaggcacttgaattttaagagcacagaataggattcagacttgaggtgtaaaggaaaaatccaagtgaacctactaaagtcatctataaaatgaatgtagttcctaaagcaacatattgaggggggagagggtccccacacatctatgtgaagaagttgtaagggctgagtaacttgactggttgagagtggaaaatgttgttaatagcttttccctaagcatcaaaaaaatttaattgctttatagaacatggaataggtagggatgagggtgttttctgaagagtttgaggtaatggatgtccaagtttaacatgccaaatatttatatgagtactagtagcagagaataacacttgaggatttataatagcaaaattagaatctttatttattgatgagtgattacaattacatttatttgcacttgtttgagaaacaatgtgattatgttggaaaaactttaatcagaatcttaatttattattcatgtatgttgaattagaactataatctaacatcctaacatagaaaattctaaaacaataaagaaacacataaagggatatggaaatccttacattgggtacaatagaatattatgtctccttccatttaaatctttaactcttgattcctgtctttagcagagtatactcaagatctgaacttggatcttctcctctttcgattctgctcatcacagtcttccacaaaagcttgagtatcaacttgaataatatgggttgatagtaaaatcacctttgaaaaaaatagagattgagaattagtagtgaatttcaaaaactacaaa

SEQ ID NO: 240080 - DNA, 1682 bp, Cannabis indica
tatttagtgggtttaattaattagttaagaaattcgtagtttagaaaaatttacaggtttaaaaactgttttagcaaaacaatcatatctagttgtataactccgatttaggtaatttaagtggcgtttaaaagatatttcaaagatttataaattttgtagaaatagctatatcataatttaaaaaatttctaagtcaaaactaagtcctaaagttacaaaatagagagtttacaattcattaaattttaaaattaggcattgatttatttataaatttatcatattattattattattcagtatatatatgttttattctcactcacaaacaaactgctcattcttaaagtcatcttcaacctcactagctattatactttttgccaaatctatgacactccttgctctcataatcaatcaccattatctaatgtctcttgatctaagaagcttgaaatttttgagggagtagtgatatgataacaaaaactttaggatttgaggtaagaaagtaggtagatttgtatgtgtttatttacataaatttgaatttattgtgtattagaatataatttacaatttattattataaatgcgtatataatacaataatactgagagtaagattttaaaaacaatatgaattaagtgaatcgatatatatattgtagttgttatgatttgcatatgtttaatgttgtatgctaacgtatcaggtaaagtgaaagatcatggtggggtatgatatgaagtaaggtcgttaaatgtagagataccctatcctgtatttttctaagtcgtgtatgagattgtaataattgggtatgatacatcgattttgttgttaaatgaagagataccctatcctattacaatggtaggactgcatatgcccaacttatcatatgagaaagttaggcccaagatattgtagggtcaaattagtttaggttatacatgtaatgtaatggctataacatgccaatattatagtaatgacgttattatttaatggtattaattatatggttatgttatgagtatgatattggagttatgatatctatgtgtatggtgtgatcagttagtatgaacttatatggtaaatatttctatgtgtacaattgtttggttatgcttataaaataaggtgtatgatattgctaaaatttaattagtatattaatggtatgtgtgatattgtatggtattatatgataaatatttttttactaagattttagctcaccccttacttttcctccacaagtattagagaaagtgttagtacgtatatatagtaagcaggacgaattctaattagtatactgtaagcgtctacgaacgggcaaattaatgatctatttagtcagtggtgccatagttttattcaagcagttgataattctaaacataatggacacgtattatttaaaatcatttacttatcatattttattttataaataaaggatttttttcctgatgtattttgattttttaatgaaaaatttagttttattaatcattaaaatctgttaccaaacaatgtaacaaattgggtggaacagtctccaaaccaaaacaacaaccagggtataaatgagaagcttttgcgaaattatgagctactacatttgctgatcgtttaatataaaaaaaaatattaacattatcca

SEQ ID NO: 240081 - DNA, 1466 bp, Cannabis indica
aatgagaacatatatgagaatgggaaaatagtccttaagtaatggcaaagatttaatgatcacaaggtttttggggaagtattgaaagactttgccattcaagaaggttttgagctacgtaaagtgaagcatgcttctagtagaatcaccttaatttgtaagctgaaggatgcaaatggcgaatccatgcttccttattaccagatgaaagagagtttataatcaaaatctacaatgcaatgagggtgtaccatttattctcatggtcctaacgaacctgagcttgccaaggcaatgagggtcagggaggccataagttggatcaaggaacatcgatggcaataggtaaccgtggagacgaattgtttaattagtttgtagtgcaagcattctattcctagctatgatttctttatatagatatattattcaaaattgtgaaactctgcttgctgagttaaatgctaatatataatagctaataattttgttagagtttcaattgttcgttgtttcaatttagaataatattacttattttgtaattgagattaatggtttataaagttgatttttctattaaaaaaaaccattaagacagtaccaatcaactagttcaccaattcaacaaagtcaactatgtgaagaagataaagcaattcaatcgactacacatgttgtttcttattagaagctttaaatttgtagttccatgtttgtaactttgtcataattgctttaaaagttaagatgttaatttatcctgataaattaatgttattaatttctatttgttttttcaactccaacctattttataagacgataaattctttcccatattctaaataattttatttctcctctcaaagatttcagtcaccaaattagtaacattggaagagatacaatcttgcctatattttgcttctttgcagcgtcaccaacaaatttctctaaatttatatcaattttttaaaatatttaatgattataattaatgactgtaaccttatactaaacctaatcattttatttaaaatattttctttcctttatctcctttcactaattagtttctagaaactattattaactaagataatagatttaggtttatttactttttcattcttttcgttttttttttaaattgaggaaattatatattaacaaaatattgagcagccaatgccacaatgactatggcagtccttattttccttaatgaaaagaagtattttatttattgtaattaagagtagtctttaaattatataatgcttaattttattatatattttaataataatgataattaatttttttttttttgaattaacatcagtcaatatttgagttagcaaagtaacagaacaccaattggtaattgtttttgaagaagtacagtaatatatattatattatatagagaaaaagaagtcatgaatctttcataaaaatat

SEQ ID NO: 240082 - DNA, 1022 bp, Cannabis indica
ttttttattttataaatctctcttcgtttttttttttacaaatccgcaagtaaatacaaaaattaattacttcgatagaaattttttcaaataatgataatacaaaaattttgtgaaaacatatttcaaacaagaacatgtatgtgatgtgtgggagtaattgaggatcaaagaaaaatctcgcgtaagttctacgaaaagtgagaataatgataatatttatgaaaaggtacgtacttcatcacttgcaaaaaactatctaggaatgaattcttttttttatttatttatttttgaattgctatctaggaatctttaaggacttagtctctatcccttctcacttttacatttaatgtttaaaatatatctttataatatgtttactgaatattcttatgtgcactatatatgatccacgattgagaattatatatatagccacttgagacacacttgactcattacaataccttaaaactgggcctttttttctcaaagctaaactttacaaatgagactgaaactatagctatttataaaatttgtagtatagtacaagacaagtcccaaaacttaacaatcttggatttaactgatgaaaaaacaacacaaaaacttatttatttgatgtagaatccaattattcacttcataactcagaagaatcatgtggtttaatctgaaaattaattagtaataaatggattactaaattatatttttataaacgatttaataattttttatttaatcaatgtaagataatattgtctaaaaacccctccatggtagttatttttttgtttatcaatcttgaattatcacatcacaagttattattgttagaaattttttattctaacaattattgtggtatgaactttaatggaaaatcttacttatataaatgtaaggtctcagtttccgagctcactacttattatgtaaaatcaaggccggccttgagcataggcggactaggcctatgcctaaggcccacctagattaggggcccaaaa

SEQ ID NO: 240083 - DNA, 1235 bp, Cannabis indica
atacaagcaatgtacaacagcatgaaccggaaaaagaaaaaaaaaattcccacaatcttctactaaacccaatgactaacaatgtgtaactgccccaattaattaaaagatcatgctctcagtcttatcacccaatttaacaatattttcaacatagaaaaatgcctgccttttagctaaccacgtatagaactcagctaattgagagagcaactaacatatcgatatggcaacccacttcaggaagctaatgcatttgggtattccacattagctataatttgaacaccgttggaattataaaagttgtaatgagaggtccactactaccctcaagctggtatttaacagtaagaaaataagttgaaaaatgaagaatttcttttttaattcaaatttcaaatgatatgtcaaaatcaaactaataaacatagcccatcaaacaaacccaccaactaaactaacgtgaaccttgatatgtaacttgagttcctacattcccaaaatgaatacaaatttaaactcaatcaacctagattgagcagcacaaattaaatataggacattttcttaacttactttttcggtcaaaatgttacatccacaggtcgtttagttgccttaaaattcaaacttcttttagattaaattgccaaagagcgtaaagagtctacaaaacaaaaatagaagtataaataaaaaaactctgactcacatttctaatgctttctcgggaatcaaacaggtcgtgaaattacaataattaacaatacacaaataattcaagagagagtgaaagagtgggggagtgttatgaggagtgacagacaaattgaggcaaagaaaggttttcgtacaaattctgtgtgcttttttaaaacaacaaaatgtaataaaactcaaacagatatgataaataatattgtacgagctctttcttctcttttctattcagtgtacatcctctacgtgtacctctacttttagtttaatacgtaagatgcatccaacaagtatactgctactagttgacatgcactaaacagatgcagaagattgttaccaacaaacattcaaacactccactttataaaagagtaaactatagctaaatagctatattagcatagataaatgagatattataccagttagcaaaacttagtaatgttgaacaactgggataaattttttaaagcaattaaattccgataacttttttctttttcttttgt

SEQ ID NO: 240084 - DNA, 2904 bp, Cannabis indica
caaaggtattttaattgtgatgaagaatagaacctaggttcaaagaattatatgcttcattaaaatattgactggattagtctatctccataaatctttaagctttatctaagttaaataaattgcatgcttcgtagatttactgtttaggtaaaagagttaattattgagtgtttcgccttgattacatgtaataaggagattgggataaggagattgggataatttaactgcttcaacttaatctgtgaaattaatagtttgattgaaaaagtaattaaatttacattcattaataggagttaagaatgaatgttgagggtggagaataacatttaactacttatctcatatcatagtatcatattttattcgtttttatttttgttattttaatctcatcatcaaaacccctattttgtaattctaatttttgaataattgaataaacatagtccttagtggatcgacccttaattacatttatactaaaataattgaatgtagtggaatcaaaataatagtaaatttgatacagcatatgacacacatcactctctcatacccggaagggtctaaagagaaagctggcttggtatgtgtttagataggcgatagtcggagcacctaaagcggatgtcaacttttactgggtatgacagatatcaactttttccacatgccagatcaccaaagtgacgggtaagctttccctgacataattagatcttgtgtcctacatctgagcatggtagtgcgtgcaccacaaccatccttttacctgacgaatactactgacttctttttgtaaaggaacaaactttgagtgacacatgcccctttcttttaaaggttaaacatttgggttactcgtgtttaagtagtacaaaatggtctccattatctagctactacacacacgggcataatgctacccacgtgaccatccagacagctctactttgcatgtaatttaccctaatagtgggatttaagtagatatcttaggcgagtcatgaatttgtccatacctgccacagcctttaaataccccttttattctcatgtaaaggggcaagacgaaaacacatagctaaactctgctaagattacccttgatcttcttcttcttcaaaaagaaattaagggtaaagagttagggtttcctacaaaatactatagacatatcgatatcacctttaaaggctaataaactgactcgtggactaaagtttattaaaacctgaactacgtaaaaatcttcctcttgtaatttctgcaaattatgatttctttagctcattgatatctagttttcaaaaatcacggtaaacaattacaataaaaaaaaatatttaattaggtaggtttcttttcttcttcattactacgaatctatctcatgaatttatattaattgtcgtgctttgcaagcttaaggatatataagatatatctcaaaagatatctaacacgtgacctatggtcggtatatgtaaactgctttcatgatgaagttaattggatgttcttgtatactttgttaccagaagaatcttcggcatgggtcgcaaaatctgacccacgtgttacctaaataaatttcacgtcaccttatatggaaatttgaatgacatattttttttattatttatatatatatatttatatttaataaatacgctatttttataataatagatgcaaggcattggctccctaaccagtttatagaaatatttataagctttgttggagctttaacttttatgatattctataataaagaaaaaaaaaagccttttttatggtataacgaccgcttgggattccaaagatctccaaaataaacatgatatgatagtggaattgacggcccacctaaaggctaaaaaagaagaaatctatattcaccttgattttatttatttattaattaaaaagatattttgcgtataatgaaaatttagatagatatgggtatggagcccacacggctaaacaaaagttggtctccatgatgattttggacattgggtttcacccgacaggtaatagccgttaggaacccacaaatggcgacttagaccactacttcccgtgttatgaattaataactttgtacgtaccatttgagaataaaattttaaaaaaattcctaagtactacttatttcttaatctatttatattatagggagttaaataaaattgatgtgattcagtaataaatagaatagaaattcactattattgtatccatcgatcttattaatatttgataaggaatatatgtattaagaatattccttatatacatatcattcgtccatttttaatttataccattcatgtgtttgtatgtttctaatactctcttttaacccaatgtacattatagtgaagaaaaattagacattaaaatctataaaaaatctcatcatataaatttaaaataattattatcaccatatctcatttttagttacctttaaatttaaagttaatatcatcaccgtatctcacctaatattcttctcaatagataaatacttatttttattatgtaaagagaaagggggtgataaaaaataatcaagtttaggattttgatatttttcgcattttaactaataatttttttttgtataaattatattagttaatattaattgtatatctttcctgaaaaaattatatatgtagatagttttttttaatacatatttattacttattatattacagtggtatagttttattttttattttttttaatttgatttagtgatctttaattaaataaagtcataattaaaaaaatagaaaaatgagagaatttaaaatagataaaaaaattagaaaaatgagagaattaaagagagaatagatatttagaaatttt

SEQ ID NO: 240085 - DNA, 1028 bp, Cannabis indica
tcagaggcagtgaagctccctaatacatctacagctctatgaattatattttcaagtgtatcactttctagcccacactcctcgaacctctttccaaaggcagtcctaagagtcacacttgccatgagactatacatcatttcactaagatttacaggactatctgaactgtctttgagagaacaaatcagagaatccatttcttcatctctaacaaacttaaaggattcaacacttttaatgctaaatagcttaagaacacaaatttttcgaacctgtctccagtgctcaccataaggtgagaaagatatgtcatggttgttataagaaagtcttgccacaccagctaaggctggtctgctgcaacactccaagtcatgaactttcaaaacatcttttgcagcctctgctgaagagaccactatggtttgtagtcttccgaatcggaggagcataacatcaccatatgttttggagagtttccatagagattggtggggtgtggaaccaagttggagtatgttgcctacgataggaagctttgaagggcttggaggaagttgtgatgatgtgttgtattgttttgctttaagctttttttggattagaaagagcagaggaagaagaaaagtaagaagaaggaaccacatggtgtaagagaattaaggatgttatgagaccaccccctctctaaaaactatatctagctaaataagaggtgcgtattaatctctagatttatttttgaataataatatgtaatgattatctctatagaaataatgttatatattgtatttgtagcttttgttggcaagtcaaatcagagatgtttagaagtgttaagttatagagtaattgtttattgtcttgctatactaagaatatcaactaaactaatatatggaatttctatggtaatcacaagtgaacacatgcgtataattttgtttttgacaatacatataaagtcacaatcatattggatattgattacctcgtatactaattttaactttttttttttt

SEQ ID NO: 240086 - DNA, 1567 bp, Cannabis indica
caccatttaattttcaaaaacataaaatattttttaaatcctaaaccaatcacacctgcactcctaaaaataggtgtattaatgcaccactttcttgttttcaatatgcacttatagttttaatattaaatgtttatataatagtatatatcaacatccttcaaattttttaaaaatttaataatttaacgtaccaaaaataagatttaatagatttgttgcacatgtattttttttattttgtacaggaaatagactatttaaactttattttatgcattacaaattattttaaatttcttaaagatattttaaataataataatattcacaatcatgtatatataaataatgaaaaaaaaaacattgagataaataataataataataataataataataatttaggatgttctaagggcaactataatacttaaatttatatatagtgtcaagtaccctgtgtgtgtttccctttctggtacccgaaatgggtttttggtccacccaccggagttgtgtggtggtttctggtgccccgagctcctaatcaaatactatcatcattatcctcagagcattaaatgtgtcttcaatgcttttgatccaccaaatccttcttttttgttttttctttcccttctgactacattaattacttctctaatcacttagatcctcttcagcccccatttcctccctctttgctcttacgaatcctattaatctttggctatcaaattattccacttctcaaagagcccttttatcttatatttatggcggcaaggaagaaagatggccttcgtgaaggtcaaagatctcatcccatgatgagatctactcctagtgaagaggaggctctgacctgaaatcgtagaggtgctgatctgtgggcttcctggttctttctatttaaagtgcatcctaggctacaactccaggtatcttcctctttattcccctttcttatctgttttttctgaaactttttctagctatggctctgattcccaactcagctcctattcccttgtcccttactcccgatgagagtgatgtcttcactcttcctgatattcctgatgattctcaaccctccattaatcttctcctgcatctatttaccattcgtccctttaatcgtccctccctcatgaaaaccctttcgcaaatgtggacttctcagtgtcgatttcctgttgttgtttctgagcactcagagggattgtttcttgttacttttggttgtgagggtgacaagaagagaatccttgatgggcagccttggcattttgctcaaagcctgactatttttgcatctccagatcactcttttcctattacttctgaccttctgcattatatcccttttctgggttcaagtgtatggcatcccatttcgctgcaagtcttatgatcttgccaagcttatagcttcaggtttgggagaccttatccaatacgatgaagatactattaaggaaggcactgggccttatctaaggggtagatttcttttggatgttaataaaccaattaggaggggtattaacattcgtttcct

SEQ ID NO: 240087 - DNA, 1925 bp, Cannabis indica
tgaacaaaaatttgcctcacaaacacgagccatctactgttccatcacccactgttatgacagataaccccactgtcatagcagaacaaactttacctagcctcacccaaaccaatgtctctcctttaccatccactattgtctcagaaaacactgttactcccaggactcatccaatgattacacggtccaagaatggcattgttaaaccaaaagcatacttggcaacaaagcatcatttacccaaatcattattaccatctgaacccaaatctctacaggctgccctaaaagatccaagagggttcagttctatgcaaactgagtttcatgctcttaaaaaagccggcacatggacattggtcccaagaaaaccaagtatgcacattatagacaacaagtgggcatacagaatcaagttgaatgctgatggttcattggatagattcaaatccagattagttgcaaaagggtatctgtaagctccaggaatcgactatgaggagaccctttctcctgttgtcaagccagtaacagttcgaactgtgttatcattagcagtgacttcaaactggggtgtgactcaactagatgttagcaatgccttcctcaatagattgctaaatgagactgtttttatgaatcaaccacaagggttcgttgaccaagataaaccggatcatgtctgccttcttcacaaggctctttatggcctcaaacaagatcctagagcttggaatgacacactgcgaatcagtttacttcagaagggattcaaagcttctaaatctgacacatctctatttgttcatggatcaggttcaaatctcatcatttttcttgtctatgttgatgatatcttggtaaaaggaccaaatcaacaactcatctccaagttaatcagtgatcttaatactgaattctctctcaaaaatcttggtgatgttcactattttctcggggtagagattttcagagattcaaagggaatgttcttgtctcaaactaagtatattactgctctgttggtaaaattacatatggaaggagctaagacctattctaatcccatcagtaacacaacaaaactgtccttaaatgatggtgagttgtttgatgaccctactctgtataggagcactattggtgctcttcagtatctcacgttaacaaggcttgatgtagcctttgtcattaataaattaagccaatttttgaaggctcctatagtatctcactgggaggcttgcaaaaggttgctgagatacctgaaaggcaccatttcggattttatttctcaaaccagcagcaactatgactcttgaaagctactcagatgctgactgggctagctgtgtggatgatcgtaagtcaacttgtggctaagtggtttatttgggaggcaatctaataagttggtcaggtaagaaacaaaatgtggttgcacggtcaagtacagagagtgagttccgtgccttagctaacactgcagcagaattgaaatggattgtttcattgctcactgaattacaagtctcattgcatgcttgtcctgttatttgggtggataatcagagtgcctctgcattggcagctaatccagtttttcatgcccgatcaaagcacatcgagatagacttacactttgttcgtgatcaaattctggataaacaactctcagtcagatatgtttccagccatgatcaagtggctgatatgctcactaaacctttgtgtaaggatcgttttatgtacctcaaattcaaactgaaaatggcttccaccccttttcgtttgaggggtgatgttaacattgttcactaatcatagttagtttactgttactatggttaggtgttagttaatctattaaggtcgttactagtcagttgtattgtttttcctttttgttattttctctctgt

SEQ ID NO: 240088 - DNA, 1480 bp, Cannabis indica
gagcattgcaatttggtatcttaaatgctcaataccacacccacgtggcatcttataattggttaacggtatacaccaataacggtgtgtcatgtcttgtggtattggcaccccttagctattaagtaagggtttggaaatgaactccatttaataatacttatcattttggttatttattagttacttgttgactacgtactcgtatgattataaattaaaaaaacatgtgattttaaatttatactattttagaccttatattttgatcaattactgttatgcaataaaacaaattctgttattttggttgttgttaggggttcattaggttcaagttagtttttctgttatgcatacttcttgtaacaagtacatatagctatacaaaggctagcttgatattcaataaagataaatttgcttaggcagttttctctttggttctactttctctctgtttttattttcttagtttttacgtcttttaaactttgccgagataagtttctacatggtatcagataacttcaatggattccacatcttttgattttgtcagccttcatgctactgctaagttcctccaccaaatgctctacttcgtaatccattctctagttctcttacatcctcactcatactcaagcttgatcgtgtgaattttcttacatggaaaccacaagtggttctcaccgttatctctcgtgatcttgatcgatgagatcttgttcaatggtgttcctctacctaagaatgttttcaccagtgaaattaattttgcatatactcaatggcgcaaatgtgatcaactagttctctcttgactgagatcttccatgatggaaggtgttgtggcatctcttgtgaatcatcatatacctacataaaaaaaaaaaataaaataatatattattaaacaattatacatatcatattaataaaattatatacaactataaaataactatactatacttattaaattatataccacctttatatataataaaatataaactaaacatgatctaaaataaaatgatatattgtacaataaaacttatatattatataacaaaaaacatacatcttacaaagttacaataaaaatatataaatgcacataataacaacaaataaaaataaaaatatatatagcatactaataaaattatttttcagtcaacaaaagtacaataaaatataaaacttaaatattattttaaaaaaataatatactgtataataaaaaatatatatatattgttgctcctaaaatcgcccaatatacgtggaccagtcaggaagggacacgtggatcaaattacttgagaagaactattaagtctttaaatgacaccaggaagcgttattcgcatgggtcccggaagatacacccggaatacaaggtactcccagaagcgaacatagctcaaaggcactccgggatgtgtcaggtctctcccgagacatcaag

SEQ ID NO: 240089 - DNA, 2168 bp, Cannabis indica
ttttaaaaaaaaataagatatttaatcattatttattttattataactactttatttaaaataggctaattaagatttttgtctcctgaactttgacaagtactaaatcatacccctgaactttttaaggtcgttaaaaataccccatgaactattgagattgttagatttaaggacttttgtctaatttcattcaattttactatttcagtgattgtttatgtactaaaccacgctccccagactttgataccaaatcatgtctctcgaattttgacatgtactaaattatgacctctgaacttttatccatattaaacttttttactaaaattgaaagaaaaagtccttattatattaaaaccactaatgaaggaatggaggaaaggctaagaaacatagagaaatggaaaaggtaatggatgatgtgaatatgcatcgggaaacatagttcaattaactacctctcatttcttaatgagatgggtccaattcaaaacaaacaaaacaaacatgaatgaatgaatgaatgaatgcatgtatggctctcataatatactcttgtcttgtccttatccatccaactcactcaacctcctcaatcataatcacatttctctccactccaatttctcaactcatttcatttggtcaaatttgatgtttcttttttctttaaaaaaggaaagaaaaataaaattaatttgactaatcaaggattaagaggattcatgttcttccttcctagtcgccacgctcacctacattgactttgaccacttgtcaaagttgagagaagagtaacagaatggaagcttttttgaaaaatctatacttgttatatagtattatattgttatgtttatattattttataaagtattatattgttatgtttatattattgctaaagataatattttataattagttaataatatctttaaaattccttttaaaaaaaaaaatatcttcaaaattattatttatataaaatttaatatttaattacactaataataatatgacactaaaaagaatacttgatactacattaccttttaatatttcttcatattattaatagatgtccaaatcattaaattaattatcaacataattaattatattttcttttgttatattacttgagtttcctattcctttagttttatttttgtataaataaaaattcaacccattgaaataaacgagtttttataatatgttatcgagttttgtctaagataaatatttttttttggttaaagttcataaattattttgaggccacgatgtactacatatatacatactcatctcactgaaataatttcaagaataattttgctttttcttctttgttacctatacattatatattgttagaaagtcttacattgctaatgtgtagaaagattatagaatatataagaggaacaggttactccttctattgacaattgattttgagatggaacattcactttattccaaattctaacatatataaaattgttttgtacatttatattttcaagattttttagaataatacaattaattgtatgtatatacttacacaataattaatgtgtgccattaaaagccatcactatctatggttaaaacaatatcatcctattatagagacaaaacaagtatttttatcatagaaattataatcaccaccgtagaattattttattattaataaatgttcaaatcactaaattaattatattttggtttttttttttttttattatatatatacgtacatgtaaaagtttatattcatttttacggtaaataatagaataattcatgtaggaattttaagataggattttactatcttgccccctacaccaacaaacaaataaatcaaattcccaaggtcaatttcgacctttccctgtttccctgacttttcaaagtcagaggtcaatacgacctcgttttgcctttgaacaaaacctgagaagggatcgagaaccttctcattcactccctctctctctgaaaagctagaaaccctagcagagagattctcaagagaaactcgaaccctaaccctttgcaaacccagaaaatcaagcccaaacacaacacacagatcagatctacaatgatctgatctgtacacaaccacacacacaaacaag

SEQ ID NO: 240090 - DNA, 1945 bp, Cannabis indica
aacataactttatactgcaaatttaaagtactaaagctcatgactgaaatcaatacaaagtaaccaatacatgaaaataacgaaataaactaactatagaagtgaaattctcatagagtaacgtataagaatgttaccaaaagcatttttaagagtgcatgtgtgccgatgtgagcaagtgctgatttaatgcgagtatggccttcgagttcatcaacatagtgtgagacactctctccttgctcaaaagtttccaccagaacggcagggtgcacaagcggatagacaggcttagggaatgaaacatccttccattgacggaaattgtatataaagcggctcaaatgagcagcttctctagcaaggtcaacttgggacatcatgaaaactgcaaactgctgtacactttcatccagtcttaaccacttcagtgtaggaatgaaattcgaagcttttgctacaaaatttattatcataaaatctcttcgaattgagtcaccaacaccaggatgcctgaccttgacagcaactgtcatgggcttgaccttttgaccagggtagcgaaatctcaacgatgctcgatgaacctgggcaatacttccagatgccacaggtgtctcctcaaaattctcaaatatttcagatagcttgcggccaaatgctctttcgatagttttctttgtatatgcaaaactatgttcgggagcttttgtatgaagctccgcaagctggttgcataaatccctagggaaaagatcaggtcgtgtagcagcccactggccccatttgatgaatgctgggcctgctttttccaaggtacgatgaacaacctgaagccaagttttcctgaactgaactccgaaactatccgcaaatggtgccatcattatactaggtgtaaacaaaatcgatagatagagagctctaataaacaatataaacccttctaaaactgaccaaagtaatgaggtcatgtaagcacgcccatcttgtgcatgcatataaaaagaattctttgatgggtgctctacttccatgaatgatctctctgcccatgctacctgtccacaggtgaaggcaaaaataccgggaacaatgggatgagatcgagttatagctaggctgactgcttgagcaatcctatttatgggggaaatagtgcgagtattagaataacacttttgagaaagtcttttccatgcaatttgggcatgatgcgagacagcgctacttgctgaaaacacagagaaattccttgaaagactagtcttgccaaaacacttcgtgctgctatacaatgggtgtgaagtatgaactctatcagaatatctgtattgcgaatacaatttgtatctaggaatatttaacccaatggcagctgcaccattgttccctgaattcgtatagctatgcccctggcttttatgtatagaacttgcaactctcttagtatactgagaagtcaaaaatctgcattttgaaaattaaaacaatcaattaaattaaacgcatacattccttaaattcccataaacaattaaacattactctaacattaaccgacaaaaagaagaagaaaaaaaaaatatacacaatctaatccttgaagtataattatcattttatgaagctccaacacaatgcatgatcgtactttgatactccaagactctattggggagctaaaaatagaccctctatataaaaaacaatttagatttctgatatgaattagtatatgtcctagcattgaagaatgaaatcatgcacaaaaattggattgtctaagaaaaaaccgacagctgtttatacccaaacccttgacttgatatgtcttattgcaactgctacataatctttataaatctaaaaaggcagaaagactcatgcaattcaatttaaaaataaaaatgaaaaaaacggaccttgacatggctttggcact

SEQ ID NO: 240091 - DNA, 2310 bp, Cannabis indica
cctcttcaattatgtagtcccatatctacacagtctcataaacatcacacttgactttccccaggctatgtgggatttcacagcttatccagtgtttcctccttagggatcatgagactactaatagtcacaactatgctcgggaaacaaggttggcggttgttagtccatagttattcttttattagtcaaaattttcaagctcgatattatctttttggttctttcctctcggctacagttggtcataatccaagttttgtttggcgttctattatgaaatctcaaagtttgttaaaggaaggatgtcattggagtattgtcaatagtgcttcagttgatattttaaatcaaccttggttaccaagtgaggagaatccttattgcttcgactcatcctggtttggaaaccactaaggtggctcagcttatggttcgaggtgctcggattcgggatgttgaattattgtctgatctttttaaaaagcatgaaaaatttcttatttagaatattgttcttaatgattggttaggggaggaccaatgtcattgtaataagtagggtttaggtatttataacgttaagagtgcctacaattatcttcaaagtttgaatgacaagtgggatgagagaaatagttctagtttttggaggaatctttagaatttggaaatcccaccaaaggtacatcatgtgttatgaagagcttgctaaggtattttgtccacatccacgcaacttcaggggaaacatgtggatgttctgttgatgtatcaagtgtgtcataaaagaaaacgagtctatcattcatatcatggttgaatgtctatttgcttcactttgttggtagtagtttgatgtttcggttctagggacattgtatactaattttttttagatggttttctaatgttatgattgttttatcaaaagtaaaagctagttaggtagcaataatttgttggactttgtggcaagttgtaataggttagtttggcaaggaaaaagttctacagctaatgaagttgtttcatctactattgcttatcttaatcaatggaagaatgctcgaaaagataacactggtgtaggggagtctacttcttcctctgctggtagtagcgagtattgattttacctgttgagaacatgattaagatcaatgtggatgcttctgtaattaatgggatgatagctttgagattggttgggtagcggatgaccatgaaggaaatgtcattgaagctgatttaaagttgttgtctagttgtgtacaaccgattatggcagaagctgcgagagtcaaagaggttcttagctggatcaaatataataatttttctcaaattgttattgaaactgactgttaagtagttgttcatgcaattcgtcacactctccaaatatgttctctatttggcctgattatttttgattgtaaacttctacttttttttttctttaaacaatgtttctattatctttattaaacgatttgcgaataagacaatcaattatttgacttgtttgttctttttcaggtcgtcgattcaatggaaggtttgtcgcaactgatttttatgctattttattagcgaatttacatttttaattaataatacaatgaactttctgtgtaaaaaaatgaagtaaaaaattaaaagaaataaaacgttgataaaaatcaaaaacaggaagaagaataaaatgatgaaaaagtataagagtatacggtaatataaaaaaagtataagagtataccataaattttccttagactatgtttggtgggagggaggaagagtatgatgaatggagaggttagagagatggagaggattggtaatctcctttatgttatttagtattaagtaaaaggtggaaatgataatgtaaaattataaaattgtctttttgaatatgaaaaattatatttttttaagaataattattgtattttacaaattatatttttctttttctactaatcctcttaaatttagagaaattaacactatgtttagtagagggagagaaggaaggagggagagggatggagggagagggatggagggattggtaaatcctttgtttgacaagagggagagaagagggagaggagagatggaaggagagggtctccgtccaaaacgcaattatttttaatcctcttaacatgagagaattcaaaaaaaagcaaacaatttatacaaatatcattttacctaaaaaaataatatatataatgtataaaataataaaatataactatgttgtggtaaggagagagagtaggatagatagagaga

SEQ ID NO: 240092 - DNA, 1269 bp, Cannabis indica
gtccaatgtgtacatacagtggcaacactcgttaattaactaattgcttcgttcaattttgccaaatttttcatgaggatagaagcgctgaatttcttcatacttgtcatgcacaaaaatagaaatattacacaacaagcgccttactaccgatacgaactaagtccctactccgaatcaagattacaagcaatgattattggacaaaaactaaaaattaaaaacatgttgaacaacaagaagacattgacaaaggtttgagtagaaattacccaattttgtttgagattcagactcttgagtccaattatataactttgttttcgtgggtttctttcacgtaaagaatttccctttgatgcccatgatattaataatacataataacataataatcaatatttactcgagcattatcaatgtgtatatatctatcaatttcgttctgaactgatacacaatgttccaacctgcactcgaaagtcgaagtgtcctttgggttttttttccttttctaattttggatgcatgggcgcgactttctggtcattgggcacgagaatgtcgtgccccaatagtttcgaaatccgaacgttgcttaggcgggaattttcccgcttatgcagttgggcacgaaagcatcggccccgatgctctgacaaggcgtgccaattgagcaaatgggcgcgacaccatcgggcccgatgctctgacgtggcgtgccaactgagtagatgggcacgacaaggggcacgacgaggtcgggccgaaattttcccccttttaagaataaaaccagattcgaggagcatttcatttcagttcttcttcttcttctgaaatccctactctctaacgacaccgtcggctcagtccttcccaaatcgcaggtgtgatgattatttatgtatttattatgatttgggtcaaaaactaaattagtttttcttcatctaatttggggattcgttaaagtgttcttaaatttaatctgaattggggatttagttaatatttagggttttctctgattgtgtgaaaatctatacctgatgttttatttagttttgatttcatttttgttaattaaaatttctccaattacttgtaaatttatgagaattttttctggaattttttattctaaaacatgatatgaaaaatatgatatttgcaattttatttgaattttgctttaataatttgtttaggtatgaatgtgtttgttttttttttttggttggattgggtcttggcttttttagtaaa

SEQ ID NO: 240093 - DNA, 1514 bp, Cannabis indica
ctagtgagagagtgaaaggtgaacaaatgaagaggagtttccccaaaaagactttaatagattttgtgggaccactccttcacttgccacatatactcaacaaagagacatgtagaaatgcaaagcagttaatttaccgcaactaaagagatcaaacaattaagagtagacatttcaaaggttaatgatgcagcaacatctacttggctaaggctatagtagttccgactcggctggtaagtctgtatcttcacagacatccgtacagggacttgggggaaaacgttatcaggatttttgcccacatgacatggcatgcttacgtggaaaatatcaacatcacgtagcagtacatatcaccaacaaggaggtcaagttagcaccctagcaaacagggatccctacactcaaacgactaacaagtgacagaccagccacctcaaggactagttggccactcctagccgacaccaaaaggctagccaacctacatcctgcaagtgcctagcaagccaagattggacctagcagaattctggtacgcagccttacacgtggactacaagctggatagtgaattgggcctttacagcccaataaagtagatgaaaaagacctatgtttaaggggcattttagtcttttgtattgaaacgatttaatatgtaaatatgaacttattttatttgtaaattagggtttaagctctcccatataaagagccttaactcaaccctaaaaaccctatgtctaagcctcattctacatttgataactcactccactctctctctctctctcatgcccactatagcatctctcaacaatttagatttgccatctttgattcctactttataactttaagagagttatatcggatcccacctttagtgatgtgaatagtgttatctctcggtatcaatacaactaaaatgggagtaggtcataacctgctaactaagggggtcgaacctctataaaatccttgtattcatttacttttgagttctaattgtgtaacacatggcaagcattagtttaatatgaccccaatgtcagttggccaatttctaaggtcaacacttatatacatgtatatatattttttagtgcgcattggatgctaaaggtcattgcgctaggaaaaattatccttttagaccatataaatagccacacagtttcccaacacattcaggcaatactaaaaagataataatttaattactccttatgtaataaatcttttaattaactaagttatatatatgttaattaattaaaatattaatataatttttaaaatagagcatatgagatttaagggggatcaaatgcgtttattgaggcatggccaagaatatattcctaggaaattgtccaagaaaacctaaaaactaagaatgtggttcatatgtattgaaatacatgattgacatcgttccacgtgcaaaccctaaccattatttaaacgatcaaaaagttgtaagttttaattattaattatcttat

SEQ ID NO: 240094 - DNA, 2056 bp, Cannabis indica
actctgattgtaggttcaaaattcaaaaactaaatttatttgctacgctacaatagaacagcttcacgactttaaaattgtcctcattaattgatactgagctgagttgttttaacacagtcttctttggagacttattaatgatataaaatacaatactggattgaaaaattagtactaaccattactattcaacaaacaaataaaataaaatagaactcaaaggagagaaccacacaattatgaatttttacaacaaaggtaatacacaaagctataaacaatacaaacaagtgaagggcattatattgacttgctctactagttataccaccagctccagggtcctttccttcctccaaaggcatgatccttttgttgcatcttcatgtaaaaatagtaataataaactttactaaaagatctattattttttggatatttttctctatatataaattgaaaacttgtattttgtcactataaccaaaatagcacaatttaataattctaaacactaagccgcataagttcatcaccataagtgtgaatttgagagtgtgatttttaaacttgcaaaaaaaaaaaaaatcatcttgataaaataagatatatctgaagtagcccataacaaagcaaaattggaaaaccattacgcaataaggacaacaaataatctaatcggatagcaagcaaagcaagagagcaacagttagaattaaaaagaagggaaaaagattaaactagataaaatagatcgacaataaagaagttctctagtatgaatatactaaaaatgaaagaaagagtttaacttcagcggagcttggattagggtctctatatttagactaattgatcaaaagaagatgagcagtaccattagaaatacaaagtatattcttaaaataaatgaaaggttatgcatgtgctttgggttgtgtcctagtatatttaagaagcaaacaagagacttggtgggcaagaacctcttttactcaacaatgtataactaaaatctttaaaaaactcagaagcaaatatttttcgattgatgagagtagttgttgcttgcttgagtagttcgaattgaaaagcactaacatatataacaaaatttgcttgtagttgttgtttgtacagaaaaatttgtatgtatgatgaagatagccatagagcagtaagaatttcagaatcttatagatcatagaggtaatttaactcagagacaatcaataaaagttgcagtgacatcgaaaaggaagctttgaagatggtggcgtgtgattcactatatactatatagtggcatgtgattccactatagacaagactatatatgaaagagtgcatctcaatggtgaataattgcctcttttctgggaggatgcctatatatgtgaatgaatgcatttgtgaatgattatctcttttgtgaaaggatgcaaatattacatttctgttaaagttaacactttctgtttaaaaatataaaaaaactctgttaagtcacaataaaatctgttaagacacaacaaaatgtgttagatagacatttatttatataataacatataggtaagatatatgcttatctcatgatcctcttcgggtatggggcacttctattttttattttaggtgtattctatatatatttttattgtttgggtaacaagtgagtttggtgcagataaacattccttttcaattttgggagaaacaaaaataagtgaagtatggtctagctgtctgtcatagtataaatatatatgtatgcatttatatatttatatatatatacacacatgtactttatggaaggaaaagaaaagcctttaagttataatcctattttaaaagtttgaaaagggcgtgttgctcataatctcatcacaaccaagcttatttgggatgctcccaaatttgaaaagagtgtggaactgccactagctctatttgggatggctggaatgaactgttggaaattattttaccaggatcttagatctactcacaagtatgtttattagcatcctaaatatgaactttctaa

SEQ ID NO: 240095 - DNA, 1165 bp, Cannabis indica
tttttttctttttattattttttgctttcattctttggcaattttgtgaacttgtcactttgatattaaatatgaattaaatctgaatggtagttataagaaaatttacaactgaaaaaaaaaatcaaggtataggagcagttaactaaaatagctccaaagataaaaatataagaaatattattaaaatggagcttgattgagaagcactattcattcatcaaatattattttaatcatttcactacttttttaattcttttttattcaatatttctattattttttgtttatataataaaatatatgaaaaaaaatataatatttaaattatatagaaaaaaaaattaaaaaaattaatttatgatataatataaaagtgtgaaataaaataaataaaataaaatttttgtgaagtattttgaaaaataaaatagaaaaattaatttgagtgctactctgaggtgaggcaagcaaagatatacgccttgtgctctcgaacattcaaaactttaaaattataaagaaaaaaattattagtatataaataaaatattaaacaacaagagaatatactaaatgttgtgtaacacttacaaatgttaaagaaattttgccttaaatatcccaatataccatgagcttttagctcagctaaatcaaaactaaccaataatgactaactactctactagttttataacaaatttctaactgaatatagttagtcaattaactgtttttcaccagttgcttcttctttagcttcagcaaacaacctgatattaactttgtgaatccatataaagatgtgtttggaaagccatattataattagattttatgtataatttgaggtaattatacattttgacatgtttgactgatcatataatgacactgtaattgtgtaattgaaagtaattaaggagtttcaattacaatctctaaatctcatgactttctataagaattgagtataattatactgtgtaattattataaattttctattttaaatattaacggttaaaaaaataatattttcgtgtgtaattactatttattttgctaaataatatattaaaaattaatatataattatcactttatatctaaacatatcttatattttaaaatacggtgtatatatatatatattgtt

SEQ ID NO: 240096 - DNA, 915 bp, Cannabis indica
gtatcgatcgaagcacgaaagcgaacggaaggtcccccgaacctccatttaaacgagtcctcatgaacatcgatataggtacctactatattgcctgcccattcagccataactctcgatttgcacaagaaagaagccgatgtaattgaacccagaaaggtgataaatgcagtgattcagcagaggcaatttgaagtgcagaaggagggctgagaacaatatggtggttctgaaagtgccaaggttccataaataataccttcctaagatctcctaaacatccaaaagtgaccaagaacagtccagaatggtgatctgtgatggtagccgggtattgaccctcccaatgtccactcatcttaattttaaatgtctttcgattaaactctcgagaggtaactacccgagcataaaggcttaggttctgggcagcagtgatcccagaggttggcgacacaggcagagtttgaacatctctttctcgatcagatagtttcatggtacggttcagttcagagagtaagttgtccatggacaaacacaagaacagagtaacaattactgggaaatcagttgaagtttgaaagaatattttgaattgtcatagaggcggcaacggttatagaggatgaaagatagcagaacccagaagatcaaattgaaaaactgttaaaacagttaaaaagaaaaaatatacataactgccacagagctttttaagggcacacaatgctcacccttaactatcatatacacgtgaaagtaccaattgttccctcaaattttgattgtttgtgcaactattcatagttattttattaacataattttttataaagttattttgctaataaaattttctggcgagcctaaaaaaagttcacatatgagcaatgacgaagtgagaatacatat

SEQ ID NO: 240097 - DNA, 935 bp, Cannabis indica
aaaaaatgacatattttatcaatgttggatagttaggtgtacaaaaaaaattgtctaataaatgcatattaatcaaatttccctattgaagatgactcttgataagttgaatgtgattcttgaactccaactttgagctctgataccatttgtagtgaaaaccatcactccaatcttattgttatgaacaatgacaccaattaaaaatactacatttaagacaaacataccataaatcgttaacttaaaattaagaaagaaacttagctcaaaaagatgctgtttattgagtataatcgacaccaatccaatcctaaattacaacacaaaaggaagactaagttggtaaacaccaattacaatcaaaactcacactgagaaaaccttgatcaaatacacaaggatcctatgtacaaccctgaaaaacttaaacataaactgctagagagagagttgcatttcgattggctttgattcaaaaataatctcagtcgattcttaactttctttggtgtgttgagttttatttattagtattatttaggaacctaactaacaaaacaaaccctccaattagctaggacaaagactggtgctgatgtgacacctattcactaaatttcattgtttgatgggcagtgataagtaaatggaataagtttgagagcagagttcttatgtgtagtaaggccagctgcctcttccatatcaatatctgactctctcattctattaggcaatttccagtcaaagcaattcaagagattggcaagtgtgagttccaccatagtcattgctgtataaatcccaggacaacctctcctacctgccccaaatggcaaaagctcaaagtgttgacctttgtaatcaatggaactatcactaaatctttcagggaagaactcttctgggttttgccagtacttaggatcacg

SEQ ID NO: 240098 - DNA, 3425 bp, Cannabis indica
cacctaacttgccaaaaaaggactttacaacaaaatatccaaaatttattaaaatatttaaatgcaaaattttttattttcaaacactcttatttaaataattatgctaattttataattatataaatgtatcaaaattttgtgttcattatttaaggatagtcacactaaatattcatataatttttttttttatatttaaaatttttaaactaaactttttaattttttatttcctaaattaaattaaactaaacaaaaataaaattattttaatcacataaacaatcataactaaaacaatataaaattactttaaacaacaataacaatatggatctcaaataataatcccaattaaaaataatttaacagcacaaattatatatataatgtataaaaataacaaatatataaatttatatatatatacaaatatccatatccaaatatatatacacaaatgtataaattatatatattttttatagatataaatttttataactacaatacattttacatttataaactataactaaaatacatttcaaaattataaacacgccaattttactcacacttttcagatttatatcacaaatatcaaaattataaattacagtatttactgtaatttatacaaaaataaatacatactttacacaaatgaatatttgtgaacttctctaatccaagccaagaatttaaaatgtcttctacacaatctgaaaaatataacaaaaaatattacatcaaaaattaaacaaatacaatcaacaaatatcaaaaacaatataaataatacgtttactgtaaaatttataaatatttttaaaaataatataaaacaatataaaattgtatatgcacacatataaaatacctactttttaaggttggaccgaaatcggagatggaggcggagctgctactggcggagacgaataccgttgctcgcggaggcagtggcgaattgggaaaaattagggctttctagaggaggcggaggtagaaggaaaaaattggaaaattttaaaagggggaaaaatggtgaggccgggtgtggtttcgtttatatagacgaacaataccggcgggacctattaataccgacgggactccgccggtattaataacaataccggcggtactccgccggtattaataggtcccaccggtattaatataaaaattaattaaatattggtattagcggcggatccccgccggtaaagatctgccgctaatactattttaaattaatgagcgagttttttcctgcattaaataacctcatcaataccggcggatggggtccgccggtattaatgatatatccgtcggtattgtctttttatatatatatatatttttaatttttttattttaaaacaattttaccggcggaccccctaagttcgccggtaataacaccattattaggggcggacttttcccgctggtaataggtccgcccctatttctaatttttgttgtagtgtgtggaagtagcagcaacaacaagaatgagaatgatgcgatggccaatggttctttgacgttcttggtggacagtcatagagaaaactttgttaaggggtgggcaaggatcaaggagaaggatttgatcacgaacagcatggtaactttcgttgagacctttaagttcgaagatccttcacccattcccttgattaaaacgattgtgtaaaacgatccacatctcagcagctttgtcttaataccttatgatgctcttgatctcaggggagaccgaatgcaaaatccaagacataactatttggttacatctaatccaagaactaaaagagaatcatttggaggaggttgaggaagggtataccttcaagaaatggggttttattttgggctccaattaaaatcttgaagtctcatcaccatggttggaagtttcgatctgtgagaattggagtggcaagaactaagactggatgatcagcattacttagatagtacggactacgaatgtcctcgtatgcagagtgattgatctgaggttgcttgattggtggagctagcgatggagctcaattgtctttgtcaatagaagtttgagatgggagaggatcgatcagagcagtggcatcgaccacgggattgatggtagtagcagagttagttgctcgtgtcctcaccattgttaaaagcttagattgcttggagatttagtctttttttttgtcttccgataccatattagaagaaaaaaaatatttgttttattatttgtaaagacttatttgagtacaagagaataaaggtgccttatataggcacggtatgaaccaaaactaaagaaaagaataaaccaactaatcctaactaatttatcttaacaaacttaactaacttaacagaatttaatagaagaagagaactttaatatcttaggaaatgatgaagaagcttaggttgtgtttggtatcacttttttaattagttttttagttttaaaattagaaaaagagaaaatattttctgaaatcatgtttgataaaactgctttcacttttcaatttattaattgaaaatcaacatttaaaaaaattaaaaatcactttctaaatttttttaaacaatttctttcataatctgtattttagactctcactccaacctagaccttggaacctagacggaccttggccccaacctcggacccagacccaacccacaatcccagtttcgaactcgaactcatcttaaataaaattaacaaataaaaattacagaatacacttttgttttctattttaaaattaaaaaacaaaaatagttatagaacgaatttttatttttcaaaattaatttttttttacaaaagaattacatttatttttttgtttaaaaaaatttagaaacaaaaatattaccaaacaataccttaattatgaaaaatttatactatagcttgcagcacaagatgcaggggtgtacaaaagacaattatattttttacaatatgttgatctcttacaaataaccttaatctttagtacgtgactcataaactaaattctctttctcagaagctgttctttatgaaaagtgttaactacaacttggctcattacaatatttgtgttgtaaattcgtgtatgtcgtgctggtccagcctaaatatttttctgcttttaaaatatggattgtgtcatattgtctcctaaaaaaatatgagttgtgtcatgttgtgctactatttttaaagagtaggcccagcacggcccgccacaacccgtaggcccgatatttttgtgtcgcaataacttggatttgttaaacgtgccagcctattttcatatccattctcaaattcatgttttacttttttcatattttttttttacaattaatgagtttattactaaattatatgtata

SEQ ID NO: 240099 - DNA, 1515 bp, Cannabis indica
agtataactataaagcaacacttataaaagtgttaccatagattgtaagttaatgaagacaaataacaacacttctattaaaaacgttgctatatatttataattataaagatatttaaaataaaaaaatatattaccattaattaaatttgagttactacacaatttcaatattaagagttgcaacaaaaataaatttattcttattctataaaaatacacaatattcattacatacctgataaaagttctatagaaaattttgtaacaattaaatacaaagttatgagagaaataagaaaaactaaatacaaagttattaatattcatcaactctttcaaatgcatagtaatccaagaaatttgtcatctctttccaatgaagcttagttgctacctgatgcatccatataagcatcttatattgtttatttggagaagaaacatatgcactacaagttaaacaaaaataaaaattataatcattagaatatatcattgtaaacacattattgtcattatatatataaagttatactaattattacacattaataatatatgtataaaattagcattacttcaaaaatctaaccagcaaataaaggaacaatttccaaaagaattactataaatttactatatacaaaatgaataattaataagaaataagttttgtgaatcatgatccatgatttaatactgtgaatcgagtaattttattataattatcttgtattaattttgtgttcatatatatacaaacacacatttatggagagatgatcgatcattgatcaaagaaaagaaaaatcaaatgacaataaaaataagcaactcacttagctattttggcataaagaaaattaaagtttacctataatagatccaaaaatataatcccaacataaaattgatgaagacttctgatattgaaggtgtaagtaacctgaaaaacatcaaagcatcattttaattaatgtagaacttcaataatggaattggaaaattttaaaaacgcaaaaatttgtacactaattaatattctctatatttatattatatatatacaagaaattgtagtgttgagcttagagactgcataatttctttgaaagattttttaatatcaatggtagtttaaagaaagaaaatgacagttttgtttttttttattatgggtagctcatctttgaaaggaggttacactccactaattaaaaattggtttagttaattatgtgtggcaacaattatgtagaaagtgttgtcttttattttttttttctttattaatgaaaacacttttttagaagtgttgctattagtaattagtatttaatttaaaatataaattatttaaaaatataaattttttagcaacactttatatttaaatgtgtctaattacaaaaataaataatttagtaacacttttttattaagtgttgctaaataagtgttgttaaatagtatttttgtagtagtggcaataataggaaagtggtggatcac

SEQ ID NO: 240100 - DNA, 666 bp, Cannabis indica
tttttttcttttattattttttcacttattaaagacttcaaaaaaaaaaaaattctgttctttatatttttttaattcagtttaaactgacctttcttttcagtcatcgttcacttttttttctttctttctctcttctctctatatttcgctgttttatttatttatttattttttttccaattctcaatttttttttaatttgtaacgataaagtctatgaaaaaaaaaatcgtaatacaaagatatataaacgagttgatattattttatttattacaattaagttaatattttattatttttctactgctttgtagttatatttttgttaatgagtccaacaaaaattttatcatttcaaatttttattagtgaatccaataaaaattttgccattccaaaattttaattcacattttcccacgaaaatcattattactaaaccatgtaacaattttttagtcaattagaatttgaattaaaactattttattcaataaacacatgatattattcattctaaaatgtgagaaaaaaaaccaacacacacaacacaactcagtctcaaactaagaaaaactattgagaaacaacacggaggactactttgaaagataagagaatttatatggccaaaactgtaattataaaaaatataaggac

SEQ ID NO: 240101 - DNA, 1389 bp, Cannabis indica
ataaatttcaaaattttttcattttagagcatctgatgtgagtactaccaaattacattgttgtttaatttttgtaaacgttattatttctatttactataattattattactgaacaaaattaatttacgactaaataattattatagaaattagattaattattaattttttttttggaaaactataaaagataaataagaaatttgcggtataaatatttaatttattagatttattcctactaaatactttaatatgaaaaataccagcaaaaatactcaaaacttattttgatattaatctgttagtgcccgttcaataattctgttaaatacttgcgatagttctacgtgttagttcctggttagtttaactcatttgaattttaaattaataaaaacattaatcaaattttattttaaataaataaattaattaatcagaaattaaaagaaaaaatatattattaaaagtttaaaaaaatatttccatatttccatattctttcaaaaaaattcatcatcgaattgtttgctagttttttatttttacaaatctgagattccaaaattaaatttataaaataaaatatttattacaaccattgaaatcaataagagaagtttattttaaaaaaatctagaataaaaaaattctaataatatatatgataatgttgcataatacttcacttagaaaattagaaaattctataaaaacttagatatacttcacttgtagcctataaatagatttgaggtctatgcttagaatacaagatgaagcaagataattcaagtgtgagaaagagagtccaaagtgtgtaaaagagtaagagtgtcgtagctagtcattgtgtccaaatgattctaagtttgtaagtactctttcttaataacaaagtgttgtaattttctaactcaacaagtggtatcagagccaagtttgtcgagctcgtagtggtagaagagcttcttgttgtcgtgcataatttgagtttgttaagcttacaagttgggataagcttttttggtaattcgttacctaaagaacgatgggtgacgctcaagtaattgatggtataaagaagctcaacaactagaattaaaatacttggtcaacaatgatggaattatacctccaaagccaagacttgtgggaggttgtaattggtagtgaagtaaacccacttgaagatgttgtagctttgataaaatggaagatcaaagctggaaatgtgttgtgtgcaatcaacaccatgatcaaaagaggaaatgtttatgcacatcagaaaagttgagtcgccaaaggagggttgggtacacattcgtcacacttttctcaaagaagagtgatgcaagacttcaacttatagagaatgagttc

SEQ ID NO: 240102 - DNA, 1852 bp, Cannabis indica
agaagtctgatttgagaaatcagtagatgctttttacactgctattttcgaaatacaaagagaaaggaaaaaattatttttctgtcaaactatttttgctcatgtgttgagaattcaacaagaacaaattatacactttatcctagtaccccacactactctttgtgtgtgggggatcgatttggaaggccacggtgtgaaatttattggatcaaaattacaagaagttttgaggataccctgatagtcatcaagatgtattgatttttttttttcatgtaatttatattttagattcaatgtttatacatatggtgatccttggggttatgatacaatgataatcagataattattattccattgcgtaccttatttagtaccataattctaacagttggaagagctatgccacaacctatgtggcatcatggtcgagaagtgtcagcccttagacactcctctccaatcgtgtgacttcctaaccgagaagtgcttcccattggtcactcccctccaattgtgtgacttcctagcgaagaagtgctttctcttggtcactcctctctaattgtgtaacctcctagccgagaggtgacactcccttgtcactcctctccaattatttggcttattggcagagaggtgacatccctgtcagtcctctccaattttgtaacctcctagccgagaggtgatactcccttgttactcctctctaattttttcctccaaagcacaatgccacataagcaagttcaagagacaagggaaatgaccaacttcaatgacaatcccaatgattgtgggatattttcctataaatgtgggatatttttcctagatttttatttattattcattatcttgtaataagatacacgatttgaagtgagataccccgacttgtgggggatcactaatgaccttggacctatatataaataatgataggctagggtttacagaccgttttctagaccttcgacttcttactagactcttaatcacattctagaccttgaaatactttctagatatccacattgctttctgacttatctagacacttcatcccttaagacctttccctctcttcatctttttcttgattcttcaaattttgtcgacaccaagtctccatctctattgagatacatgtttatcaagaataagagattattctctattatttcttttattgattactgttcccaagaacaccaccaccaccattattatcaagtttatgggtattgggtctcccatgagcttattagtcataagcttcgatatagcttttgtctaagagatctctatttatactatcatccacacactcttgagaacataactctggtgtattggaatcaattaataaaaataaagttgacatagccccattactattacgacatggggtgaactaatataaatctctagtgtcattttctattttttttgaagttttatttagttaaattaatttagtacaatcctcttattttcttatgatcttcttagatcagttgacgaaaaatcacatcaacataactaattaagcaagaatcatcaattacacatacaaaaattaggtaatatttattttgcacaaattaaagtgaaagaaataatgatatataaatactctccaaatacaacactacatttgtttcaaataatgtgagattttttttaaaaaataattcactaaaaagtgaaatcaataaaattttaaaaaataaataaaaattgtaaaaaattgaaaaaaaaaaataggaatataacttaaatatatagattagatctagtataatcgcttttgttggtatcaaacaactcatttattcac

SEQ ID NO: 240103 - DNA, 1780 bp, Cannabis indica
cgcgggcaaagcccacatgatttctagtcatgcccgataaccactccggcacgctcacaatttggtaatattgtctcttttagttattattcttaacaatgtacttttttgatcaataaaacgacatatacgttttgttatggtgaaaacgacaaggtagtactacgaaaattataattcaagaatcacacgtaaatagtaacacagtagtaaaggagaacaaaaaaagaaaaaaaatttaacacaacaaattaaatttacataatatcaagaattagttagttagattaggtaaaagttagttgttatggaatttttttataaatatacattatatatattaatattaggtaaaaaacattgtctaaaaagaatgagtttatatactgtgccacatcagtattttatattgtggctgccaacattatttttgaacgttcaacgattatagacgcgcccaaaaattcacttttcttggcctttcacgtgcttttcaaaattaaaatagaaagtaatatatatcctcaaaatctaataaacgaaattaaaaaaaaaaacctaaaattgaatgagattgaatcagagaactccattaacaaaaaaattagatagatttgaaaactgaagaagaagatacgatgcagattcgttgttgtatacaacaaacaaaccaccatctcactcaatcgatcaatacacctatcatctcataaaaaaagagcatgtagcttcgcggaaggagatctacgatggtatcttcgacatcctaatctagattgcaacattactgaaaaagataaaatagacaaataatcatgaatcgtattctatatatgtgattaggaataattgtttcaaaatcattaaaattcatattctaaaactcataatacaattcgaatactctatacagttaaaatgcatcatattaatatgaaatcactatgttgaaacacgtatactttgttaatgttgttagtaactaaacaaatatgatatttgttaattttgttatgtatagtgtttcatgaacaaatacgaagaaaaaataataatgaaaccaaataccttattaaataaaagttaaaacatattaaaaaaatcagaacaaagtaaacaataaaaaatttcaaacatctaaataaacacaaacataatgaaaaaatctattaaataaacttgtcttgtcatctctaccatcatcttcattctcatcgaaccttaccattttaattcatttttattttttaaaccattcacttcaacatcatttaaaccattatccttctaaaaaaacaaattcagtagaaaaaaaaacaatatagaaacaaataacaaaaataaacttaaaatgaaagtaaacactcacaaattcagcattgtcattactctcattaggacttccattgctatctttagcaacttttgtattttcaatagcatccttcaaatcattgaactgtaaatccatataaaatatcaagccttcattaatcttagagtcaatatatgattgaatgttcaactctagctccttaaatctacactctaaaaccttattcaaaacttcaatagaaccatcagccttcttccatttttcacattttttttcatttttctgattaacctccttatgtaaggcattatgaacaagctgagacataaaactaacaagatagctatctaaaaacactactgcaatgtaagtctttagcttcccttttttcaacccaatttataaaaagggaagctaaagagggtgaaaatatctgcattgaca

SEQ ID NO: 240104 - DNA, 1687 bp, Cannabis indica
aaacatccccacgtataagctgtcgaggattgccaatattatgtagattggcaatcaatccttgattactctcttccccattaatattcattgatacgccagcctgtgagctctctcctccaccaatcacggggcctctgtaactcgcaccagatcggagccatggtgatccgatggtatgctgtctcctccgtggcgccgcctttagtgaaagatcgaacattttcttaatcacctttgcaagggtgtcgaataagcgatcatagaaccgctctgaatgccccaatactccacaaataaaacagaaggtgggtaagtcttcatacttaaattggactgtgcacgtctgcccatttttcctttccaaagtcatctttttcttcaatggcttttctacattaatagtggtacgaactctaagataatctctccaaacacctgtgaaattattagggtctgatttcacaaaagtaccaatataatttgccatatgcttcagaatgttttcggacataaaaccagttttcatgtcatggcattgaatccagacgtccaaacgggtaagactaatctgtataggattctcccccggtttcaccctctcaaaaatcaaaggaacacgatcaaaagtccatggactaccatcgataactcttgtaataccaatctcatgatagaattgaaataaaaaatgattcgggtcaagttctttaacgtaaaacctcggttcggttgccacagggaagccattctgtgttgcatggcttgacagtcaatactgcgttttgtaaggaagcgccccaccaaacaccaccgatcatcgatctccgataaatcaccatcatcatcatctaataccagcctgtcgacattctcttcaaacagcacattctcgttatcactcatttttcttgcctggactgctactaggattcgtagcgaatataacaccaccgtaaaaatcaccaccgtaaacaaacaatcaccaccgtaatatcactgtgaaaacaatcacacacaaacaagcctaacaaaactttccaaccatgacaaaagtcaagacataaatcaaccctgcttaatttttttaatcatatctgaatgtaaattattgctccaaaagaagaatcaatttatgggctttcttttcaattctctattttctaacattttcatattttcttcttaattattattatttattatttcatgttattcaaaagttaatagaaataataaataaataagtgatataatatcattaatgtactaaaataattaatatttatatattatgcagttacattgggtaagtgatacataacggaaataatattatttatatttttcttttaatgtgttgtgtgcagttataacttatataactcacaacctttcagttttgtaacatcttagggggcgtttggaatagagtaatattaggaggggaaaggtaatcttaaatattaccctgtttgttatgagttttaaattttttaaacccattaatacttatacggtggtattctaactaccctaaaagggtgtaatactcactccttaaaaaaaggtggaacccaaatattccatcagctacattaatgtaagaataggattttcattaaataaaaagtcaaataaaaaactaaaatgaacttaaaaacaaattatatagctccttagtcta

SEQ ID NO: 240105 - DNA, 1444 bp, Cannabis indica
tgatgatgatcatgatcatgaagatgagcctagtgcttattctgaattaatagatgatcaacaacaatatcctgatgatcatcatcatcagtactattaatattaataattatatattgttattaattttatgtgtatgtaatgtgaaaatttgtattaattaattcatgtaacttttagaagaagactatatatgatatcatcatgatgatctatatcatgttaattaagctaatatatatagtttgtaattgcttcttattttttgctttttaattagctctatctttgtgctttattttgtaattcatgtaattttatgtaagatatttcatgagtaattattaatatttttatatatatgagtaaataattagtctcactctttcttaattttaattatacatgagtggtgtgggatagtacactagagggtgtgggaaaattacaaatatgtaaaaccaaattaactataattaaatcacaaaataattaagaatgacaagattaacaaaagagatgaaccaagaatcggagataaaagttggtagaacatagtaattaaaaccagaaacgaataaagcgttaaaacaataaaataaacaccaagatatataccagttcaagtcttatagatcgatgtgaacaatgactctacccaattctggaataccgtcgaatagtctttattgattgagcaagatcgcaggtacaatacagtcgagaggattcttttatttggattctctcaaagtgtttatctcccacactcctacttaagagtcttttttatttacagaagattcttcatacaaatcccaaaactcaatctctctcttttatatgtatctctctctctctctacctctcaatccctctccacattctcaatcttcaacctcgaattcactccttccaaaaatcacgcctttgcaaatgatgagaatggtagtatttatagatatgggatatggatccccaaagtcggtggctacaacaactaagttgttaagtcagttacaacgtgcttaatagacttaacaaagttcttgtaacaatatctccacgtcagctcaagaaaaagctcttccggatgagaggcacacttcctggataaaggaccaaagcgtacactgaaggaacttcccatttatgaataagacagttggagttgactatctagaacttccctccaagaaagaacaactagccatccagaacacctttctagagacagattagctttcctggagatttcttccgaatgaacaagttagacttctgggaacgctcttctgaatggacaagttagacttccgggagagctcttccggatgacatctaactttccataagaacatcttttgaagatcttttcatttaatgaaactataccactaaaggataataacatgtaggacgttataatataataaaactatct

SEQ ID NO: 240106 - DNA, 848 bp, Cannabis indica
acaatttctcctgatgatttctttcgctccgactacaatatatgtatatattaataataatagttgataaaaaattgagcaataataacattttggtacatagataaattttaattttcttacataatagtgtatagtataatcacaaaagtgttcttataaattctattagaaaaatcaaaataatttagggtgtcaatcgaaattgtgattcaaaaaccaatgcgtgcgcatatgcatgcaacaagttgtttgaattataatttcaaaattataaattattcaaaattttctaaaaatttgtaagaggtttccattgaaggtaaattacaactttatcacttcactgaaaatattaaaaaataaataggtaattaaaagcatcaatactatagtaatatccataattaataaaaatatatatttataaataatagataatatgatttaatgtatatgtgtacttatgtttaaattatttaccttatggtagccaatgtcattcataactcttccaactattgccatagtttgtataattttaggttgaggattagaaaatatccaatccatagaatgttttgtaacaatatctcccattccaataaaaaccattgaaatgagcataaaagaccctgcactatcaaccccaactggcatatattcatctaatgttggtatatattttgtgtgtaaccatttggtttccttaaaataagctctaattagagattgcacctgaaaaaaaaaaaaaaaatcaattaaggatttgctataaatgttgtgaattaaattaactaatcttttatataataataataactactttacccctttcttagcatagc

SEQ ID NO: 240107 - DNA, 2359 bp, Cannabis indica
acaagggatgaaattcattaagagtaacaaaagtaatcaaacccgagattagaggctgcctggtcagccagttattcagaaaatgaaaactaatattccaagtttaaagactgcttggccggtcaccttgtctcaaaagaaggcttactggccgaacatacataaaaaaaacagatagtaaaaggaaagcaattatacagtaggagtcttaggctccttgtacggctcaactgggtctgaaggggccgaaggatcatcattctgggcggaaggagcctcaacactcttatcggtaagagaggtggaagtggttgccttgggattcccatgggccacctgagcagcgcagtagtcaagaaacatgtctttggaagcgccaagatattcaaagtttgccttggtattggccttccaaaagtcataaaaaatatcgagactagctgtctccaaggcattcaccttttccccatgcctcaccacctcgaacttctggttcttaaccttagcctcaagttcctcctccttagccttcttctaatcctccaacttgtggagaagattccggagaccctctcttttgtcttgaagactggcaatgtcccgagacagagaagcattgtctgcctcgagctgctctgttgacacatctcctgcagttccctggtcatctcggcaactttggtctcaacacctaggagtttcttgttgacttctcccattttcgcccgcatagtctcaagctgagtccgttcatcttcagcctcctttatggccaagtccgcatccctttgcagtgtgttgaagtggtaggattcttcacagcaattgacttagcttgggaataggcgcatgccatcttcaaacaagtcaaaggcattgaaacccgaactagttaaagagaaatgaaagaaaaatattagaaagaacttacccgcgaaagctccttcaagactcctcccaagaccagctccaaggataagtcattgtccgccccagtcagttgttcgttcacctctgggatcgaccagctcacataatggttgagcatgtctctgcctctcttggcttccgagcacaataccaaaggtggggcaggagccttaacttgtttagatctgcttctgaccagctaagatccacctttcacctactcaggtccatctgaactctctcctcggcaacttttggacatagtgactttcaaggcaggagggtccacagaaggttgttcctcagagagatcaatgacctcttgagctggtgctttctcttcagaaagagtctcgccgcctttggacttcttggccgaaggggacaagcccgagcttcgccctcctcttttctttagggcctcaatcatcttctgagacattttttcccggaataaaaacaaaatagttaggagaaggtataaaatatatgaaggcatgaaaatcaagaaaaataaatgcaatatgaagtactctacatgttggcaagagcatctgcctaaatgagcacagatggggcatcatcattcgaagagtcttcttgctcctctaggatgcttttctttccctattcttgagcatactacttggctctaccatcacccttcaacttagcctcatgcttaagttgaataagctcgttctcttgctcatctccctcagctcggccagccctggacttcttcttcctccccttcatagcctggggtataaaatttcccggataaagcttgtacttcacaaaattgtcctccgaggtcaaaaaagtgatattccgagcaacatccggtagttggagaatcttttgagccctgtcaataagagccaatgtcaacggtggacgacagtacactgagatctgttgaaaccgagtataggttgtatccatgccttccacgaagtagtactcctcaacaaaacccccgatcttgctaaccttcgtgtccacggtgcctgtcagccacttgcagttcagctgagagaagtagaagtacccagacctactctgcttaggggtggaattcaaatcaaaaagccagatgacctcgtgcggggacagcacaccccatccttaaatggagtagaggacgaacagggtagataggtatttaatacccttgggagtgaactgagtcggataaaggcagaaataattcgtaaccctcttgcagtacggttgcaaaggcaacatcgccccttgcttagcgtgggcacccgaccaagcacaaaaccctttctttgggttagttgttcggtgattcgaagaagggaggtaatgttgggttttatgccctaaataaaactcatttcaatataatcagatttgtttattaatatagatcagaaataacatttaatgttgcatggtt

SEQ ID NO: 240108 - DNA, 2032 bp, Cannabis indica
gaaacaacaaagaaggactatcgggcccagatcttgattatactctgctacataaaggaattaagggttagagatctgagtgggaggagacatatattccgctgcacccaatgtaagatttctgatacttttatgtgtttaattttctatcgtttagaagttcatatttaggttgttaaatcaacaaacttgtgagtagatctaagttcctggcaaaataaattccaacaacacctgctgctttcgattgttgtggagttgttccagccttaaacggaactattgaactagtcggagtgtttatacttggccctgcgggtttgttgtaccagttcgatcgttgtacttccatcttacgacgaccccccaaatcatcattcctgtcctcaaataattgagcctttgccatagcatcgctcaaatcaacgggtttagccaggagtagttcccgccgaatgtccatcttcaatccccacacaaaaaaattcagaaacatagcctctgaaacaccagtgattcttggcataagagcctcaaattcggcacgatactctgaaactctacccgattgagtcagcttcgaaatccttcccaaaggatcatcataaattgatgttccaaaacgttgttgcagggctcggaggaaggatgaccagtccgtgagtgcgccccctttttccatccattggaaccaagttgaaggtgccccctccaagtgaaacgcaaccatggcaagcctcatttcatcatctaccttatgcagatcaaaaaacttattgattttgtaaatccagtcatctacattttcaccatcaaacctgggtaccttaacgcgtacgtcttgagcagagcattcgcttcccgattctccgttggcacctccgatctcctcgtgcttgagcgacccaactcactttcagagttcgaacgagtctctaaattccccgaactggcctacggcatctgtgtgaacctctcctcagtcttagctacgtgctgctccaatagggccgagaacttctgtaattgatcctctgaatgttgcttgaagttcaactccaatgcttgcaataatccagcaatctcttcgttcttcatcgtgagtacaacaatgaaagcaccaatgatacaatacgcactcttcgagtcagtgcccaactccaaattgcctttcagctttgaattacttagcataaaaattgccattggttacagtcatggatttataccatcccattcaacaaattatttagcaagagaaaaacaaccgaaattacaacagaaaaatggaaatgtgtgaggcgtgattcagctcctctccatcctaacaaactccttcaaccaactgggtcttacgcgcttcctctgtccacgcgctctttctcctttagctgagttttctgctggagccattgttttcgtgctggtatcttccagtaccccttcttctcctgggctaaagtcttgggctgcctcttgtattcctttgatagcctcttttcccacaacttccaagtccaatgttattgggcccccatcttgggtcgagtccacttctctaacacgtggcttcagtatatagtagattcttttattttgattaatatttgaatgataataaataaaattttgtattgattttaaatatatatattgttgtatgtctcttaagataatatatataattagacagttttatgaaattttggaaataataaaatttaaattttggtgtttgtttatgactaatattttaagtaaactaattgaaataatatgtttccaagtgacctcttttgtgtagattaatttatttaaatattaggatggttgtatctttgtaattgatgcatgtattgactagcccaaaagtaagtgaatatttcgctaaatttcaaacatacatgtggcaataaatatgtgacaattataaggtactttgtgtgaataatacattagtccaaagattaatctattgtttgacacagttttattgtcaatgtttgattgctacaccaagagtaccgcttac

SEQ ID NO: 240109 - DNA, 757 bp, Cannabis indica
gtgtcatttttagtcgatttcaacaaagtgtcttgcttttaccaaatcatcctctagaccactaatttatgagattaaaaaacaaagagtgctgttcaagggtcttcggaattattttaatcaacaagagagtcttcaagcaatttgaataaataaatgaacaaaataataaatgtattagaaactgagaaagatattaatgttttttttcctgcttaatttaaaattcgcattgttttgttctttccaacttggacatatttaatgcaaaaaagtgcacataattataaaatttgcgaactttaacaaaaaaaatatatacttggccaagtggtaacaatgatgtaattggaaaaagtcaagtaatgcatcggtggagctgagtcagcaaattataagagaaacacgtggcactatcaaattaggaggagagaaaaatcacccttatccaattagggtcggacttttttcagttttcaagtcattatcgatctaagactaactccacacatcaattatatcacttattatttatccataaaccaatcaaagttttttcttacatctcacaaagagtaaattggagattttgcagaattcttgtcaccaagaaattatttagaaatttatataaataatttatcaattaagatgaccccatttataaagtatcacttgctatacaaatatacattatatttgtgtgtaatttatgtaggtacatatcattactctataaattcatataagtatttta

SEQ ID NO: 240110 - DNA, 1484 bp, Cannabis indica
ttgggttgggacacccatgtgatcctttgaccaaactaagaaagtgctcataatatcttcattcctaaccaaaaatatatatatatataatactttatgagattcaatgaataattgaaattgggcaagaaagctttccttcttactgctgaaataaataacagcaagaatacatgaaaaaatgaaagaaagaaaattcaacatttcttttcttccttcaaaattgatgaatactaaaagaatggacaagttttggtcagaattagcatattggcttttgaggttgaatcaatcatatacatgaaatttgcaactttgtgtaaagaataactgtcgtttcagaccgacaccgaccgaccaatccataccaaccagattcgatcccaaaagtgcaactccaacaccaccattggtcagtcgattcgattcccaatgattttcggctaacctttgagaagttggaaaagaattttgtttctggtctctcctgttttgttaccatctagagtatgatgagtatgagttcccataagtcttccagttatccctgaaatcgcgtctgtatgaacttctcccaaatggtgagctacgaaattcatgtctgaaaccactgcttccagaactacaagcatctgaatgtcttccattactgctgctgctgcttccctttgaagcttttcgtatctcctcatcggtatcatactggggacgctgataacagaaaaatggtgaatcaagataaagcctacgtgggttagatgaaaatatcagtgacaaacaaaacaaataaacatggtttatgcagtcatatgaatgtctgacaaaccttggcagggtctgaaagtactgcatatgcctctccaatcattttaaaaaggcgatcagcatcgttatggatctcctgggagatttccttccaaagtcgcccctcgtctccactatcacttcttgcaaggaactggccagcctgaaacccgccaagagaaaaaagatcaaacagtaacttaagcaaaagactaatcaaattaaaaataaaagggaacagaagctgaaaccttgtcagggtggtgtttcagagctgctttacggtatgctttcttaatgtccgcacttgcatcggtttgtttactacccctgcatttataattatgatatcagttcaaattatacagcatataatttaggtaatcatatgattctaactaatgaaggcttcggcagaataaaaacttacaaaatgagatagaagtccaaggagattccgttcttagattcttcctccattatttgtagatgcatttgagcttgccttaaatcttttgtattgcctgtggatctacccgacgagccatgctcattggtcttgctgcaagattggctttcgagaatggagatgagtctctggaggtcagtagctgcctggctatagtctcgaatcatctcatgtaaggtagctcttcgagaaactgcctgtgttaagtgaa

SEQ ID NO: 240111 - DNA, 1523 bp, Cannabis indica
aaactaccatgaaagaaaccaaaccattgtcgaaagggagacatccacttgctttagctctccagcatccgggcggagaaatcgaagttctacaggctaaaactaagatggtgtttagtaactcttttttaatcagtatactatttttgaaattgaaaagtgaaaatatttttcaaaaacatcttctataaaattattttcagttttcaatgttttaattgataatcaaaattttgaaaacaaaaaaaaataattacttttaaattttttttacacagttttttttagtcaatattttaagctcttgcccagatccagacccaagtccaccctcccatggccctcgttgaacctggcctccgacctgaactcgaatccgttgcggagttagatccgacttaaataatattaaaaaataaaaataaaataaattttacaaaatatacttttattttctgtttttaaaattgaaaaataaaagttcttatagagcgcatagttatttcttaaaaataaaaattttacttttattatgtgattaaagatttgaggatttaaaatgatgatatcgagaatggggatatccatatggggtcggtggcaaggtctgtgtatattaagaaatttgaaatttgttctaattttctttgtgtatgttactttgtgaatataggtgcctatggcattggcaccttccacctgttttttttttttattattattaataattaattatttttttttgcaataattaagagccatgcaagtatacataaaaagttttagtttattatattaacaccgattatcattcccacaaagactctttttcaagtaccaatatgcaattttatttattaattcaaaaaaaaaaaccaattttattttctatttggtaatcaaaattataatttttgaaaataaaaataaatgaagaaaaaatttaaatgaagaataacaaagaacattaaactaaattcaaatatatatgtgagaaattatgaattctaatctccttctatctactttattatttactgatgaatcatatttaaaatttaatatttaagttaagaaatatacaactcgacctattataaattctctataactctatgagaaatttaaacagtaggaagtaatgaactcaactctaaatcatatagatcgatttgatactctcgttctaaatagaaatctatatcaaagtttttttaacatatttaaatctaatttctcaggttttgattcaaattaaatagcatgtaagaggtgagttgtgaatcacattcataataaacacaaattgaataaatcttagtagaagatgaaacagaaaacttgcattaattgttagacatttatatgtataaactgaaatatatatgtttaagtataaagtgcggaattaatcaaacatctatacactatgaataaggatcgaaatacctccagccattgaatcttgagcttcaaacccacataatctgcaaagtaaattgactaccatgggtaatcgggct

SEQ ID NO: 240112 - DNA, 1359 bp, Cannabis indica
gagagagagagagtgtgtgtgagaggaagtaagttgtaaaaagaaaggtgagtataagtttgtagtgtgatgagagtgaggaagaagtaaatggtgtattgggatttgggtggagaaattgagatagtgagtatttaattttgagttataagtgaaatatatctctctttgtgagtttggtaatttaccaaaccgagtaaatttatttgctttgcttctatatttttccgttgcacttaaagttattatttttcttaacaagtggtattagagccaaggttcagatcaacacagaaaaatgtcaaagatagtgtgttctacaaaatttgagatcaagtgttttgatgggaagaacaaaatttcagttatgatagagcacggtgaataagctgattaaggagagggaaagtcttcagaagctacttaaaggccatgatgagaacattaagaccctagccaaggacctggccgaagagaaggaagcccgtgccaaggataaagagacctatgaattagttggcgcaaagatcttctatgaattcgggaaggccaatcgggaaagcaactttgggtatctcaagctaaaagatcacgacgctctgattgggatgtgccaaagtctaaaggccgaggaggatgccaatgaagttgaagaagaaaaatagatcagagagaataccaacggaggtgctagtggaaacgccgagcagactaaggcggttgatcccaacttctcgattactcaacaagacggatcttcggtgaatgactatcccaaccctacaactctgatggacttctgaaggctttctttttgtttggtctaaaggccatactttttggaaaatttagccaactaaacagtttttaatggctttatttttctttttatgcagacatatggctggccggacaacttttaatcctagactttaacctttttatatctgataaagccatttttatttttgtatatatatatatatatttaattcttagattttgcttaattattttcacatgcttcttacctatgttgtaagggtgtaggtgtcccctaagtgactcagcagactttaaactcttcgtcacttataaattaaccaaagtattccatagcagcatgttcggaccttataactgggtggacctttttgtatacatgttaggtagttcagtgacttttaaaaataaatcactaatttttgcaaggaatcatatcaaatcttaacacaatttgaattataatgaatcgctttattcatttatggctaattaggatttgtgccccctgaagtttgacatgtaccaaattatgccccctgaacttttaaggtcgttaaaaatgccccctaaact

SEQ ID NO: 240113 - DNA, 1316 bp, Cannabis indica
ctttagccaagaattttcaaatcgaaatctatggctatgagtaacattattaatcactacaggttcaagaaacaatggggagtgatctgaagtagcaaagcctaagttggataacacagccgactgaaaaagttgattccaagtgttagaaactaaagctctgtcaagacgtacctcaatccatgcattcgtagctcttcctttttcctatgtatattgatggccttgtagctccaaatcctctaacccacaatgcaataacgtctgctggaatcccgttaaaagccactgagggtagggccgcccacctcttttatcctcttgacaaataatattgttaatatcccctataacacaccacggaagagaggagcgatctcttaaactttgaagaagagcccaagaatcacttctcctattgcggtttggctcgccgtaaaaaccagtgagacgccaactcagagtggaaggagagatggatatttgtaagtcaatgtgattgtttgaataacccaacaaagtaccatcatcttgatttttccaaagtaaggcaataccacccgaagctccaatagcatctaccacaaacacaccttcaaaatttaaagtttgggccaggcccacaactttagatttatgacactttgtttcacacaaaaagataaaatcgggtctcttttgaaaaaaaatttctttaaggaattgaatagtccgttggttccctagcccccggcaattccagctcaaaacattcataattcttggcgggcctgggaaccagcacccgcctcgagaaagttttttgaagcatcattttggactgtgtctacattggtttctagttgagaaatatccatattattgacatcttgatcattatttgttcccccacggcccacttcaatttcttgtgtttcattaagcccaacttcatttgtatggcccattcttctccttttgttgtcaataaagaccagccctgaattcaaatccgattgagttggcgccatcatcccagtagttttatctttccttaaacttagggatttttccatagtgatttgtgcttcattactatggtcaactatcttaatgcttggtgattcattcctggagcgtaaatcttggtgaattaatgaagctacttgattcatggtaattctccccctttgattctccctgaatggtgggatttgatgactccggccaccaccattgaagctgcttgcttctggcggcttctctgtattacttttgactgctagcccagattttagccatcgtgaaccatcaacataattccttcttctggtgcc

SEQ ID NO: 240114 - DNA, 2522 bp, Cannabis indica
gaacttttccttccatcctttatgagaggtctctaggtcagtgatgagagcccgattcttcctggggcaaagatgataacgcctgggttctttctccatcaaagaatagaaatggatggcgtcggatacctcccactgaacacccgccttatcccctaaaacaatcagacctaaaaggatagcccacacgttaggaagtaactgggcaggagcaattgagtattgtagaaggaattccttgattaatttagggatgggtagcctcagtctgattttcgattcgaaccaataagaatgtagacacacccactcatcctgagaggaatttgccctctcatgcggtttgggaagtctaatttcgacccccgacggaaaaccgcaggacgaaactagggaatcgagcttatgctgggtcagaaccgccagacaacttgacttaacgtccaaataggaactccccagggcctttttttcctcttaaatttcttcaacgggggaaccgccagagtaacccctttggaagggacggcttgaccactaacacccgcttcgcccacggagcaagagcggggaatgttggagatactacctaaacactccacctctaggtcatcagggacatcggcattctcggcctccatgggaggagtgtcagaaaccagcagggactcaacagacccaggagcaatacttgaagaaagagagtcagaaaccgaaggagagacgtctggacaatccacattcgccattatactacaaacaaagtaatatttgggacccagaatctacccaaggaaagagggctgatcctaaaaacaacctctccctctacctaatcataacaagggaaaggtgagaccgcaacctcggaaagggcgtagtagggggaatgccaaagttaaagcaggtggcaaaggaaaggtggacctagaaatagggattataccccaattatcatgaaccctaagtatcggaacgctaacccaaaggaaagaagaagaagaagagggaaaagaaaagaagatcccagagaaaaataggagggagggaaaatagtgggaaggacgaaaatacaaaaaataaatataacatacatagagagggtatatataaaaaaagagagagattaaaaaaaagaggatggaaagaaatataattaagttaaaagagcagagtatatatacacgaaggcaatgagatctagcacagagaagttgaaatgagcagcaaagagaaaagcatgtaatggattttcgaaattgagggtcttatactcgagagtgcgccgccaaaacacaaagggaagataaaggattagtagggcatttataagaaggagcgattctcgaggcaccaccatcacatcgagaaaaaccgccacttcctatcatactgaaaaattcaaaagcaaaaaatatgtatataataatagttataaaactagtaatgatgaacgaaaactgacataaaaactgctataagaagtgacaagtacaaaatatatatatagacacacaaggtaaataaaataaaactatacacgtagatttccctgtcttaaaaagaaaaagagagggagcagttatgaaaatcagttctaggttataaaattgtaactggaactgggggggagtattgtttgggaggtaaaaatcaagcacagaagcaaaaggcccaatagactaaaatgaaaacgtcaaaaggcccacataggttgaatgcataaaatctcaagatcagaaagaacatcagggaaggcccaacacggtgtggcccaaatattgagcctcaagagaacaatacggacaaaaacgaaaaggaagcgctaaacgataaagaaaataagtttgcaccgacggaagttgaaggaagaaaggaacagaataattggctgacggaacaaaaattcgattgtaggaggtattacaaatgagaatccaatgaggatccccagataacctgctgacgagggaggtatctaaaatacaacaaaaacgaggaacagtgggatagtaccgtgattagggcaaacacccccgacggaaggaaactcggatcatttcaaataggagtttcgacgggagaagaagattctgggtacaaagggaaaaatcaatatttccaaggatatggtgccgtcagatcgaaggaaagcagtagcattaaagctacccgttgaaacacggacacgtagcatggaaaaaagaatagagaaggaaaacacatgtcgacagcagaatagggagacgatagatcatccatgcaatcaaaaggatgtaccatataaatagagaaggatcaagtaaagaaaaagggattaggaactgggaaaagagagaatccacaacagaacaaatagtgactgtttttgaccagaataatggttcgcacaaaaattagcaaaggattggctgtcgaactgcttgccattgtctgaaactatcttctacggtagtccgaactagcatattatgttcttcacaataaagtcttgaactttctatgatgtaatggttgcgagt

SEQ ID NO: 240115 - DNA, 962 bp, Cannabis indica
aaatatataatataagatagaaatttcagtcgattattctcttcttctattttaatttttcctggtgaactgcgatttcgggcttcagatctcaataccgtttctgtcctctccagatcttacgccaccgttaatgacagttcagccctctccaagcagaatctcctccaatagctatgttcgccagtagcagtatagcaccagcaaagcctcttcaaagaatatatatttactatgtatgattactatgtttataaatatactgtgcgaggatataaaatatcattaccaatgtgactataataagagtctatagatatcctgcttcattagaaatgtatgaatttgatcatgcgatgttccaacagaaaatttatgtatcataatatacattgtctttgataacatacgcataaaaaaaaatatgcgggtagaagaagattcaaccatgcggaccaccacccgccccgtcaagattatccccttgcagcacccttctacgacgtcctcttcctctttgccctccgtttctacacatgcttctcttttcctcaaatggacctccaagcttcagcgcatgatctagatcgattggcttgatctctttctaccttgctaccgttggattaggacctacaaggctacaaatggcgcgagtattttctgatcgacgttatggctggtgtcactattggtatcatacttgttcttcaggtaatttatatgtatctatgtatgtatgtgttgtgctttgttgtttggttggtgagaaaatgaatgaaataagaaaagaaacagaggtttgactggattaattgtgtaaatgttgtcgagtgaatttcgcaacaccaaattatattattttactaatacgaaagagaattttaaaagaaaagacaagtgcgagtattcaacctagaacgacgagtactcgactgggaatgggaaaacaatcaacaaaa

SEQ ID NO: 240116 - DNA, 2194 bp, Cannabis indica
attttgtgttgtgtgatttgatttgtttagctcaattaattggaaatgtggtgagaactgaggcatatatgatactgctggtttcaagatgtgttcctgtgttattttcccagaaaatttgaagatgacatgtcattcttctttgcctaattgggaacttaacagagtttaagtaatttgttagaaactagttgctggagaaaataaaaagaacgatgttacataattagaatttgggttgagtcgccctctttaagatgtttgcggcactgtccagatttgttcaagcagactatcagccctgtcgtccccaagataaaacaacctattcgaacatactgtatcgaaactctattgcacgatagagtaccgtcaaaatactacgctcaaaaccgactactgctcgaaaaatataaatatgtaatatagtagtatgtatatatcgtgtaattttccagagtgaaaaagatgtatttttctccattgtttagtcgcattatatagggaatgcgctgaaagtagtaacgggaagaaagacgctactggaaaggaacattggaacatgtgatcgtgagaacgatgcaaaaaatcaagaagatactacaaatcaggaagcttttgtttactgattaatcaaacacgttttttttaacaaaaactattttaattaatctaattttctccaaaaaataagatgacaccacactcgctagctcggcatggtcggtcggacggcgggcgcatgtgtgtgcggtagttcggtgtgtgagtcctcacccatgcgcacaaaactgggtaccccttaaggcccaaacccatatcttaaacttgcactagttatacactgcaaatgaagtgtttctatcccatgtgagattcttactcacacacttcattttcttttgtaatatttcacaaagttccaacataatttgctcaatggaaactttaaccattcacatgaaattttgtcagttactctttgaatctagattgattagtatattcaattgcaataagttaatggtgctttcaagatgtatttttccatgctctagctatatatttcaaatttcttgtatggaacaagtaaaaatactggtacttatttctctccctataaatttgaagagcctaagaactataaactacaaatttaatcgatctagatttgaaaatcattattacttttctatgttcagtagcaaaaattaagtaaagttgtactgatatctcatttcatcaatttgaagaagtaattgcccttttgcttctatccattatatcctaaacaaggtactatatattaacatgtgtgcttagattacatataaggcctgttttactgtaaatttatgcatattttccatttatttttatatatttttgtcattaatagtatgagatattcaaagacttggcaaacttaaactcttcaataatgcacgtgcgagacacgtgccattacgattgtcttaaaccccacaatcacataactttaatcccattcgtcaaaattaaaccttgcggattgccagcgtggccctaaatattagattttacaaattatcaactttatgtttagattggtgcaaatgaaaccttgcggattgccagcgtggcatacccttccacactatataaacgtacctaacatgaatttcattacaatcaacagagaataacctgttttccctccatttccaattttttcaagaactcaaatctcttcagagaaaatcttccaagaagtttcagcaatggaaactacaaaagcaaccaagggtggagccaagggagccggaggaaggaaaggcggagacaggaagaagtcggtcactaagtccgtcaaggctggacttcagttccccgtgggtcgtatcgctcgattcctcaagaagggaaggtacgctcaacgtactggtaccggtgctcccgtctaccttgctgctgttcttgaatacctcgccgccgaggttttggagttggccggaaatgctgctcgtgacaacaagaagaacagaatcaaccctagacacgttcaattggctgtgaggaacgatgaggaattggggaaattgcttcacggtgttacaatcgcaagcggtggtgttcttcccaacattaacccagttttgctaccgaagaagactaagtctgctgaatctgagaaaactgcatccaaatcacccaa

SEQ ID NO: 240117 - DNA, 939 bp, Cannabis indica
tgttttgttttgctgtagcagaattactttctgcttctgcaaacgcttacagttttatattttcttatatataactgacatttgtaaaaacacggtttttcataatgtgagatcttatctttgtagaaagaatgtactccacattggaaaaagcataacattcctctcaaagagtaactacatagttggtggcatttagtctctaaaattcacgcagccatgtgttaagcacaaagcgaactattcttttaccttttactaaagaatactaatggcattttgaagggctctttctaatggaagaccctaaaaacttagttaaaattttaaaatatttattttgtataaatttacgacatttgtcctagctcgattaacttaaagacttcatatgtagtggtatattaagttacattaagaagttttgagttttatatcatcaacatcaaaaatctcatagaattatatatatcattgttcaaagatcattggatacagtggttaatactacattcctcggatttgtacagcagaaaaaagtgtttcatgaataattgtcaactcatctatgggaaagttttacaattctaaaagatgttacattagagcttataatcaataatcctgaaaaatttcaaatcgtatttggactgaaattttttcaggatggggtgttggaggctgtccagtaagaacgaggtatagtgctcagaaagaacgaactactcttttttattatgaggagatgctcttataagactacatgtcaaagagcccataacaatgctcttataaatagtattgatctttatttaaattaaattatagaaaaaggtaagtgtaccccgctgacacctcatcgtatataatgtgcaccaacttattaactaacccttggtaaaattggtaaaatttcagatgagatctgatattccaaaa

SEQ ID NO: 240118 - DNA, 1228 bp, Cannabis indica
cccccccccctccttgtgttgtcctttacattacctgctgcattaggttcgaaccatgctgcaacaagctcacattcagcattctccaactcttcattatcagccagtacctggaacccattctcaacctttgtagtcgaagtatgcccatgatcttgaactctttttcctttgctcactgcctgaaaaccatcagcatctataacaggttgtgttttcctatgatcttttttaatgacccattcctgttttgccttattaacattcctgcagtcctcgattttatggcctaaaccagaacattttgaacaaataataggcttccattcataatgaatccccacaagacagttcgatccaaactcatcttcgaattccagcatattcggaagctcttgattcatctgaacctcgattagaagccttggatagttcaatctttcccgctcctttgtaacactatctaccataatcggattaccaacttgacaaacaatcttgaagagtgatttctggccccagtatttgagctcaaggtcctcaagttgcacccatataggtacctgtttaacatcctctttcctgaaatttgtgttaggatcccacggtttcatgatcactgggcgtttgttaaagaaaatataacctccattcaatacttgatccctaatctccatggtattaaactgaataagaaaaacaccataagcaagcattttaaccttgtcaaccttatctgcccatattccttttgcaaatccctccaaaatgtgcaaagggggattagaccctaagacatagcacaaaatggaaggactccaaacactaatctcttcttcaatatcttcaaaattgatttgaccttattaggcctctcagatcgattaaatgactgttctaaattcttaacaattgatccagatctaagcacaggaggaattgaggactaaccctgaaccaagttactgttacattggttattggcgttcacgaactgaaggaaatctgatctagcctcctccgctcatttgatctcattcagagacgcagtaggagataaagaagcttgaaacaaatcctggagcccgttcgaccgcttggactcagccatcacttcctctggttcctcatcttcttcaaaaagctccaggggagcaattcctaacatagtatccatcttcttagtgcgaatgacatctgattcagaattagggcccttcttccttgg

SEQ ID NO: 240119 - DNA, 1251 bp, Cannabis indica
ttgataataggatatggtaactcactatttattgctcataggctcttctcagaccgccccctcctctctctctctctctcaaacctctgattctaaaggagttgttacatgtacctgatatagcaaaaaacttaattagtgtgtctaaactcacgactaataataatgtgctaatggagtttcattctaattttttctatgtgaaggaaaagaccacagggaaagtgccactccatgttccattaggttttagtacgaatactggatttgatatccacgagggataaaaagctttcgtatgaagttggtttataactaatcaacctcttctttgatattttccaagatgattaggatcaatattgaggtgatggaaaatcacattcaagtttatcccgaccatatctaaatggctccaagcaaactgatcttggtttgccttcaaaaaggtaattagttgatatttagttctccccccaaacttttctcgatattaacacacttaatgggattattagggtctaaactcacctcttccaactcctcaattggcttgagttggttattatcatcatggatcttaggatccagatctttaatttccttttcattctcttatgtcaaaatcaccatcagctgatgattagcccttctattttttagttccaccatatatcattctcgagctaatagttggtcgcctctaagagttcctattccagggtgagtggggaatttagggacaaatacttaatcgagcttattgcccccaatcctattaacgatggacgatccatcaacacattgtaaacagagggaatgtcaatgactaagaattcttgcatttgagtcgcggacaatggtggttcccccatggttaaaggaagttaaattatgcctaaacttgtgacactgtcacctgtgaacccacacaagtttaccatacaaggtcttaattttgctttctctagtcccatcttctttaatgtctccttataaagaatgttgagagatctttcattatccacgagaaccctctttatcctcttattcgcgagttgcactattatcaccagagggtctgcatgtgggtatcgtacatgtaaagcgtcttcatcaaaaaaataaaaataatgggcggttcttttgatttttcccttttcagaggttctagagaaaatgttgatgcctcattcttaacatcgttaatatatctcttttgtgcactattactatttcctgcgaggtgtg

SEQ ID NO: 240120 - DNA, 974 bp, Cannabis indica
tgcttagccaggtacctcactttgaaactctaccgagtttagacctgtccttttcatatattttaaccaaatgtaatggtgtttatgatgtgtatagattaaagatggttttgctgaaggaaaagaccttgtggtatcagtgatgtctgcaatgggagaggagcagatcaatgcccttaaggacattggtcctaagaattaaatatgatcacaatgatgatgatgatgatgatgatgctttagcagtagctattgctgatgaaagaaaactacaactttatagatttctattttacaaaattgattacaatgttgctgacagaatgttatatcaaccctttgtataatgttgtgtgcaaaataaaatgtctggttaagatggtattaaagctatgaaattacctaaaaatggtcttgttagttacaaggggagctttctatctggtttttatatgttggatcttgttgtgattaatgtttagtgctggtttaactgtccaaaattgtatttattaaatagttttgcttttcaagtgttgtttgataaaatttagagcacgactgtggtgggacggagctatgttgtcctcaattttgtatagtttggcaccttaaaggtgttcaaaagtgatcataccgtgttataattattaggagttttttttatattatttattaaattaaaatgtgtaaattctaaattgaatatggatttggcaccttaagatgcattttcaatgaggattgaaaaatatttgatgacatggatatattttaacatatttttaaggaatgctcactattagagtaaaaaacatatcaagaaagaatgctattgtaaggtgtcctttatattttctctttattatttcttttattataattttgtcttaaagtaaaaaaaaaaacaatttaatatatactaaataataatattattgggaaatttacaaaaatactggaatttaagtgaa

SEQ ID NO: 240121 - DNA, 1106 bp, Cannabis indica
tacctaatgaagatcttagcttggaattgtcgcggactcgggaattctgtggtagttcgacagctgaaggcgctgatccgtcaatcaaatcccgatgtgattattctgtttgaaacaagattggccgaggagaaatttcatagaatttgcctgaagttgcatttcattgaaggaacttacattcctcctattggaatggcagggggatttggtctctattagagaagtgggggttaaatgtaaggtcctgatgacaagaatttaataaatgtgatcattgaatctgacccgctaggtactctgtggaatttactgtgggtttacggccctcgaagtttttttggcaaaaaggctttttggaatagaattggtgatttattgctgaacactacgaatccatacgtgcttattggtgacctcaatgacacccttgcagatcatgaaaatctcaactattctaactggaggaatatgactcgataatccttcgatctctgccgaatggttgcaagaactgaagtaattgatttggggtccaatggtggtcaattcacatggtttcaaaaatccaatatcgcggggggaggatgcagattgaaagagccccgctttgacagagcgttggcttcgatagattggaggatgatgtacctaagtgccataacacaagtccttagcgctgctacttctgaccatcggcctattctcctcgacacgaagggtggtgttatttatagaaaaacgtagttcaagtacgaattaacgtggggaagagacctgaaatttttttgggtcattaaaaatgcctggaaggataagctccaccaaaatccaatggtcaaattctatcttaaactgaagaaaataagggatcagctatccaagtggaacaaagtccatttcaaaatgattggacaccaagtgagtgaagctagattttcactgcagcaactagaaaatagagacaatgtgaatgcagatgagctgactggagctagggacaaattgaatgaggctcttgccagagaagagattttctggaggcaaaagtcaagagttaaatggctgcaacagggagatagctgcactaaatttttcatggcaac

SEQ ID NO: 240122 - DNA, 1030 bp, Cannabis indica
ttaattttctttagttaaaaaaaaagtgttgctaaagctattttttctagtagtgatttcacattattagtttgataaatttcacgataaacaatctcttcgcaaagcaacgacttgttagtagaatttaggaggagcatgccaaacaaattctctcattcaaattaaattcataacaataatgtgtagtcatgttttggttggatcaaacacaaatgttaatcattcttgtaaaatttttggaaaagggctccactccatttgtgttttttttttggtgctaaaagatccttttagtacattgtaatatatttcattgttagatgaaacgaatttatagacatatgaataattctatataaatataaaacaactacataaatagtacatacagaaaaagagagaatcaagtatgtatacatacaattgatgcatgcaaatttcaactactatattttagtttgtaaaataaaaaagagaaattaatctctcatttattctccttgataatgtttgtggttgaatgaaaatgaatagtaagcttgagaccaatctcctatatttatattcattgcagataaaattagattttataatcattacaaataataatgtttattggtattaaaaatatctcaatcatagatattttgaacaaaaacctagttaagaaaataaaataaaaaattacaacacgaaccaaactaagaagtctaacacaattatgagtataattattaattctccaaaaataactagatccctttggagcattataacatttttggatgatctttttatgatcacaaactactagtacttaacatatttctcagtatcatattgttattggtataattaaatattagatctcatataagttaataaaataacttctaagaaatatcgctaactaatcgtgtgacgccatctatagaaggtattggacaccactgcttaatagcaatgctattaaagttattcccacattgctaatgtgtggaaacaaattaccatatataagatgaat

SEQ ID NO: 240123 - DNA, 631 bp, Cannabis indica
atatatatatatatttcaagtctatattcttatattacatttagttttatttgacattccttttgtcctacttgtcaagttcacaagcaacaaaatcaattggggcgtatgtaaaatctgttggggtaaacctcatgtgtacacaatctaaaacctttaaaaatatgtaatgatgtcatagttttcaatcttttatactagatatatgatctatgttatataaacaacatttctaaattttagtacttgaatcatttgctatttcattaattatggccataaataaatatatatgtgcacttacattttatattcattctgaccaaactattaaattaatagaataatttaattactatgacataaatgtaattaataaatttataatacagtactaataaatttataatactattactaatactaatttttaagtagaaataaataaaatgacatttattattaaaactagataaaacatgcacgtgacaagtcacgtgtagaattcttttcaaaatttattacatgtgttgtgtgacaaattagattcaatcactaaaaagaatattttttcttcaatttttaccataattttaaacttcaccatcttgcgaaatgaccaatacatata

SEQ ID NO: 240124 - DNA, 2192 bp, Cannabis indica
ttttttctttcaatatcacctatagaaactcgtctgatcttatctatcttaaaaatataagtgtgagtggtattttatatattaggggatatggatatggctacaactactaagttgttaagttagttacaacttaacaaactccttataacaatatctccatatcagcataagataaagagctttcagaagaaacatacacttcatggaagaaagaccaaagaaaaccctaaagggacttcctggataggaaaggtgccagctggaagcgactatccaggactcccttccaggagagaacagttaggcatccgaaactcctctccagaggaagactatttttccttaagatcccttctgagtggacatgatagaattttgggaacgctcttttggatgacatccatcattccatgagacttctttcggatagaaaaatttgacttctgagaacacccttccagatgtcatctaactttccataactagaacaattattggagatctttttatttggaggaactataccacaaattccacctagtttcttcaaattaaaatattgatattgatgaagaaagaatgcaacattcatagttggtgttctagatatcttagtatcctaacttctgagattgatcaagtttaagaaatgtttgaacttgtttacttttaagaccttagttccaaattcagaaggattatcttttgatctgaccttctctaatttcgccaaaccctctacattctttctagtctagtagagtcttatgtctatatgtttgttcttttcatgataaattggattcttgccaaaatggatggatgactgactatcagtcactccaccttttagttgtttcaatttgaacaacattcccagaagccataactcttccttgaatgcttccatagtagccataaattccccttccttgatggaaagggcaaccacaaactgtaagtgggccttccagcatatacagttccaatttttcatgaaaacgtaggaagtggtttattttctcgtatctttattcaaagcatagtcagcgtctacgaatccttttagctccaatcctttcaccttgagaatctatttgcacttcacaatctttttgttctccaactttggtacaactacccaagtcttgtttattctagagtgaatccatctcctcatccatggtatggagccattttgacttgtttccacctgaaatcgcctctctgtagcttctgagctctttaattttagtttgttgtactaccaccagtgcaaatgcaaacaggtctgcctcagcaaaccttttaggaaggtgaatcttccttctggttctatcatgagcaaactagtaaccttccagaactgcctgtccggatccttctaaaacatctgtttggtcgttgttatcttctggatctctactagctttcacttttgtattgtctttcagatccacaatggcttttgactatgaactttcttctggatcttttgttctgtattctatttccaagcgtgtagtgttcttgttccccattttccctgcatcacacgaagacagactacagatgtcaagtgaggattttctaattagttaaaaatcacattctagcaatcactacctttggtctacctttattagaaatacaaattatataccccttggtacctaaggcataacctaggaaagttcccttaactggtctaggttccagcttgtcaatagattggtatacataagccatacacccaaaggttcttaagtgtgttaggtttggagctctgtgtaccacatttcatacgaggtctttaagcctataactaggtttgggcttatatttataagttaggttgcaattgctagagcttcccccaaaatggtttctctaatccagaactgaacaacaaacatctaactacagggttcggttcatccttttcgcaacaacatttttctctggggtcttcactacagttttatggctagtgattctatattcttgacacaacttgtcaggtttagagttaataaactttaacccattatccgtcctaagattcttaattttaagattcgtttgattttctacctgagttttccaaactctaaactattctaggcactcactctcagttgctagtaagtaggttcaaacacacctattatagtcatcaagtatagaaa

SEQ ID NO: 240125 - DNA, 1283 bp, Cannabis indica
tatatatatatatgaaattttaagttctattttttaaatgtcatattttatgcaattatgtttgcatgctatatatatatatatatatcaaaatcttcttttttttttctctccatatttttgtaaatacctttataaaatatgaatcatgttgtgccatgtccatattttgagagtaaggcctagcccgacccatgtcctagatttttccgtgccatactatacgtgcccaaatatgacttggttatgagcgaatataagaatttgaatgcgagctaaaataccttatttctttttggattatttcataaatatataaaaatgtcaaaatttttacattttatatgaatctataaatatttttttaaaattttatggaattttttaccgtaaaaaaggtccatttttaggtatattgtgtaaatttttcaatttttatttttcatacaattacaatttttccttattttttaggagtatggtgaaatgggggtgatcaacgaggtggttggccaagatgggttggaatttctctagtttcggttggctgatcaaatgaagaagacgaagagctagggatggttataaaccccttatggtgtcggttatttagaaataatcgacgacataggggcacactctatggcgtcggttatttccaaaaaattgatgccatatgttggaatatattttatctaggatctagatttattgacagtatatttattaacgccctaaatataaattctttaaaacaatgtaaataaacacgtataaagttcaagtaaccttacattgattgcagcggaatgatatgtctccttccactcagatctctaaccctcgtttctttttgtcgctgagtattatcaagatctgagctcaattctccttcaagtgtaggattcttcacagtcttatacactatgattgagtacttgacttgcaatgggtggtcatgtacactttcactattggttcgaactttatgaagaggagagagatgatttcaaaataggataaggaatggatgctggactatatttttaccaagatctagatttactaacaagtatgtttattaacatcctaaatataaatttctaaaacaatgaaatttaaatacatataaagtttaagtaaccttacattgattgtagcggaatataatgactcatcccactcagatctctaactctttttcctttctgtagcagagtattatcaagatatgaactcgatttcccttcaggtgtttggattcttcacagtcttacacacta

SEQ ID NO: 240126 - DNA, 922 bp, Cannabis indica
aagggagaataattgttgcttggcaaccctctgcgttttctgtaaacatacagttttgttctagtcaattggttcattgctatgtgcaatcaatgcagcaaaatgagaatttttttgtaactttcatctatggtttcaatgatgagcagaaaagagaaaaattatggggtgatttggagaagctagctgctagtatacaagagcattggattatattaggagattttaatgagatattatatgctaatgagagagtgggtaggaaagctcaaagtaatccttctcaaagacttcgggactatatggaggtttgtgagatgacagatatgaagtactcaagatctttttttacttggaacaataagcaaaagctagatgatagaattttttcgaaaatagacagagccatggttaatttgaaatggagttctgccttgcctgattcagaagctgtgtttcttcgtgaattatcctttgaccacaaccccattctggtgtccatttatcgagattggagttcgggaaagaagccattcagatactacaacatgtggaagttagccccaaagtttgatgcaaaagtgagacaatgctggcaggaagatgttaaaggttcgaagatgttcaaagtggtttctaaactcagaaggctgaaaccaatcttgaaaaagataaatcgagaaggcttttctgagataccaaaggcagacatgggggcaaagattgatctgatagcagctcaggaagcactgaccaagaatccactctccttgtagttgatggaagctgagcaagaagccagtagaaggtataatggaactcataaagctttcaccatgtttctttcacaaaaagctaaaataaattgggcatcctttggagatgagaactcggccttcttccatgcttctctgaaatcaag

SEQ ID NO: 240127 - DNA, 1940 bp, Cannabis indica
cacttttttcttgtcatttatggtaaattttattttttagtattattattttggtattttaaaatgtgtaatattatactgatgttaacattttaaaattagttagcgatttttcttattaattattaaattaaaatgtatgagactcgatattaaaatgcactatttagaatttacttgaagtatttcttaataattttttttttggttttagaaactagctttttaactatacaatatatagtgacgagaaaattatattaattattatgtaggtattcatgagggaccaaaaaatatattctaatttaaatagatataatatgtaccatatacttattttagtaagtgtgaagtttttttttattattttaattattatgctgatccactattttttatattttattatggatttttttaaggggggttgtattattttattaattttttttttttttgtttttaatttttttttgtaaggaagatattgtattattgattagtccctcaaaaaataatttcgagaatatccaataaaaaatcttttaaataaaaaaaagaagatccaataaaaaatgaaaactaattaatgggaatggtgatgggattgggaccatttttgcattagtctactactactagtagttgtagacttgtagtagtcgtttcttttttgctgttccactttactgagtcagtcaagtcctattcccaaaagaaaaaccaataacatatataaaaagaagaaatactaaaaggcatcagtggtgtcaatcaccctcttacgtgtcaatattgttattggtttaatttagtatcagattttatatagtttaatataatagtttgtaggaagtatcgctagtcaatcgtgataccacacgtcttaaaaatactaggcactggtacttaatgtcaatgctcaataaaaactaatggtaagaaatgtagtaagagtcaatttctgaaaatttggtgttggaataatgtaacaatacatacaaaaacataaagtaaaattggaaaggtggcaaggaaaagcatgtatactacgttaaagcattaattgaacatgtgccttgccatttatgggatccaccatcactaaaacttgtacgtctgttcatggaaaattcaaagattgaaacccttttcaaatgaatggtttgtatttgttagtgcacaaaatcgtttcaaataatataataaaaataaagtgcagtttttttattctgaaatgatatagttttaataaaagtgaacttaaacgcagattttaataatacaataaaaagttatgggatatatatatatatttcctttaagcaaaagttacactataatttgcgaaaattcctaataatttttgtaattggacaaaaaatttgtaattagttgggtaaatccaaaaagaaaaagaaaaaaatctaaaaaaaaaattgtgtgtttttaattaattgaaaatggattgttatcatttctcatatttactttctgataatcaaatttatttgtgctctatctatatatgtatacgtgaagtatatttttgagaaataataattttatttcactcactttattatcgtttaatcgattttttttttactttaaaaaaactcaaatatatataactctttgttatattaattaaagaattatttgcgacataataatatttcatgtttaaaattttatacacttatatgataaagagattgagagagtcgtgcacatcatcgaacgagacttgggcaccccgcgtgaagcaaaccaacatcttcaaatctcataactttttcacttaaaaattcaaaaccttaatcgattgagaaaagaaattaacaagcgtgagcgaacaataaacgacgaagagagacaatttttttttaaaaaaaagagacgaattttttgatggagaggttctacaataaggg

SEQ ID NO: 240128 - DNA, 1675 bp, Cannabis indica
tggtcttttatatttttgttggagttgtgaacttgaatgaatgtgactcattgagaacatgtgtttactttcaatgaaattccacccgattaatctcatgatcaaaagggtcgttggttgctcaagtaaatgaaaacgagttaactttaatggctgcgagaaccttgcaacttacggtattttggatattcaagaggtatttataactattaattattgtaatttaatatacctgatgttgatgcagaaatttgatcaacattcgctcgttagattgacgagaagaaatataagttaagtaagtaaatagagaaacaagagatttatagtagttcactccccatattatgacggtaatggaattacgtttatttcgagtttttattgcttacgataatatcaaaaaattgactaaggcaagagctctatatttttagagagaaactagagagagatgctctaattttatgtgctcaatatgaaaaatgaactagtagagctttccttttatagggaatgtgaaaaatgggctagtgaaactctcctttaatgggaaaagagattctattaaaataaaatgaaaataatacaaaatatatgaaaaaatcactttgggttgatcttggccattggtgattatttactggctaaaattgatttttgaatctcgttagttgaattgttttgggtaatctgtaaaaaaaatagcacgtgtctaggggtcaaattttggatttgattttttttagaattgcgatatgagtgtgagatatgacttaaaggtctttgaaagagctttaaaataaaagttgagtcgcatcaatcaaattaatattgagagaattatggttgttttactaaaggatgttcaggacccagcgcccaggttgacatcccaacgtcaaactggacgttgggtgagtgaaaaaacgtctaaacttgtattttttgatgtctaagtgatatgttacactacataatcaatttcttagatttggtgaagttgttcactagttctcagagatgtcgtttttttttgtgaaatccggtagaatcaaaactcttagattttatcaatattccagcttgccgaaaaggtgaaatatcaaagtgtgaatttgacttgccacaagtcgtagatctcgtttactacgaaaaaatagtcagatgctcgagacataatcaaaatcatatgagtagaacctagcagcaggccacacatcaacctgggtgttggatgctctttggggtgtttcacggggctcgttttgatacttttatgacactcgagattgcaaacgaggtctcctcccctatttttgaccaaaataagaaaaattcttgaagcaaaatttgaggagtagaaacatgcaaaccaggttgcatatcaacgtgggtgtagggcccaacatccatgtcaacctagatgttgggccctattttggcctccaaataatctaaattatatataaaagtccaacacttctgtggtaaattacacatataatttgcattaagcataaaaatcctaattgttacacagaccatacaagtacttttgtccaatatcgaaatcaatgtctatttcactatagcataattaacactcactttttaaattttgcactgaaatcataaataaataattcacaatcaagcaattataagcattaaa

SEQ ID NO: 240129 - DNA, 1273 bp, Cannabis indica
tatacaactaatgttagagacatattcaaactatatacacaatttcacattatttaatttttttacttaaatgtgtaaataatgtatcaaaaatatcattagtcttaaacaatattattaagaaaagtaatatatatttaatcgtaaccacttttgagatgtgaaagtaaaggcacaaagcttcgttggtggtcttgatcattattcagataaagaattctctgacagttacctttaaattatttattaatagactatatggttgttagttgttatacccttttcttttcttttttaatactatatattaacaactataatcatcttttcctcatatcttggcttcaaagcaacaaatattcttatccaattaagataaaaagaaaatagatttatattaaaatgaaggaaaaagaaaattactgtggtgattcttcattgccatcatttggttttagaacttaattattttatcgataatcacaataaaattcatgttttgatattgatcattaaaataaaaaaaaaatataataaaaagataaaacaaagcatgcttgttatattacatgtcaattagcaaaacctttggcacgtatttgttgataaatattaaatatagtacagaggactgagccaaactatagtgtttttttgggataaattgaaaattacattttcttataatacattaattaaatataattttaattaataagtataaatttagatggtgaaatttacaattacagaatttgggcatcagcaacctatcatgaacaaagagagagacaaaagttcaattgggagcaccagtgggatatcagccaaaaagactccgacactcaaattagtacgattgtagtaaaaaataacaataacaaaaaataaataaaatgcaaatggtaaccggacggatgagtggacaagcagacaaacggactaaaggaacaactacagtggtgaggcttaaaagtaaagtttagaaagggcgactgtctgcttgagtcagtgagtgtgagtatcgaatgttcgatgccttgcctctgtcgtatggtttcttttatggtgttccctcggtaccattgccctccatccacgtcactcattagactcgttcaatttggttccttctctcattttacgggaatggtaactgtctttttgactagtttaatatctacttggttccacccgtttgactggccgaacttggacccggttgcgaagtgatccgtcttatggcccataggctcactcgtttgtctatttc

SEQ ID NO: 240130 - DNA, 1171 bp, Cannabis indica
aaaaatcaaataaataccaagacaatgaaaaatgaggcctacaaagttaaaatctatctggaggaatcctcataaaaagttaagctgtcgtgatatattcaccatataatttattgttagattttaaagattcttcgtcaggaatctagaatttttattttgtggggctgaaattattttatcataaaaaatatttttacttatattataatcactattactatatttatttatatttgtaggaatttttctattattttaatcataattattaaattaaaaaaaattacctttaattttttaaaagacaataatttttattagtggagattataaccccacctattaatgagtggatccgtcctgactagtgacatgtcataatgaaaaagacaagaaatatacaatggtgttataacctatttactagtgtcttgtgtttacattagatcgaaaaataactaatttttatggaaagataacctggctagatagtagaatttatgaagtatagcattgtaaattggcataaactcaagagaatataaatagggtaaatacttgacttttatccatatttagtgccttctcttttttgataatggtcaattggcatcctctttttataaagataaatgctaaagggtactagtaatacttagtatcttcttatgtattaatattactattgatttaactaaatatcgagtcttatatagtttaatgtaataatttttaaaaccaatcataaagcaacatgtttagaaagtgttaatcactattgatacctaatagcaattctcttttataaaacctacccactttggtagcctgatttgaattaagattttaatatttccaaagtggcccttattttgataattatccaacttttatatatagttttattattttttttttagtttatttatataaaatatttgaattaaaatcaaaaataaaaaataaaaaaaaatacagttttatataatattttgaaaatttaacaaaatttttataaattatatattaataaattttattatatattttttgcaattctttttcattttttatttttttttttgttttcttcaaaacttcccaacttgagagccaccacgacctagttgaaatacacgcccgagtcgcgccaacgggtgcgatatac

SEQ ID NO: 240131 - DNA, 3375 bp, Cannabis indica
taaccagttagtcttaaactggcgagttgtacctgctttaagaatctcagttctcaaaaatttcttcctcagatgacataatttgtgccaataccagcttgaatctagtttaggattataagtccagaagctcaccgattttagatagatgtagcaacatctccttctatgaaagagatcgtgggccctacaagctttggttgcttataacccctttctccgatagccaggatgtcgcttttggacttgtgatggagtgtctgagcatagtgcttcctagctttgctagtctcgcctacaatatggggttccccgataatgatccctaagtgacccgccactagaggtgacattaggtctccattttaggaaccttgtgcctagacggggatggttcttccttataaggaattcaatctccctctttaaattttgacacttgttggtttcatggtcaaaccgacagaactttgacatgtcttttttgctcaactcccttttgatgggagagggcttcttgtatgggattgttccctgagtgaccatgatgatggcctcaggtttctctatttggaaggtgaaataggtaaacttctcctctttttctttttggcttcatggtataggagaagtgttgtacctcccctttttgccactatttcttccagagctttttttgttgcacttgcccccaacgttctttccactagaggtttgggcagagttgttgtgccagtctgcacacctagaaaatcatggggctacaaggtgcattgagattgccaattgttgactttccctgtcttggcttatcaaagagcttcctccagcttgataaagctataaactctatcgaggaactccttcatgtttttggttaagatcctttggatatctttccagaagtcactcagtggaaggatgccccccagtatggccgtataccggccttcttctataatgcctttgaccttgatggcgtcggccatgaacctttggatgtaatctgttaaaggttctctttgtcattatttgacttcgataaggtcttctagctatgatggtataagccttgaggacgagaattgtgtgtagaattctcaagaaaactagttccgagaattgaatcctacggcaagctttaagtatcactattgagctatttctaacaaagttttcataaatatgcaacactacacatcacctgtaagtatttttttggagatcgagttgcatcataaaatacttaatgtgtgcaagtgggtcttctcacccggtatacatctttcatacccacatcttgaacttgggcaagcgcaagacatttttgtatgccaagaatggtgatccccttgatctgtcaagttctaggttttggaccagttaggcccttgattatgtcccttatttagtccaattgtgcttgcacagaaggatttgttgctgcaaggacttggctgactggccctccttggacaggttgtaaacttgaatgtgtcaaggtctagccagccatactttaggagactgtatggtggaggccggccacatgtgagcttagttgctagccttgatcggccactcctaggtggggagattggtcctggcatgcctagcctatactgggcaactgttcatggctgcccaaccctatgttgggtagggcttggctgcccatgatcctcatgttggctggtgtagccactatgctaataggggtagatcgcaccaattgctagaattaggtggatccaaaaactagaagtgattaaactcacttctcaaattattattttgggtgtttctacccgttcccagccctagccggttgatgattagcctttgggttacttgctcccagatgcctcaggaagggatttcacttccctggcctgccataggtgtattactagagggctggccaatagggaagttgttgagcctcagatcactggtcgacccccagactacttattttcgagatttggctctttttgccattagacctttgtggcaagttctatcctccatctagtagggaaagtctatccttgttcttgaagaacctggttgaaagtttgttgatagaccctccccgatctatcaactagccttccttggagtggatctatgatgagatcctggcctcttctggcagttctttcattaaactgtcgtattaggtcattgacttctctgttgtggcaatctagttctgcctggtaagattagaggatgtacccttggtcatccatcaatcttagaaatttgtgtctctattgagcaaatacatcagactcaacaacgaatgattcttcagtttggttggcttggcacacgacctctctaagtcaaactagcttgagatcttctcccaagtctaaatggggctcgccaatagaaggcttgccaattcctagccctgtttctctagcatagtatcggggaacaggtccagttgttgtgccaaggggttactccctgtgtgtccttccttcaatgggaggtgcaagtggagtgtcttccctttaaggcaagtgcatattattcagatccacagagatgtttgtgtcaacctggaaaactgtagtggctagatttatggtgcctactgagacggtaggattttccacatctgtagtgttcatggaaattccaattgtgactggagcatgaacatcaggatctgtagtcaaagggtcttaagggagacccgatgaggcagaggttgtagctagagttctccttgtgttaaccatgacatttaatcaactaaatcaacttgctctcaataaaagcaccaaactgttgaccttagatttggccaaccgacaaaggagtcgtatataatgttgatgcttgccacgtgttacacaataagaacaataaagtaaataaacacaagattttatgaggttcgacccccttagttggcaggtaatgacctcctccctttctcgttgtattgataccgagagataatactactcagatcactatagtgatgggatctgaagtatctctctaaaggttacaatgtaggaattagagttgccaaatctcaagtatgagtatagcagtgggtgtgtgtgagagagataagttatcagacttagagcttttgacttaatgacttagggttctgaacttaggcttttaaggtttgattaaggctctttatataagagatcttaaacccttcaaatcctatagggctagccaagtgtggcaagccaatcctcttgaggtggctagtttgtcaatagtcgtcctgcttgaatgcttagagtcctcgttggttacaatgttgagtagataactttgccttcttactggtgagttatagtaccatgtggcgctaatgttggccatgta

SEQ ID NO: 240132 - DNA, 1632 bp, Cannabis indica
aaactaataacagcactacgactactactactaataataaaaattatgataaaggagaaaactaataaaaagtttggaacaagtactaatcgatttgagttgggtttgtaataattaacttgtctaactaaccctttccattatgtactcgtgcctttaatctaactctcatcaaccaacttcaaactctcgtatatgaaatggcaagaccaaagaattattaaactaattgatatattattattatttgagatgatgtagtagttgtcgaaagaataataaatgaaatacaaagtcttacccgtaaaaaaatacatatgatattatacttggacaaacaatttgttgtgtatccaacattaatgttttctgaatgaaaaacaagttttattattattattattatcttattatatatcaacgaatttgtgggtggcacagttagtgtgttagtgcactcgagtctcgaccatgatttatcagcaaggttatgtaactccattaattactatataatataaatgggatgagattatgacttcaaattttgtcagtatattatgctttaagcaactctatttggtgtaacattgacttaataaatctctgacattgacattatgaggatgggatgaggtggctggctagtacaaatttaatatttgattttcatttttttttttgtgaatgcacgcttacgtgtactgcaaaggaaaatgcttacttcaattaatgcaatgaacatattgatatgccaatatcttttcgttttgggtgttgttgttgttgtggatgatcatgatggattaatattctagagaaataaagattattatgtttgaattattattgaaaaagaaaatttttcagatgaatctgaaattttttaaaattttttagctgaatcttacgagattatgtataaaaaatggatacaggttatttttaaaaataaatcaatatttaaaataaacaaacaattgtcaaagaatatgaagtgtatttgtttaaaagataaaaaaaaatattctattaaaaaagaacttgatttttttttttaaaaaaaaaggttcaaatgcttaacactggatcttcaatttttgagaaagttcagaatgcaagtcaagagacgtcgttagtcttggatcaaatggcactaaatgttttggaaaaataaaatttgtaaaatctaatgttccaacgaattacttgatgttgcaaattcaaggtctgctgctgcaaatgcattgtctgcagaagcaaagtctccaataagttcaaaaagagtaagatctcaagtaaggaggtttgttccaatttatcactttctttttggaattaaggggcatattaggcctaaatattttcaccatgcaaaatacgttcaaaacaaattattttggtagtttgaaaaaatttccaaagaaacatagtgcttcgaaacaaaaatggattgaaaagggaaaatatcttactggattttttgataaaagtgttgcttttcaaatgcaatattttgacagtaattgttctagacatatgacaggtgacaatgatttacatttggcaatggtttagcaggaaatatcattggtttaggaacttttaattttgaaggattaccaaggttga

SEQ ID NO: 240133 - DNA, 1277 bp, Cannabis indica
tataccaataataatatatcacttattgtaatgcttgacaccttaaggtgacccttaacatttctctttgctcaatcgcttattattaaagaataaatgtataaatacttaaccttccatatgctagtgaagttgggacttaggagtattaatccatggcttgcataaggctagatttggcctataacgttaccaataccatggtgagtggttaattacatggtaaatctatccacttaaagattattggaatattattaaaagggtgttcataccttaagggcattcctaatcattgtttacacttcaagaagatagagagtatagatcaaaatattaagctggttggctatgtgattctgactatgttgggaatttttataagagaatagatactacaaaagttgttaaggaaggaggtgatttagttaaatggactaggagcaaatttactttttaaaaaatttacttttattattcacaaattttattgtaattaaaagtaaaaattcttatagtaagaacggaaacatagagaaaatataggagaccaaaatataaaaataaaaattaatggaggccaatatataaatttatgaataaaaagaattacaaaaatgtaagttaaaaaaatacctctatcaagtaaggaccaaactatccaaagtctaaagtttcagattttatttatattttttattaaagacccctaactattttttatttacacattgtatagagtcatgctagttttatcttcctagtatatatgtagtgtttcatttttagtagaccctattatttacatgtaaactatatgactgagaaataagaagtgtattttaattttacatttaaaatataactaacagtaactcttttaataagttatatgtagtagtaacttgttattcttttagtgtatattttgttataattctaaagtaattataatttacttttgtacttggttaataggaaaatctatataactcacatataaaatctaacgatacttgtaactttctcattttaattcatttagcttttctttacagatttatgacttttatacacggatacgtcatattggctgcttctcagaatgacaactgatcttacaaactaacatgagtatttctaacgtgtcttgtcttcacttgtacacatcctgaaaaacttttcaagaggtcacacattctaagattactctaagtcaagaacacttaactttagagttatcaagtgatagaatactagaaaataagatgcacctt

SEQ ID NO: 240134 - DNA, 1000 bp, Cannabis indica
gacagctcgagttggtgaagtttagggtcataacctcagttcagcacctatgtctcaagttcccaactcaatctgtagggtaagaaccgtctgcgaaaaccaagctaaagccaaaaaatgttataatgtagccttaaagcagtcggtcctggtagtcgggaaccacccggtcgaggaagactaattggatctgcatgtaggtgcaaaaaaagtactagagctaatggaggaaacaaaagaaattcaaatatgtaacacagacccgatgaagcttgtttatataggaagaaatttgaggaaattttcagcactttttgagagttcccagatgtattttcctagtgtcacaaagatataacggttatcgatccaaatgaaatctgccacgtatcgaatgtgaatctggacctgcccgtaatgtagcaaaaaaagacgtcttttggatcctataaactcgaagtggtacccgaatccagtcttagtcccaaagcccaacaggatctagaaaatttgcatagatttcactgatttgaataaagtatgttcaaagattgttttcctttgccaagaatagaccaaatggatgcctactctggatataaccagactaaaatgcaaattgcagaccaagagtacacgagcttccgtaccgacaatggagtacactactattttgtcatgccattcgagctaaagaatgccaaagctacatactagaggttagtaaaccagatgtttcggaatctgttaggtcgcaacatgaaagtctacgtagacgacatgttggtaaagtccaagactgccaatggtcacacaactaacctcaatgagtgctttgaggtcgtgcaaaaatacagaatgaagctaaatccaaagaagtgcacttttaggctaaaatatggaaatttttggtattttattattgttagagaattagctgtatattaggtgtaaaagaattagggtaacttgtatttagtagtttcctattttgttggta

SEQ ID NO: 240135 - DNA, 1245 bp, Cannabis indica
tatgaatggtgtattgtagaattttcttaaattatattaacaccttatattatatcttattatttatttgttaccgttactattcaaatcaatacgttcacatttctagtgccacaccataataacacgcgtcaattttattgttttcccaagttttactttttacgtcattttattataaattaaaaataaaataaaataaaagttgtagcttatatagtaatagagaaataatagtaaaaaaaaaataaaataaaaaagaaaagaagaaattaataggataattaattaagaaagtttccaaaagaaagaaagggaggaagtttgagaaagtttcttttgggaatgaaatgaaatggaatagttgaagagttagaatgaaataataaaaagggataataagtaccaatattcaacattcaatgaaaattccaaaccaagccccccctacctatggatatatttatataaatataaaaaataaattaatgtaaaaaaatagtatattaactatacacatttttaatgtgattatagtagttttgatagtagtgttggattagactttcttattcattatagagtctgaatatttaattttgatctcgctatattcaaaatcttctactaattctgtaatgaattaaacgttttattagttgatattgttactttgctttctagtcttcctaaaacacccataatttttatttattgtatataatcaataaaattgctcataattaattgtggtgaactaacttgaatagattatttttctatcattttttattgatgtattaatttctgttatgaataaatagtttatttttttcaaaaaaaaaatatttctaatagaaaaaatatttaacaatgttgttccttcaactatataaatatatatacacagtatttattataattttatcctcaaaatttttatttgaacatttattattaagtctttaatttataattttctagttaaattatgtcttctaaaaaaattggagcacgcaaagccttttatgataacaaatttcaaattattaaatggtctctaaattatatattccaccaatcaaaaattgacttatatgtacataaaaataaaattatagtgtaaattattttcatcctcaaataatgtaaaaataactaatatgtgagagagtgtgtttaactataaatagattaattatcaaataattttgagttaggagctagataaaaacgatttttgtg

SEQ ID NO: 240136 - DNA, 873 bp, Cannabis indica
tgtttagttttagttttttttttttttggtgaaaaaaatctcacttttcaagggcacgtttgggaaaaagctaagagaaggaatcaaaattaagtgtcatggaaggtaattacattataaattttgtaatttatctatgtaatgtaattgtgtaattatattggaggtgagagttctcaactctccaattacaatgtgtaattatttaaaaacttcatgctaaatattaagtattaatttttattttgtgtaattactaattagtttgtcaaacacaattaaaaattcataaataattaccctcttataatttataagcaattattactatattttaaaatatactgtgtaataattatattttatagtaattacaccacttattaattacatagttacttttaaacacgtaatttttaaaagcagatattacacaattattttcaaacgcatttaaacttctaaatgttatcaatggcagcattgaacaacttaacgaatagccaaggcttccactatagtgtgctcaaagcagcctataaaactcttcatttaatatttagtgaaaatttcaccgtatacccattttaacttagcccatttgatttttaccgttcttttcatgttatttcatttatagccacttttataagtcatttccctattttgcccttagcttaatcaaaaaaaataaaatcaattacttttccagagtccaaatatgatgatcacctccgctcctcctcttgcgataattacattccgatatgatataaaaaaattcttagcaaaatataaaagctttcttctcatggagtacagtgactattaaaataaaaacaaattaacgatacatataaactaaatatgcat

SEQ ID NO: 240137 - DNA, 1543 bp, Cannabis indica
caaatagctactgctttcaacaattgaaggttttatattataaaatatttttaacacaatttataatgtgaaaataaaaatacttgtattttgatgatatagtgtaatggatagaggtgatactaatttcttcaaagcttgactaaaaaaaaaacaatcttcaaagcttgattgacacacgaagaatgaaatgaacaagctgaataggataattgccaataaaagtaaacaaagccaaatgtttagcaaaagtcattatatgactaagaatatattacataatcttcacagcctatatgcaaaatatactgaaaaagtaaatacttgccttataagcccaatagaggaaagagcttttgtcatttatctccttccccaagcgagcgattaacttagatggcgtccataacaaattctgctcatcaattgtagttttagagggttacactagcaaatactccaaatactcacacaatgaaacacgcataacaaaacacgatactcacatcatcaatttgctcctttaacatctggtcaaaaataggaatgatccaatcctcaaacttgcaataattatcattgggaaccaataagttaccaattcgattcaaccctttggagtgcaaataagctcctggtagagcaaaatcacctttgtaagttggtgcaagacattttataaggtcctcttcaataccaccagctgttgtaactaaaacatccaccatgtgatgctcaactagataacgaattgtatccctaacaccagatgaaaccaaatttgaagtaaagcccagaaagactttacatctcacagagcttctataatctaaaactttctcctcttcactggcgtcctcgcctatagtctcatcagcaagtctccaatctagctttaataaaatataaagataaattgagagaggcatctggaagaggaagttgaataaggagaagaagagaagctaagctaaccatttcatttacaacttggatagcatcaccaaggttggaggcttggaatccagtagagaccatggagcttaataagcgtgggtagtccactccctgattgaaatcgtagccttcaatcttagagcattttccttccagactttccgattctttgaaggctgctgtgtgagcggcttccaacagatggtggttttccatgctcttccaaactgtttggaatgctaagtagaatacaaatctatcagtttcaaccaaatgagaaacctctttcaattaagaaagttgaaacttgaaactattagggttgctgagaagtatattgtggatattgttccacattgaataaataatagagtattgagccatatataagaacatagactattcaatttattaaccccatattttcaactatcagagccatatctcttacgggcatgtgattattgagcaaaaaatagccaccatctcgagggataatattgtggacattatctcacatggaataaatagtagagtattgagctatatataagagcatgagatactccatttatcaccaattggt

SEQ ID NO: 240138 - DNA, 2272 bp, Cannabis indica
gcaaacaatatagtaattcccttttttatgccggttgaggttatagcatgaccaaatatctctttgccatagctatactataacatctgagtcactttttttttgcatattctaaacttaattcttaatttgattttatttattgctcttactattcttatttttctctctagtctttcatttagttgatctcagtcaaatcaaatattacaagaaaaatgagaataacaagattcacagcaactaatagacgacatactttttttttgaaacagaatttactataatattttaaaacgcattcaatttaataatctaatcttgcaaaacaatatattggactgagaacaagcgagtaaaacggagggtcttcatcgattaggtatatactaagcttaaacttaggatggcaagctcattaattacaagtttatgactacacctcattagtataaaagtaacccaacatcaaatatgttaatttttccttccagacattttgtcaaatattcactcaactcttaaaagtacatcaattcgaatattcacaatagaagaaattccatattataataccacagaaccatacttgttaatagcaaaaataggtggatttcttctttctatttcactatcttattaagtattcagatgcatttcaaatctattcccaaaaaagactaaagaacaacaatatagagaaatacaaacctcaactggcataaacaataagtggtggcaaacaatatagcacctcataccaatatagtacctaacaatttacaaagaggatcaaacaaaaccaaatatattttttttgcacttaataaacacttgcagaagggaccaaagaaaccaaatgtgttggaggaggaaagaaacaagtaagcttaatacaaaaatgctcaaaaaagattacagatagaagcaagtagttcatttgttaacccaaaacaatcataatacgcagaagacaataaagttgaaggggaaaaagagttaccctactccactcatactttgacttcattatcttgcaaaagggtagcatgaactctatataatttcctccacaaggtaaaattcaactgagaaaaccacagtaaagtcccaaattagtagacccattgaaaaagataaatttctacaccacactaagaaaaagaaacaaaaacttctggtcagagacaaaattctattaaatcaatcaaacataaaacaaccaaaaaggaatataccttcccaaaaatataaaataaatgtgtactgtaatataaaaatatatacatacatagataaagatataatcactgtaaagcaacttttttttttcagggcaaccaaatcgacaacacacaaaatccctttatcaaaattcacttctcatgaacttacaaaacatagagcaatccaatatacaaaaatttcattgacaaaaacaatccaatatatctacctataacaatattaaaatcctcaaattcaataaaaataaatctcagacataatagaaatacatacatacatatatatgtataaataaaagaagaaaataaactaattaaaagcaaaaaatacatatatatactgtatacacatatacaaattacaaatatatataaatggacgaaaaaatatagatctgacaataaagagaagagaaagcacaaactagtgttcgtatccagtgaccatgtttcgtcgtccctagctctggcgttgttccatccccaacatcttctccaacacttgccgcacctgaaaaacgaaaggaagatggtgatgcgagatgtcaattgtcaaatgtgagcaagagagagaatcgacaagaggagggagagagaacgagagaagaaggaagaatcagagaggtagataaaatatgcgactgaaattttggagggagaaagagagcgaaaaaaattggggaagaaaagaggggcaagcattgtgacgggttgggcagctgattagggttttttcagggaccgatctcggcgggccataatgtctctgtcgagattgggtagtcttaatgcccataaccgtctactttaaattttaaggggagcaatctcgacgggccttttatagcctgccgagattggtccatttttcagtgatcttttttttcaattttgacggaacacacaaggcccgccgagaatgatgtgcttagaacttattctttttaattttacagtcaatctcggcggatacacacgggcccgccgagattggggctccgaatttgctcagttttcttgtagtg

SEQ ID NO: 240139 - DNA, 893 bp, Cannabis indica
tcggaccactgctcttgtgttgtctctattaaagctgatatagaaattggggttaaaccatttagcttttacaatttttgggctgaccatcctaatttcaaagagctggttttacaaagctgcgagaagcctcttactacaccgggtatgaaaggaatatacttaaagcttatgagactgaaacatgttcttaagaagttcaatcatgaggcaattagtgatattggtaagggttttcaacaagctaaagatagatatcaggaagctcgcttgaaggctcaagctcatgctggggattaagagtatcaggatcaagagagggtagccgctgccaattttaacagttgtgacaaaatgtaccataagttcctcagatagagaagtaagatcaactggattcaaaagggagatgataacacaaagtattttcatgcttgtattaaaaaaaggaagtctgaaagcaggattgcttcattgaccaatgatcatggagacattattgataacttctcttaagttgtgaatcacttcatgaatcattttaaaggctttatggggacaaggaatgatactgcagcaagactaaatatggagtgttttgattcgaattctagattgaatctggaccaacaaattcttttactgaagcccttctccaataaggaaatcaagaaagctatgtttagcatccctgactcgaaatctcctggtccggatgggttcaactttggatttttcaaagtgatgtgggctgatattgggaaggaagtttgcaaggctatctctgatttcattattacaggtttcatgccaggtgagcttcactcatccatgatttcattaattccgaagcatgataaccctactaatgcagttgactttcgcccaatagc

SEQ ID NO: 240140 - DNA, 1636 bp, Cannabis indica
ccgtaaatgatgatataacagtcaaaattaacttctgagattgatagtcaattttttgagcctgggccgcagtgggacttgctctgggtaagttcgagcttatttttgtaactctattggagtaaaatttgaggttgatgacttcagaattggaattaaaatgtgagacatgacttaataaaagcattgaaattaaataacttcaaaactaaaattgaatcgtgttaatcagatcaatattgagtgagttatgaccattttactgaaggttgttcaaggcctagcatccaaattgacatcccaatgcagttgacatctaacgcccaggttaacatccagcgtgcatattgacatataacatcaacctggactttgggtgagtgaaaaaacgtcctagggatgtcttttttgatgcctaaattataatttgacatcacttagtttgttctgtgttctggaaaaattagtcaccagctcttggagatgttgctgatttgcggaaatgaaagactgtaaactcttcattaacaagtggtcttcccatgttaaaaatgagaaatgcaaagttttgaatttgacttctctgaattcatggatcttagttattgtgaaaactatatggacattcgaagtagaatcagataagcagaacccaacgcaccaggccattatcaacttgggcgatgggtgcttatttcagagcttcctggatgtcgttttgatacttataagattctagaacttgagattaaggtctccctcttcgtttttgaccatcctggaatgaatgctcagaccagatttgacatttggatcatcgaaaccagcacaccaggttgattgtcaacttgagcgctaggcccaacaccagctcaacttgggaactgtgctctgtttccaggccttcgggtttgtggtttgttccccgagtttgcttgaatcttcattacttctgataaaaaaaatgccctgaacacttttttgagaatttgattagaaaaggctcaggttgacaacatgtaaacctgggcactgggtctcagtttttgccccttggaaattttgtttattcctagaaatagttgaatcttaatttttgctaaaaacagagaatatgctaagaagagttcttggaaaacatcatcggaattggcccaggttgacattgggcgctacgccttgcttttggcaccaaggaagtgttatttcttccccgaaattacctatttccccattttttatgaagatgaagatgatgcaaaagtcggatcattgatctgataaatggaagtcgcctagagtgataaattgtcaacctgagtgatgggtgcctgggcaccgggtactctgggtgctcaaaaatgaactttcgtcgaatctgattctgatgcctcaaatatgtctggtatctctagttcatgtccaaatgcaaagcttgacccatttgcactaagacggtcacgaaaactgaaaccctagttagggatgtcaacctaggcactgggtgaaacagtaggtgcccaagttgactttcggggggtaagttcatgcaatttcagcttccgagcctagatttggttgctccaagtcttcatggtacaaattaccaaaagatagttagttggaaacgagttat

SEQ ID NO: 240141 - DNA, 2641 bp, Cannabis indica
ctgatagaaattgtatgtatattatgatcatagtttgaacaaattgttgatcacatttcaaatgtaaattcatacttggaaattataactaatgagttgttccattctaactagatctctatctagtgttattgctgctctacataatataagatgcttgaattgaatcccttatattagtaaatgaccgtagtaaaggtgtagaaagctttagtgcatgttcacatcataactaaaaaactgtttttaattttaaaacagaaaattgttttcaatggtttttgaaaacaatttgcttgttggccttgtttttgaaaacagttttcaaaaaacaaagttacaaaaaaacaagaattttgaaaacaacaaaatgttattttctgttttaaaaaccaatttacttttactcaatattgtttttagaaaacactattttttgttgtcatttctaaaagcaattttttaaaaacaaaaaacaaaaaacaataccaaacatgctctaaagctctccattaaaaaatctttgaatgactaagagagagaagccaaaagtaaaacattaaaacaacaaatgggaatgggcaaaacaaacaagatgattttgtaatcatcagtagtgtttgggtaattcatcacatatttctgtacggtgtacagagtatctctccttctggttaatctcaagatactattgttttaagaatgttattaaataaaatgaaatgaaagaatgttatgaatttgggataaaggtgattatttgctactcaaatgattgacactttataacatcaaaccaatcagaatcagacagctcattgggttagtaatagagtaagaggccttaataatatgttgtaataaaagggtggacttacatacataccaaggggaaaaagcatcatcagataatcatatatatgctgaaaaaaccccaaggcagtatccaatccatacataatacattcattcatacatcaaactatgatatcataataccatataatgtcatcagaaataaattaaaaaaaaaaagcacaagccaaacaaagccacacaacacaatagtgacattacaaactctactacagaactaaacaaccaataggagaatcaaggaaagaagcatgtgaagcaattcctcctgagaaaaataattaaacattagtaatagaaatcagctaaaaatgaagctataagcatgtttcatcaacaatatataaacactagttataagaatgactgattttccatgtttgccaaagccaattgttctgaacttgctggtattctttagcaaactatctgtaatatttgtgatatgttttcaataaaatctaaaagagatcatatagctgatgctaacagaggcattccaaaatgtgaaagaacaatctaataagtaacaatggtgtacctgagtgagtgagtgggtggatcatttgtcataaatcctacccaaacgcagatttttgatcaaacaaatcttttcccaatctgcaccaatctccttttcgcatctccttaataaggtgtcacactcttcaatctctagtgtctctagaagtttaagctcccgaatcgattccggcaacgatttcaaacgatgacataaacaaatcatgagtttgcttaaactatggagtttgcctatccattcagggatttcctcagtaccacagcgccagagttggaattcttgcaagctgacaacatgttgaagcccctcaggaagactcaccaagtttggaagacaatcaaatctcaagaattctaagctttttagagttctccactcaatttcatcaccatagaagttttcaatgcctacaatccggagagccttcaagttggagagtggtagagatgatgacgaggacgacgaggatgatgcttcttgaggtgcagttttccagtttaaggtgagttgaaatggcttccagcaagttgagtccagagctaaaccttcctccagagttgggaatagaggaatggaagtgagtttgggacaatcctcaataaccaatttggaaagacaagggaatgaaggcaacacatcaacattcatgacttcatttctccaccaactctgtagcttgggtagttctgtcagccatagttctttcagggaaggaaagaagggtgtggctttctcattctccgaaatatattcgagtttgataagttcgtccagtacaagtaccttaagattccacaacccttcaagtgctggtaggcttctgcagttaacacatttgcgcaatgaaagcttgaccaaattgcttggacagttagcagagaataagatgtttcccctaaaaccaagcagagtcaattctttaagagctaacaacaactcactctgtagtggcgttttgtgctcattggactcaggtgcattactttcccattgcaaagacaatgattgaacccatgataccacatcattcaaatacctgctcatatcaaacttttcatgccccaaatttctgatatcaacctctttggtaaatgcattaaatccaatatttggagaggtgccctgatcacttactgcaagttgagataatatctgaagattggtcagttgatgaatgcctcgaggaagactggtcaaatgtagcagccatcaatctcaaga

SEQ ID NO: 240142 - DNA, 1904 bp, Cannabis indica
aaacttttagttttttttttttttgtatatttatggtaattttacatggaaattctattgcaactagcgctgcaacttaaattagtaacaaaaaatcgtatagaaatctctattgcaactagcgctgcaaccactttggaaactcaaaccgtaaattaaaaaaaaaaattaaaaaaacagtatttgaggtaattcccctaaaaaacaataagagtaaagtttatttagattattattattatatatgtatttaatatatgtatatataatatgttgtttttattaataaaaagtataattaatacaattttttttttttttcaaattagatatacaaattatttttgagaaaatatttgaaaaattctcagcttttactcatagaacagatctatatgttaataaatttcagcatttattatagtaagtaaccattagaatatataatattaattaataaaaaacagtaacggaaggaatagaagttgttaaatgattaattgttgaggttaattaattaaatgacatggccttttttaattggtttgacagaaaattggacagcaaattttgacagaggatccaagtcccgttaggtgaccattaaacattgacaagtactgattgtgattagcgtggttagaatccaaagaatagcaaaatataataaaataaacttttaactagtaagtctttagttattaattttagttctatttctacaaaattttggtagtaaaggtgtcttggttgtaaaatccaaacaaatagaggctggatctcagattataaatttaaactgttatgtaatatgtatattagctaatagctgctttttttggtttgggagcaaaataatattttttttggctagtcattaacttttgtttgcaatatacataatatattatttatatatatattttacttatttgtgtttaggatattgcgatatacataatattgttagaatggattctgtctaaatttagttcacatcatttaatatattatatatttaaataatttattaattaaagtaacaaaaattatgaaaaaagaaaagaaaaatataataatatttttattagagagaaataaataaaattgattaatttattttataacacttgtatattcttgaaatttaggataaggtgaataagattatatctcaaaaccaatctcaaaactaattggtaatgagagacgttagcaatgtagactaactctaatacatcctcttaacatttgggtctggataatatgggtattggcacacattgaccgaaaggtcccaaatgaaggttagaggggagacaacaattttttttaagtttggctcgtttttttggatctgcaacactttgggttcacaacgggttacaaacgactcttttatggctcgtgtactgacgatactttgggctcacaacagatcacaaatgactctgaaactgtgttaaaatttgggataaggtgaataaagttccatctcaaaactaattggcaatgaaatgagtagcctattcatcttatatatagtattttattttcacacatgaatagtgtaagactaactctaatatatatcatctctacatttagttaatttgggctattttttttagagatatttttacaccaaatacgaaatttctccaaaatttacttttactgttagagattttattacaatagaagataaactaagtaatatacaactcaattgtaaaaataatacaaggacaagtaaatagattgattaaatatatgttacacaatacacatatatacactatatattgtatgtatatatatgaaaggtagaagaataagattacaacacatgtaataatatatatagcaagagaagaatatatatatatactcattcacaacct

SEQ ID NO: 240143 - DNA, 1207 bp, Cannabis indica
attccagctggctctatcatattcgaaagcctattcaacgagtgcctttggttcgtgatcctgaaagctcgtatatattctcaggcatactaagactaatgccgacatggagatctcactcataggagagttagttaagttagttattgtctaactaacttaacaacttcgtttcttgtagccactgactttaggatcttgatcttaaggctataattaccatccacacttaatcattttggaggagaaaaaaacgttcaaatgattcagattgagattcagagttagagagagaaagagattgagaggtagagagataggtactgagaagaaagagagattgtgtttgggttttgtatgaagaatcttttgtagatgaagaaaattattaggtaagagtgtgagaatggaaacactttgagagaactcaacaaggaatttgtcttgactgtaatgtgcctgttcttgctcaatcaattaaggagatttggtggtgctccagaactggagtagagccatagatcacatcgatctatcggacttgaaccagtatatatcttggtgttaatttctttatgttatacatttattgtttctagtttttaatactctgtttgcatctgtttttcatccgattattattcttgaattgttaatcgtgtttttgctaattgtttaaatattaaagttttattgatttatttttgcattgttagtctattagggattgttaggttgtttactgtttcattagtttgttattaatgttattattactgttggttggttagtttgttacaactaccatcttgtatctcagctgtatataaagccttgtacctattatcaaataaatctaataatacactttctttctcttctcccctattttctctctttgttcactaatatggtatcagttgctaaaatccaagaacagtaatcttcatcaaagcttctactgtctgcaacaatggtgcgcacgagagccaattcatcagctacctccactgacaatcccgtggacgaagctcctccgaattctgctcttccagcatctcagaattctgcagacattccaccacgggttcctgttccagctgctgctactcatcacaacaatggtgatcgaccggcgtatgaggatgtacgaagtccctactacctcagcactgcagatcacccaggcttagcccttgtcactccg

SEQ ID NO: 240144 - DNA, 785 bp, Cannabis indica
aaatattttttttttttagaaaatacagtactaaataagcatattccctacgaaaattgataaatcgatgaaggccaaaaagattggacttctacattcttgaagtaaaaatatctctttggttaaatgattataaaaattaattagttaattagataaaattctatctattttttcattgttaattaatggattttatttaatatatttcatttataaagaaaaaagttgcaacttagagtgagtagtttaattcattgtttgatttattttatgtactaaacaaatctattaggaatgatattaacaattgcaaataagatacggtgataacatcgaatttgaatgtaataacgagcacaaggaagatacgatgataacaacaattttgaaatcatctgattagtttctataaatatatcaattgtcatatatattcttaattctaattcaatttattcaaacgatatatgtcataacccgagccctaggctgtgacaaatatgtaatatctataacttggatggtcaaaggttacactttgacccttgttcgaaaataatacttacaagcgatcattttgtttatattacaaaaataaataaaatacatatttaaaataatagaataactactataacaaaataaaaatagttataataaaataggaccactcatcaatatacatatatatgtagaacaataatattcctacacttatgtagtcactaaatgatcatatttaataataagaaaaataccaaaataatactaagcatccatca

SEQ ID NO: 240145 - DNA, 1714 bp, Cannabis indica
attaaatattatcatgaaataaatcatgtgaaccatgcaacataaaatgcgatttttgatgtttattaattagtaaatctgattatattgaaatgggttttatttagggcacaagaaacaattgcagaaagattaattctctttgtattgatttgggtttattgagtttttccacttttattgtttcagatttttgaaattctctttgtgattttttcacacttttcaaaagcccattacaatccgctatcaaagtctctgacccatagttgatcgttcctaccaactcctttaagaatgttacagtgcaatcttttatttgcttcttgttgggttcttttcagcactagtagtctagtattgtttttttattacatacatattgccaagccactcgttaaggtcattgttttttttgttaatgtaaaaaattcaagttctttttctttttagagagctcttcaattattttaagttttcttaattttgtaaaaaggatttgatcagccatggcattataaaacttaaggattgataataatgaaagggtatatttctttctcttcaatttttttctctgttttttttctgcttcttctagtttttaactttattttgggttgtcttcattcaagttgtgaagaagagtctccctaagcctgcatcgtccgagttcatcaagtaatccaatcctttgaatttaaagtatcaatcgatctatacctatctccactcaacaaatcccagcaatttctcaggctacgagtgagtatctctaatcttgaagttgttgttgtcttttttgaggacgtcaatctctatttagattattggtcaattatataactctgagttcttattagcaatgtgtcttcttaattttttgttgtttttcttttcttgattctatgctatatgattttaatttattaataaataatctctttactgtgcgaaaaattaatattatgtgtatttgattctcaaccttgaaatgaggagttaattatcaaagaaagtgcttcttgaactttagaatagaattctatctatcgctattttcaactctattattctaaatttagttactgatattttttgttttttatggacttgtgaataatatgtcttgtttttttctttcaatattctatttttgtccacttcatttgaaggaaataatgcaactttttaaatatgctgacattgatacaaaagattttataattaaaacacatgttttcgtatttattgaggccatctactagaaaataagaacaacggtaatgtataacaaggttgtacactttcttttttgggaaaaaacttccctgaaaaaaccagatttctctacatggtgaaaattttttgcctaaattttggttgccatgcaatagaaagcaaatgaattcttgacatagtgatttgtcattgtattttttgcttcatatgcaaaagatgtaataatacatatagctattttgagtccattgaaattagtagaaattcaaaatgactgatatctttatcttgtcattgttattggttgagaagtgaagttaggtttcttgaggtatgattttttgctccaagtatgggcattcaatgaaagtggctttcctacgagttagactatactgaccaattcggtagttgtttattttttttagaaacctttttatttatgaacaagggaactaagccgcgcttcgcg

SEQ ID NO: 240146 - DNA, 2115 bp, Cannabis indica
aaacttgtttaagctaattgtctttgtaattttgatactttattaattgatttcattctctggggcgtggccccgtggactaggagtgttcgggagaacactgataccacgtataaatctcttgtgttcaagtttatttatttttcctgcaaatatttttatattctgcctgttcagtttttgctgtagcagaattactttctgctgctgcaaacgcgtacaatttttatattttcttatatacaactgacatttgcaaaaacacggtttttcaggatttaaagagaagagatcaaggagagatggcattcttcaaaaaaaatggaaaattaaaaattatattttaattaattataacatatatatatttgtaattaaaggtaatatttctttacaaaatattagatttcataattagacatgtatttattataagtaccttaattattgaacccaaattttcttgttattttttttttactttaaaaatatttcatattattaagatatatggttatatcaatttttaacatatattattgcatgtagaaaaataaagtaagctccccttcttttacaaaataaaaactatcccctctctcttacataaaaatatatgtatctctcaatttaacttctgagtccgtcttctttagatatattgcattttttctcacagattctcacacaaagtgccacctcttcttctgcattaaaaatgtaacataatattaaaataaattaaaaaaaaaaattgaatagacttcgtgtctattgttgttatatattaagttgtatatattatttattacaaaaaaaaaaagttgtatatattattatataatagaataatgcactacaaaaaatcttatttttagtcacaacaaaacttgtgactaaaagtgaaaaaaattgtgactaattatagatcatgattcttatgttgtgattaaaatgtccgtggctaaaagtattagtcacaaaaatttcaatttgttgtaactaaatgtatttttagtcacaatacttgttgtgattaaaactaaattagtgacaacttgtaactaaatactatgttttagtaaaaaaaaaacatttttttgtgactaaaaattacatttagtcacaaaaaaagtatgatgtgactaaaaaattgtcactaaaagtaacatttttttgtagtgatgggcggctgaacttttttatctttttattttgagtaattttacggtatagtaaatacttaagtttaattttcagttgcaaattttaatcttttacggtaataatacataagtttaatttagagatttttttcaaaaatatacgtaaaatgtaatctaattacaaaaataacttaacatatctcaattacaataatgtcttgttataaaaaataccttaattccaaactattagattacacttacctgtcatatgcgtataattgtttttctgttatatgcatgttctggtgttagttaatttgttagaagattagttggtagttaagttagtttccaccgactttagctagttggttatctgctatgtatatatatttgtttttctgttcattttcaattcaataagacagttctttcttttcttctcaattgttcaatactgatctctattcatttcgcaacatggtatcagagcgagaaagaatgctttcccaaatctgatctaattcgcttccaccttcttcatgccttgtcgtgcgttcttctccgacagaggcgatgaacaattatacttcctgaattcttccactgttccttctccgatcagtactctgcatcgtgtactctgtcatggttcctctgttccagcgcttcttctacttttcttttcatcatgtccaacgaaggacaagaaattggatctggagctgaaattcgaagccctgccatcgctggagatcaacttcgaactgcagatcctaacaatcaaagtcttcgtgttctaagctcaagaaacccccttgaagatccctcggatccttattatctccatcatggagataaccctggtaatatactcgtctgtcaacctctgactggccaagacaattacgtttcttggagtcgtgcgatgcagcttgccatttct
